United States Patent Application Publication US 2015/0141320 A1 - sequence listing, part 4

SEQ ID NO: 82 - DNA, 45297 bp, Homo sapiens
tacaggtgtgagccaccatacccagccaaagatttttaaaaattgtctttgttgccctttttttagttacagaagtaaaacagtatatgctgtaaatgtttcaaaccgtgccaaagttaaaaaataattaaaagttttactcactgcctttcaatcctttgtcccagaggtaaccagtaatgaagagttttatgtgactcctttcagattattgaaaatgcatatttgtgcaaatataatttatttatatggaattttgtttttgcacttacgaaagtggtatcaaattacaaatattgggctgggcatggtggctcacatgagcctgtaatcccagcacattgggaggccgaggcaggtggataacttgaggtcaggagttccagacaagcctagccaacgtggtgacaccctgtttctactaaaaatacaaaaattagccgggcgtgttgggcaggcgcctgcaatcccagctacatgggaggctgaggcaggagaatcgcttgaacccggaggcggaggttgcagtgagccgagatcatgccactgctctccagcctgggtgacaaagcgagactccatcgcaaaaaaaaaaaaaaaaaaaaaattacaaatattgttaaataatttgcttttttcacttaatgatatacctttccgtgtctttttttttttttctttaatggatgcttagccattagatgtcgtatggtgtaccataattggtttaactagtgcctctcactattttttaaaaaaatattactcatgctgggtgtggtggctcacgcctgtaatcccagcactttgggaggccaaggtgggtggatcacgaggtcaagagttcaagatcagcctggccaagatggtgaaaccctgcctctactaaaaatacaaaaaattagccaggcgaggtggtgggtgcttgtaatcccagttacttgggaggctgaggcagagaattgtttgaacctgggaggcggaggttgcagtgagccgagattgcaccacttcactccagcctgggcgacagagcaagactccgtctcaaaaaaaaaatttaaaaaaatgaaatatatatttatatattactcattaggccaagcatgttggctcacgcctgtaatcccagtactttgggaggctgaggcaggaggattgcttgagcccagagtttgagaccagcctgggcaacatagggagaccctgtctctataaaaaatttaaaaattagtcatacatgtggtgatgtatgcctgtggtaccagctactggggaggctgaggtgggaggttcgcttgagcccaggaggtcaaaaccagcctgggcaacatagggaaaccccgtctccacaaaaaattttaaaataagctaggcatgctagtgcatgcctatggtcctagctactggggaggctaagttgggaggatccttgagcctgggaggtcaaggcttcagtgagctctgattacaccacttcagtccatcctgggtgacagagcaaaaccctgtctcaaaaaataataataataataataattgctcattgaatatccttgaacatatatttttgcaccctcacatgagaatttctataggatatagtcctagacatgaaaatttcaagtcaagcttatatacgtttaaaatttcggtagattttgccaaattgccatcccaaaaactataccagtttacacctccaacagccacttagacgactataacagtatattacaagcatttctctagactagaatgctctagcttagaaatcatgtgttctcctaaatgtgttctgcctgcctttacatgatgttcttaaaggattatgaaaggtggagtggtattgtccattttccccctggagataaccacagagtcagactgggcctagaactcaagtttcccattcctactctgccactttgactgattcttcaaaggctttagaactccagtaaagtcttatacagtagcttaaacctgatagtcttgtgtgttccttactcactcacctaatatttgtggagcacgtattatatgctaggtactttgttgggtgttgggattatagcagtgaataagacagacgtgatttctattgcccttagcattgacaagctattggggaaatcagataattaaagagtattataaaatatggtgagcattatgaaagaagctcagggggggcagaataaataccagagggcctaggagctgtggacaactcctttgagaagttgacctttgagcttagacttgaagaaagagtaagagttaatggttggggagtggaagagcagtcagggatatttgagctagaaccaatgggactcagtgatggagtgtagttagttagagggaagaggaaggagtcgggcatcaattcttcatttcaggctggggcagctgggtggatggtggtgccatttcctcaaatagcagacttaaaaggaggatctgcccaggaggagatgttgagttcagatttggacacaatgagtttgaggtgctacatgtgaagcatccagacactgagaagctcaggagctcaggaagagaggtctaagatggagaaaggtaagaaccatcaacatggtaataatcattagtatcatagttctgatatctagtagctaattagggtactttctgtgtgcctggctttgtgtgcaccttaaatactttatgcacattaactcatttagtcttcatagtaactgtaggaagttattactgttactatccccatcttacctgtgaggaattgtggacacagatgaacttgctcagggtggcacagctcagtaatggcagagctggaatctaaactcaggctgactttagacctgtgcccttcaccattgtgctgtaatgtctcccgtaacatttgaagccttaagaacggataactggctgcgcatggtggctcacgtctgtaatcccagcactttgggaggccgaggcgggcggatcatgaagtcaggagatcaagactatccttgctaacacggtgaaaccccgtctctacttaaaaaaatatataaaaaattagccgggcatggtggtgggtgcctgtagtcccagctactcgagaggctgaggcaggagaatggcgtgaacctgggaggcggagcttgcagtgagacgggattgcgccactgcactccagcctgggcgacagagcgagatccgtctcaaaaagaagaacagataacttcacctgaaagagaatgttgaacaagaaggtgtcaaagatatttgctttttaatttatatcatcctgtattgtatcatttttatgtaataagcattgttcatgtgtcacttgtgtaattaatttttaaaaatatttttatagaaaaagggtagacccaggattagaaagtgcatcagctccatttttctccttggttaagtctgtcatgatctcctacctttgtgtttgtcaacaaagatgattcctgagcttgtaagatggaggcatgagatctcctccaaatactttaagtccgtagagcacataagaggtaataaataactgggccgggcgcggtggctcacgcctgtaatcccagcactttgggaggccaagacgggtgtatcacttgaggtcaggagttcgagaccagcctggccaacatggtgaaaccctgtctctactaaaaatacaaaaattagctgagcatggtgatgtgtgcctgtaatctcagctactcgggaggctgaggcaggagaatcattttaacccacaaggcagaggttgcagtgagtcgagattgcaccactgcactccagcctgggcaacagagtgggactccatctcaaaaaaaaaaaaaaaaaattatagccaatgtgatggtgtgcacctgtagtccctgctactttgggggctgaggcaggaagaacctggctggtcgaggctgcagtgagctgagatggcgccactgcagtcaagcctggggtacaaagtgagaccctgtctcaaaaaaaaaaaaaagaggtaataaataactgattgatttgtgcctcctcccttatacatcggttccttctaatgactccatctcttccaacaatccttgtagcaggcagcatgtcagtagttctgttttgtgtcttcacctagggaaaccatgagcgtaaggcagaaaacctgaccatggggatgccccaggaccacctttccctgtaggaaacagtctagggagaggctgtcagagacaggaaccactgagccgctttgtgcacttctccaggtgtgcgatgactgtgtggtgttgcgtagtaacatcggaacagtgtatgagcgctggtggtacgagaagctcatcaacatgacctactgtcccaagacgaaggtgttgtgcttgtggcgtagaaatggctctgagacccagctcaacaagttctatactaaaaaggtacgcaggatctgtgtttgggttggggctagtaggcattgaagaccaaatagtgaatttctctttgggaagttaaaattccaaaacacacatctggagccacacttctgtctccagctgttgggtggagtacctaaagctgtctctgtcaagccaactaggcctaatagtagtcacaatcggtattaaccaaccatatctagcattcctacacatctgtacccatgccttctttaaagccatactattcatatgctccggatctatcattcataacctcaacaatgaataagacatccgaaaaataggaggactacttaaaattttacccctcacttcaacctccagccttcagtggccattatagagcagtgggtggggaaccctggacagccctcatgatgggaccactctccccctgtgccacagtgtcgggagctgtactactgtgtgaaggacagcatggagcgcgctgccgcccgacagcaaagcatcaaacccggtgaggagagtttttcctgagagtgtcttccctgtttctaccagtccttctgagtgtcaggggcctggcagggaagtcaggggtgggattccccacctcaccagtgagctgatagccccctccctcaccacaggacctgaattgggtggcgagttccctgtgcaggacctgaagactggtgagggtggcctgctgcaggtgaccctggaagggatcaacctcaaattcatgcacaatcaggtaggtgcgagcggcagcacgaggctccctgtcgttccatctgtaagaaggaccaatgtccaagcccccagtacttccccagcaagcatgagagagggccctctggagctagagggagaactggagcagctggacccaggaaagaaaccccaggggagggcacagtgacgttggcgaccacctggcgctgtgaaggtgcaccagggagcccgtgggggaggctgggcaggagcgaggccaggtggccacgctgccccatccgttggactccacacagtgtgagtgggagcgtctcacttggcccttcccctgcagtgtctctgccttcctctattcccaggatatgcttctgcttggtggttttgctttgagagtctagactggccgatctccttgtgtctttctggtgtgcgtgcagcttgcgtgtgcgtgcgtgcgtgcctgcgtgcttgtgtgtaagtagcttgtatctgtcctctctggagtgtgtttatttgcctttttcttctgcggattcttcttcctgttcttttccttcctctgagtgttcccactctgtcccctgctccacaggccccattccctttcttttgattggggagcacttgtggatacatctttccctcattgtaattccaccataggagctgacttttttttttctctcttggtcttttaacacagtgttacctttttctctcagtggacattccttaagctaattcctttctgaggccagcgcatcatcccaggtccgttcacagctctgactcctcacacaagtgccttccctcctctttccctgatgtccgggttcctctccctgaggctctgagccagacccaaatgtgtgaagccccacagaccctggccaggccgcagaccctcaggggaggtggatgcctgactgacgtggctgtctccctccctccgctagccgttgtagctctctttcaggaacgtagctgggcagctttggtttaacaggaaatggctgcgcaggctgccagcagccccttagtatattttcaatttaggacttagggcagtagccaaccccaaagaccttaggaccatcccagagaggggtctacctaagtgcttttctggaccacaaaggtgtcagtacttcttggggagcagacttctgaccacattttagcgccgtggcctctgaagatgagatcttgctgagcaacgcccaggtgctctgccctgttcctcgtcctgcccttggcatagccccactgggcagccatccaagccagtctgtggttgaaggcttggcccctagaagatagactgcagagaaggggaggaaagcccgggttctcaatctcacctcacagttagtaatgagatagcgacctgccccctattctgccacacagtgttcagttggagtggaggaggcagcagacctcctggtggagctgtgcagtctggggtaaatgggaaaagcacaggcttcggtgtgaggacatgcttggatttgaagcccagcttccacgttcatgggcaaagaaactttctgatccatagtttcctcatgtagaaaatgggggtaatactatttactgtgtcacgtagtaggtgcagagattagaaatcgtatttgtaaaaccccaagtaggtgctcagcaagtggtagctgatattattatcaccacatacctcttgggagatcctggatcctgtttcaaggaggataccaacacctcccaccctgaggacagtctgaggggagctttgcgcccgtgccagccctctgcgccggaggaggatgcatggaagggtagagacctaatgggctgagtggggacccctggggcactgtgtcttacaagcactgccctgggcagagggtacgggcgggcagcccaggccagcagcagggccttcgggttgggtttgaccattcaaactaacgccttcatttctctcccatgctttctcctccggccaggagcggaaggtacatgccctttctgctatcttcgcttcttagcgcttttgagttgtgtgcgtgtggattcttctgtcctctctttgggaaatagactttctttgtgtgggtggggctgtagctgggagagtgtgctgtgtggggcaggggtggagcctgtgggccttaccccggcctccctccctctcttgcaggttttcatagagctgaatcacattaaaaagtgcaatacagttcgaggcgtctttgtcctggaggaatttggtaattacactattttgctcttaggtctggactcacatggcagtaactcaaacctcggagctccagaggagggtctaggggcagggagaagaagaacctctgtagagaagtcaggaggagcaggagtgacaaggaagaaaagggacccctgagatgagagccgggatgtggaagggaaagatagataatggatcgcagaagagcaaatggggcctcaggtgggtttcgagtttagaggtggtcctgaagcagctcagtgaagtagcaccacctccccgtgctgggccagccagtggtcagaaagtttgggacacagcagactggcgacccccaagctccactatgtccatgtcacctgctgcaatctctctagcagcccagtgcgctagccagcctccctggcgccgctctggtctccacctggcctctgtgccagacaaaggggcaccgggcgtcgcaggcagactcacttgagggacagaggagtctagcgggacagctgtagccggaagctgggagccagcgctagggagtggtgtagtgggttctcaccctggggctttgagttcctgctgtgtttgtgcttcattcttttgtgcccctcatcgctgctatgaaaaccttcgttctccagcaggtaaagtgacctcggctcgtgctgcctctccccaggtctctgccttgggccctgccctgggtgggtagctcccatcgaaccagctcctcacactgccagctcgtctcttcctttctcccctaccctctttcttcctaccttgcctcccccttctcaccggctcactggactttcctccccgtgtgttcccttctctcttctgtcagagagatacttgggggaatcttccaactcgggagaatggcctggggcttcttgctctacctttgatgagtttattccctgctgaccctgggttcccccaaattctacctcccagggtcagaagaaggtacggccaattctcctcctgccttttctggcccccagggagatgccaggcccctctgctcccagtctcaaggggccatgatggtggctgagcctggggggcctactccttcctctggccaagcagaacccctgcatggctggagcggggggactctcactcttgccttctgggctgtggacatgtgtgtattttgcctgatgctccctgtcacctccctccctgggtgctgtactcgcctgtcttctgctgggtgtgttgctccagagccctcagacgctctccctcacacaggcaggtctgggcttctcctgccactcagggaaggacactgccacatcctgtgggtttatatcatgttacctcttcatccagcctcaagaccctctgtgtagggggctgggaataacgggaactgtgtttaacatgacccaattttcaggctggtgacgagttcacgggtgtctcagcaaagttggacacaagctagagagagctctctcctcccagccaaaacctgggaattccccactgcagctcctcaggggccctggacagtagctgtgaccaggctggtgaaaggcccgtccctcccatccagggctttcaaagaagtgggtagaatcacggccatcaagtaaacgccactgcggatgacagaggcctagctgaggaggctagggccatgtcctcccagctggcagagtctggacagagcctctggtggcctctgccctgtcatagcctaagctgctgcagccactgtgagaggccacagaggggaaggggaccctgacgccgggcgctgccgcctgggggagcatggcacgattgctcttagtgttgaactttctgttttgtctcttgcccgtccggttttagttcctgaaattaaagaagtggtgagccacaagtacaagacaccaatggtgagtgtgccgctcaaccctgatgggccacggtgcgcagggctccctgggggaccttcggacaggaggaggggagggccctctgagcgcacaggggtgagtggggacctcgttttgttgccaaaggttcaactcaggctgaaacaggtcttgagccctgagagacagacacacacacacggatcccctctcccatggggacagcttccttgcttggagctcacgtttagcccagaggcccatgcccagtgttagggcaggagttgcccattggcagatccttcacatatggagatggaggagtctcagtatcgtgatccgcctggttttctctcctctaggcccacgaaatctgctactccgtattatgtctcttctcgtacgtggctgcagttcatagcagtgaggaagatctcagaaccccgccccggcctgtctctagctgatggagaggggctacgcagctgccccagcccagggcacgcccctggccccttgctgttcccaagtgcacgatgctgctgtgactgaggagtggatgatgctcgtgtgtcctctgcaagccccctgctgtggcttggttggttaccggttatgtgtccctctgagtgtgtcttgagcgtgtccaccttctccctctccactcccagaagaccaaactgccttcccctcagggctcaagaatgtgtacagtctgtggggccggtgtgaacccactattttgtgtccttgagacatttgtgttgtggttccttgtccttgtccctggcgttataactgtccactgcaagagtctggctctcccttctctgtgacccggcatgactgggcgcctggagcagtttcactctgtgaggagtgagggaaccctggggctcaccctctcagaggaagggcacagagaggaagggaagaattggggggcagccggagtgagtggcagcctccctgcttccttctgcattcccaagccggcagctactgcccagggcccgcagtgttggctgctgcctgccacagcctctgtgactgcagtggagcggcgaattccctgtggcctgccatgccttcggcatcagaggatggagtggtcgaggctagtggagtcccagggaccgctggctgctctgcctgagcatcagggagggggcaggaaagaccaagctgggtttgcacatctgtctgcaggctgtctctccaggcacggggtgtcaggagggagagacagcctgggtatgggcaagaaatgactgtaaatatttcagccccacattatttatagaaaatgtacagttgtgtgaatgtgaaataaatgtcctcaactcccttcaggctccctggctgccttgtgttaaatgacacctcctcttggctcaggcctgaggaaagctatccctggactctaaaaagtcacctcaggctggaaggaaggaaggagatgaggtcatccatgtccaagctttggcacacggaggccccagctcccctgttctgggctcctagagcaaggctgcgggaggagctttccttcctgggcacctgagggccctgcagagagctgggctgccatgaatgaacaggctgctagagggagcagccagactgggcgtcctcacctgaactgagattaagtgaaagaaagccaaggccctggccctctccgttcccttacaggtgggtatggtcgagagaggtgtggtgattcagccagggcctcccacagggccccggactcctggccaggagtgtcttccactgcatagaactcccagaagctcccctaggagctgccttcatggaattctgtcctggaaaaacctggctgcactctcagggaatttgagacctgctggcttcccgcgcccaaaaggaaacagatgctcggatttaggctccccatgggggaagtgagagcagagtggggccctggccctgacacctttctggtgcccagcgtcctggactggattgggttgctgtctcccaccggggatatgggtctgaacccgctgctggcttattgctggctgggactccaaagccacctagtgcagctccaccccagcacaatcacaacactgagattctgcctcaccccacctccaggcggttgtgaccacggcccctggcacaaggatcacgctgagcacctgggaccagttaaatgcactttccgctgtcacagctcagtttcatcatctgaagagtgaatgctgtaggggaagacaggttccttctagcgttaatgttttatgaactcagaaaccactctgggcctggtttaatcatcgggaaaacaaaacaaaaaacagtatctgctctcactttgctgtgaagatcaatgtccctgggcttttttctttttttttttttgagacatggtctcactccatcacccaggctgaagtgcagtggcatgatctcggcccacctcaaactctacctcctgggttcaggtgattctcctgcctcagccttccaaatagctgggattataggcgcgccaccttgcccagctaatttttgtatttttagtagagacggggtttcaccatgttggccaggctggtcttgatctcctgacctcaggtgatcggcccgcctccgcctcccaaagtgctgggataacaggcatgagccaccgcacctggccatcccctgtgcatttttatgaaaacaggcacaccgaaattgagaagagtgagttctctgtgactgcacttatcttttattgcccaataaacattgggaagacatagcaggccagaaaggcctgtccccagacattgtttcttgaggccaccctccttttaccccaaagatccaggggcttccttcaggagccctgtggaccagtctgtgcaacacccactcaggactgcccgacaactgccctgctgatcccccatcgcagcacaggagacacacttgtcacacatacatccaacagtagggaggggtttccccaacttccctccaggctcctggcacggggctggcatccggttgtacctgcaacacaggttatcttacgagtgaatggagggcccctacagcctcccatttactgatggctgccccaggaccaagggccagggctcagccactgacttgtgccctgggtgtcgggtggtacatacctggccatccccaggagccagcctggtcactgaggcactgcagaagaggaggccatgtcactgtgtcctcccagccttctggaagctattgcccatctgggcgtggcagggtccgtgcccttgcagccagggcaggtgcttggccgaggacaacggagcaaagcccagggtccccactgccgcccgctcttcccatctcccaggccctggccccgagggctcctcacctcgcacctccaggcggcactcacaccgtgcctcgccctgtaagttggtggccctgcagacatagatgcccccgtcaaaggggcagggctttctaatctccagagtcaacactccctgcttgctgaacatgcggaagcgggcgtcttctcccaggtccaggccattcttgaaccaggaaatcttgggctataaataaggtaaagagagggagggaagccatccaggctgagaggggacctggcagggacccagggagacacatctgtgtttctactcggggggtcccacgagagtccctgactatgcccaaggctggaaacaaacatggaaccaagagtgagtaccatggccctgcccagggggaggaacccggtccatacaccccaaggtggagagaaagcaggggagacaggctggggagaggactgctcaacgtcggggcctgtgagccctgcctcctggtcggcctggaccagcgcctaaagttccctaccttggggctaccccggacagcacagcagagcatagcagtgtagcccgcgatgaccgagcggttcaccaggggctgggtgaagcttggggcctcggagaagtccagggccttatagttgggtggctcataggtgatgcctgttggtgacaggacttggtaccgagagggccacacaaagctaggcccctctccctgttcccacagcctccctgccccagcccctggttggaagaatgagggtacagcacctggtctggggataaagacgggctccttggtggtggccgctctgtcactaaagccaaccatattctggctgaagacgcggaagtagtagccattgccaatgatgagctctggcaccacgcagtgggtgcggcggtaatgctccaagacggtgaaccactcctgggggcagggagggaggggaggcatctctgggccaggcccttcctgatgccgagagcctctcctgggtgcccttggcatctccacccctactatggagggattcagatcagcagagggagggtgaggggtccacggtgaggacagtgaagggtagctgcggcctgggtctgccgggcctaggcagggtgcacgtggggaccccagaccctgggctcaccatggtcttcttgtcggctttctgcactgtgtacccccagagctccgtgttgccgacatcctggggtggcttccactccagagccacattaagaccccaggcgtcagtcacccggagatcctggggaggacttggcttgtctgcgggagacagacccagttgggtcaccacgcctcctgacagtgagcagggggtcactggctccagggaccaccccacccctgccaaccagggccaggcctgctggggcagtggactggaaaatgtgagctgtgggttgggtcccctggccccacccttggccccagcagcccagcccagggaagggaaacaagggggctcaaggaggccttggccacgcaccaacaacctgcagcaccagcgtggccttgtcctccatgttctcaatgcgcaccgtcacctggtaagtgcctgaatgcacgcggcgagcggcccggatgaacaggatggtgtctgtggggctgttgcggatgctcacctcctcgcctgccaggggctgcccctctttggtccaggtcacctgaggccggggcttgccctgaggggaggaaaagcttaaccctgaacctggatcactccaagggccggccgccaccccagcctctggtacctcagatcaggccagccctgagacatcagtccactggatgggaacaacacactatagcctctctcccctgggggacagggaagggggccagtcccacctggaaagggatgagaaggttcacaggctccccgaccttcttctgaatggtctggcgcaggtgcctgggcagctgaagccgtggccgttctgtgggtatagagtgggtagctaagtgagggcccgccacagctctgaggggctccacagctccaacctcccttgagacaaggcccagagagctgcagctaagaaaaaagctgcctgctgggccctgcgcctcctttagctcctgctaacacagcaactccaggctgcccaagcccagctggcttccccgagcctcaccacttcaaaaggcagggatcagagagggtaagcaacttgactgaagtcacacagctagtaagtcatagaccagggtgtaagcctgggctttgacaccctatgccctgtgttgttaccacctgagtttgctgcctcgttccagctttgagaaccaatccttacaaaagatggaccctttgttgggacaaggaacaaaggaatgggaagtggatcccagagggaccaatctgactacatagacaatatttacctgttggagctgagacactcctggaagagagcttgggtactgtggcttttactttccctgttccagaactaagggactgacatacaccaagagagccctttctgcactttttttttttttgagacgttgtctcactctgtcacccagactggagtgcaatagtgtgatctcagctcattgcaactgccacctcccgggtccaagcgattcttctgcctcagcctcccaagtagttgagggactacaggcacgcgccaccacacctggctagtttttgtatttttagtagagacagggtttcactatgttggccaggctggtctcaaactcctgacctcaagtgatctgcctgccttggcctcctaaagtgctgggattacaggcttgagccactgtgcctggccaccctctctgcactttttccctaggcctagcgcatggacgatggctccaacccctcctgtctctgcccagcgttctgggcagagcattctgggcctccccaactgtccccacctccactggacaccaagggcctggggtgtcaatggcgggtcttgtgactgcacaaaggggcactcacgcaggatctcctgcactgtcaccggctccgtggtggtaacaggggctccaggccctgccatattgtgtgcccgcactcggaaaagcagccgggcccccgtgggcaggtccttcaccagtatcgatgtgtgctctgtcagcccctgcagggcagccacccactctgagcctgggggtggggagggggaggcaaggccacaggctgtgtcaccactgacaccccactcccactgcccactcctctgataggaatctccaggatttaaatatgtttttttaaatttttatttgtttatttatttttgagatggagtttcgctcttgtctcccaggctggagtgcaatggcatgatcttggctcaccgcaacttctgcctcccgagttcaagtgattctcctgcctcagcctcccgcgtagctgggatcacaggtgcccaccaccacacccggctaattttgtatttttagtagagacggggtttctccacgttggtcagactggtctcgaactcccgacctcaggtgatccgcccaccttggcctcccaaagtgctgggattacaggcgtaagccatcgcgcctggccttaaatatgtttttaaaatgtagttgctgatttcgcactgctcaaagaagtgttacagtcagctttactctgcatttgtttttcactaggcaagcttttttacttctgaaaacaggacagatatttctctgggtgtcctcaactttcggcaaaagtgggcctaaaaaacttgactacaggtgaatctgctcaatggcaaggtgagcatgttcttcctttggggaggggggttgggggcggggacactcacagccctctgggcagtactccacgctgtagccatccaggcctcctgctcccacgcgctctgggggccgccacttgagggagaccgtggtgtcagagacgtcctctactgccaggtgggtgggttcgctggggggacctgggcagaggagaggtcagagaggggtctgagcaagcctggggaagctggagatccatgccctagactctgaactgcccactggtcacatagggggcacttcctgttcagctggcttttggccactttaaggaatattttgtccctgttacaagacatgtctgtagattggcttaaaaacaaacagcaacagcagccaggcacggtggctcacgcctgtaatcccagcactttgggaggccgaggtgggaggatcacctgaggtcaggagttcaagaccagcctggccaacatggtgaaactccgtctctacaaaaatacaaaaattagctgggcatggtggtggatgcctgtaatcccagctactcagaaggctgaggtgggagaattgcttgaacctgggaggtgaaggttacagtgaccccagatcgcgccaggactgcactccagtctgggtgacagagcgagactccatctcaaaaaaaaaaaaaaaaaaaaaaaactaaaactaaaactacagaaaacatgggaatttcctggcacgtatgattaggtgagttgactaagaactgaacaaaccaggaatcagtccctaaaacgagaggcctggacccttctccccacaggccccgattcctgccatcttcccaagctgtgccccatccctgggcccaggggtccttggcctgcccttgccacaggcagctgcccccggactcacccaccctagtgggaacaggtgtcctcctgagccctgccacagtctcaacacctgttctgcccactcagaccccattatacagatgaggaagctgaggcttcagggagggatgactccagttggccccccggggaccatggagctgcctctgccatctctgagtcttggtccaggactctttccacagacagatgcccctgagacccctccactaactacagcccttgccccatcccataggtgaaaaccctgggttgaagggtgtggagaacaggggacaatgaacatttattgagcacctgttagatgccagatggcctgcctggtcatcccatatcatcctaacagctctctgagataggcagtgtcattattcccattttgtagacatggaaagagaggcttgaaacgtgaactaggggtcggcgtagtgtgagagtcagctccaccccaaccagctgggagatctcaagcaggtcatttaactgcttggagcctgtttcctcatctgtaaaatgcggctgagtatccccagtcgaggatgaaaggagactgtggatgtgagtgtctagcatggctgcctgcagagcacctgctattattggaggtttttaactggggagggggcggggggcaggaccaggccaggcaggctcaccgataggcatgaagggctgggaggcagggctgggcctggacatgccgatggcgttgaccgcgtagacgcgcatctcgtacaccacgccctcgatcatgcgccgcgcttcatgactcagctcctgaatcaggtcgaagttcagccgcatccaccggtagctcttcttcttcttgcgctccaggatgtagcctggctcaggggaggtggcagctctggtctggaacccaggcatccccacaccaccttccctcggatctgtttggcgccctcacacctccatccggtgcccttgcactcacccaggatgggctgcccgccatcgtaggcaggcggctcccactgtactgtgcaggagtcctctcccacgttgctgatcttgggggccgcaggtgcgtctggcacgtctggatggggtgggatggacccacatcagccctgccccgctcagggccttgagtaacgttgctcgtccccttcccactccaactaaccgccacaggctgcccccaccacccccagatccaaagagatctttctagaatgcatttctttcttcttttcctttttttttttttttttttagtgatatggagtctcactgtgttgtccaggctgggtctcaacaggatgcatttctgatcatgtcgccagccctccgtcaaccctttaaggcttctcactgcccatattcacccctgtcctggctctgatcctcccaaccccacccagtcctctcctgacatgtttcattcattctccacacccaaaaggccctttccctcctccacccctttgtacacagtttcctctgcctgggatgcctttcctcaccatcttctcagcctcctaaaggcatcacccccaggcacagggatggctctctgctcagtgctcccacggcactctggacatggctcatgtacagcagtgtcgcaggaaatctgctggatgcatctgcctccatctcccccagagcggggctccttttgggcagaaaaacctgtcctgttgccgctcggctcagggagcatgcccgtgatgtttgtcgagtggctgaatgagcgaacggatgggccctccttggggctgcccctctgtgttctccagcttggaccccggccggcctcaccgatgaccttgactgtgaggttgacctggtcctcgcccacagggttcttcactgtgaccgtgtagacgccctcatcttccttctctgccccctcgaccgtgaagatgctgcggtccttggtggtctccacgcggacccggccctcggtctcacacagcagctgggggggtgcagagttggggtgagatccaagtcagaccccagaggcccttgcagcctccgccaacagccagatgtcccgggggtccatggggggaacacagcctgtgggaagactgcatccacgtcagcatctagttcaaaatcatctctgtggcaccgactgagggcaggggctcgggttctagctttgtcacgggacctggggcaaccacctgtcctctcagatgagctatcatgaggacccctcaagaccccagccttcagaagaaccaacagtgccaggcaggagcaagaccccggcagctacactggcagaaaagtgtctcagaaactactcctgagttgagagggagcacaaggtcaaggtcaaggtcagcttaggatgaagggagccagggagcagcccagtcatgagggcttcctggcaatgagagggtgtccacatccttgtgatggccatcagcacacttcacagagaccctctgcctgaggtgtgagggccccacagggaccctgctgggggcagcaacacacccggccaagtgtggcacctccatggagacctcgccaagggctcggcaccacgtaggtagaaagtgatgaaagacaaacgagcctcctcctgacctcagtctcactcaccttcttgtcaaacacccactcatcgctgtcacctgtgtcctctggggcatctggggctggcctggctggggccttattcccctgggaacagggcaggagggaagtagggagcagaggagctgactcagcctggaagcgcccctctgctgcttcttccaccccctgacccacactgcccaccttgcctgccccctgaccagtctctcccatggggtagccaacagcagggcgtgcacatgtgggtggggtgtgcagcaggtcctagcacttggctggttccacacacccatcttatagatggggagactgaggagggacccacagtacctgcgtgatagccttctgccagatcacagtgggagcagggtccccagagatagggacgtccagacgtagcttatttccagctacaaccacaatggtgtctggtatgcggcctgggcagtccaggtggatcttgggaggttctgcagaagacacaatgtagttcagagaaacgggagagccaggaggagcacaggtcactggggcggggctgctcaagagcctgggcccctggttattggttttttagatttgtattgaggtatagtttatgctcagatctgacagtaggctgagttctgacagatgaatacacccatgcaattattaatccaaccaagatctggaacattcccatcaccccaggacgttggctgggaggcttgtaatattcaggtcaggtcacctagcatagcattttgaaaactgggggaacatcagtgtcttgccacacacatacacacacacacaatacacacacacacacgcatatacacatacacacagacacacatacacatacacacatgcacacacagacacacacatgcacacagacacaaatacacatacatacacgcacacacacagacacagacacacatatatacatacacacacagacacatgcacacacacacacgcgcgcacacatgcacgcacacatgcacacattaaaaaggttccctggccaaataaatcaggaatctgccctcagttaaacaaagcaaagcagtctggacgcagtggctcacgcctgtaatcccagcactttgggaggccgaggcaggcagatcatgagatcaggagatcgaaaccatcctggctaacatggtgaaaccccgtctctactaaaaatacaaaaaataattagctgggcatggtggcgggcgcctgtagtcccagctactcaggaggctgaggcaggagagtggtgtgaacctgggaggcggagcttgcagtgagccgagatcgcgccacttctctccagcgtgggcgacagagggagactccgtctcaaaaaaaataaaaataaaaaaaaaggaagaagaagaaaagatgtaataataacagtcacacatgtgacagcacttgacaggtctgatacatcatgtcacctcatctttataactatcctatgaggtggcactatcagggttcccattttagagaagaggaaactgaggctcacagagattataattgacccatggtcatgagtggcaaagctgaagctgggccccaggacccccacttttgatccttgctcttccctctgtgagtggaggggaggcctgcgtgggtgggttgcgggaaagtgagcagaaccaagactcaggggccccaagacttaccctgcctgggtacgaagtcaatcttgacctctgcaagagaaggaagagcaagtagcacgggggcaaaggcagggcccagtgacaggggctcctggccccactgccccgacccaccctaccctggagcaggctcacccatgaagtggagcttggctgacaggttgcaggcgaagccctcgggcacaaagctgtagtcagcctcgtcggcaggtgtgacgtcgtcaatggtcagtttgtggaccctgcaggggagcagtggctcaggggaccccactgggccacacacccctggccttgccagataccccagccagggtcccaggaggccctcaccttgtcctggcttgttggtattctgatttttaaaaatgcctttttttttctatattatctaattttccagctttttaatgtgccttcagaggtaggcagcgtaaaagtgatttctacatcaaagcatctccttggctgggcccttggagactgggcaggggctgggtctcattaatctctgtgaacttgggcccagcacggccagcccagttgctccagggatgagcaagagggcgggagaggcagtgagggcctctggccagagccggcctccttggtggcctcctgccctgccctggtcacaagctgggggagggtgctggggagcgctcgaccccgtccgtgtctctccctgctgcctctttgtctctgtccctctgttcttctctgtctctgacgaactctcctatgtgtgtgcctccctgtgcatatctttctgtctctatagaactatttctgtctttctgtctctttgtctttttgggtctgtctgtttctccctctctgtgggtctctgtctcagtctctgtcctgtctctgtgcatctgcctctctgtccacctgtctttatctctctctctctgtttctccctgtgtctctctctgtctccatctcagtctccacctgtcccatccacctgccctgcacactcaccgcccgatgtgggacacctttatgcggctgtcgggcaccagctccttcccattcttcagccacacaccccgaacattctcatctgagacctcacatttgaacaccgcctggtcctttgcgcccaccatcaggtctgcgatgctctggtacacctccagcttcttttctgcagggcagggcagagccattgagctcgggagggtgtgtgggtgtggcgtgaatccctgtggagggcgtgtgggcccatgggcgctggtgcgcacgtgtctgggtgcatgtgggcatgtgaaaacacgtgtgcctgtgtgtgccatgtttgcctgtgatggtgcagtgcacataaggaacctcaagtgtctgaggggtggtgatgctcaccaggcccgtatgaccctctcagtaccctctggagcggtcacctcagcatcgtcattttagagatgagaaggatgaggtttaggctgtcaaaggcccaaggtcacagaggccttgagcccaggtttgcctgctcccctacagggctaggtggggtgggggctgaggggtccaagccctaaagcctcatgtgcccccccagccaggctcaccctgcacaatgagctcagccagcgcctggcccccgctagtgcacagtgcatagtgccccgcgtcctccagcatggcctcgttgatgatcaggtggtgtctctgcccgtccttcttgaaccggtatttgaaggtctcctcccgggtcagctccaccccgtccttcagcctagccgggtgggtgggtggcaagtgctgtggcctcttctgggcagatgcccccaacacccatgccccgtgcttctggaactcaccatttgacttgcgccccctcctccgatacttcacactcaaactccacccgctgccccaccatcaccagctggtcctccaaggggcgcgtgatgagcacagggggctctgtccaggcagggtgagcatgagggttggctcccctgaggccatctcctccccaggttcccacatcctcaggtcccaggcccacctttcacaaagagctccgtgctacacttctcgccacccaccacgcactggtaggctgcgtcgtccgccaatgagcactggctgatggtcagggtacgcttggcaccgatggactcaaagatgtacctgggtgggggccgcagggaagtggcaggaaagctgcggacacccctccgggcccagtgcgccccatgataatccctgtgccccccaccccaagccatccagaggggaacttacttgctgtagaacagaaggggccgttgaagtgttcccgacgggaggaagtgagcccgagacaaaaggagagagagagagggaccggcaggagcaaaaggatgggaaattaggcccagagagatggggctgagagccacaccgagtcagagatacgcatgtggagaggggcaggaggcaaggctatgggggtccccacctccacccgagcccccctccccaccccaggctgcacctgccgctcatctggatctcctggccattcttgagccatttgacctcagcgtcatggtcagccagttccacggtcagccggatcttgtggcctttgctcacctggtaggccggctccagcttcttctgaaaggctgagcaccacccctcagccccggccaccccaccgcccgcaccctgctcccccaggccaagctactgtggctgtggctggggcccaggtccccccctccaatcccctctgtgccgccccgcttccacttctctgtgtctctatttctttttgttttgtttgtttgtctgtttgtttgttttttggacagagtcttgctctgttggccaggctggagtgcaatggcgccatcttggctcactgcaacctctgcctcccaggttcaagtgattctcctgcctcggcctcccgagtagctgggattacaggcatgtgccaccacgcccagctaatttttgtatttttagtagagacggggttttaccatgttggccgggctggtcttgaaatcctgacctcaggtgatgcgcccgcctcagcctcccaaagtgctgggattacaggcatggtgtcttcatttctttatctgtgtctatgtgtcaacccacctccttgtctctgtctgtctgaccttgtccttctgtcttccttggggtcctctccacctgctcagctcagggattgggttaggggcttccagaaagacagaagcttgtcaggagaactggggctgggacagctgtgccttctcttctctcagcaacccctgagttgtgtactcttcccaggcgctcccacctagcagccctctgtgcccagcactctcactcccatctcagcccccagggccagtgcggtggtccccatgctgctgcagtgggggaaatagggctcagagaggcgactggcccaatgccaccagcccagcaggtgtgtggcagagctgggtcttgagcccagccctgctccacaacaatgcctcctcttgcggccgtgtttgtaaaagcccatgttgctgctgctgagcccagggaggaagtgggggctccatccaccgagcagagaaggacccctgagtcctcaaatactctggctgggcctggagtcagctgcggaggggcagagatctactgctgggtgctctgtgaccttgcgctagttccttaaaccctctgtgcctcggtttcctcagtaacatggaaatggtaatagtccttccatcatagtgttgtttcgagaattaaatgagataattacataaagcacctagtggctggcttaggaaggaactcactcactttttttgagatggagtctcattctgtcacccaggttggagtgcaatggcacaatcctgactcactgcaacctctgcctcccgggttcaagtgattctcctgcctcagcctccggagtagctgggattacaggcgcctgccaccatgcccaggtaattttgtatttttagtagagacggggtttcaccatgttggtcaggctggtcttgaacgcctaacctcaggtgatccacctgcctcggcctcccaaagtgctgggattacaggcgtgagccactgcacctggccagcaatttgctctttttactgttgttgctattcctggaagacacccctaccctcggaggtccccatctgccttgccagcctccatcttttcctccttgggcacctacagtcctttgcttggtgccctctgggctcagcagttcaggagttaacccagaggaacattggtggcattcaggggatccctggcttaaatggggccacggtgccggtaagggccaggccacctagcgatggggtgatgggaaacccagtgaggctgagacaacagggaggcagggcagagggataaggggcctgggggaggtcagcagggagggactaaccagctcctctccccgtccccatgatcgtgtgtgttttgtgtgtgtgctttgggaggggcttgtctcccatatcctgcatggaagctgacccctccattcagtcggtgtttatagagcgctcgaggtgtgtgccaggccctgtgctagacccagacatggtggggagaaggcatgtgagacccctgctttcccggctcacacccgcccttgtcaacccctcagtggagaagggctattcctgggctctcctctttccatctgcctgggggtgagggtagttaacccaagccctcctgctttgtttgcctgagagaaagattagccaggctcttttctttgcctgtgtgtggctctccaggcttagcgggcctcttcccttttcttttgggtgtggagagggttaaccgggcttcatttcttttcagaagagggtagagaaagaaagtgtagcctgatttttccttggtgaggagggttaacctgagctctgtccttttccttgtggctgtcctggcctaacttttgctcttctcttctatctctgtggtaaggggctaacctgggcattcttggctttttctacacaaggaggggttaacctgggctcttctttcctgtgagtctctgtgctaagccggactccgctctttccatgtatgtggacgaggtggggggctaacctgtgccctctcctctcccctgtggggaagggctaacctatgccctctcctctcctgtgtagggaagggctagcctgtgccctctcctctcccctctgaggaagggctaacctgtgctcttcttctcatcgcgcctcatgcccttgagcctctttagcatgccgcgcaggtcagtgacgccgtactggaaggcgatgcgctcgtactcagatgggggtgcctgccgtaggatctcccacacgtcctcctctgctggtgcctccagcttcgagtccctgtgtcccgcagtctaggctgtggccgggggcaagactgcagccccctgggcggggcttcctgggcccaggaccaaggagctgtagccacccctgtccctctgccccttcccttctggtggggcagctggagctgctctgggtcccaggccaggcaggactgggggccaagggagctgaagaggggctggggatctggaggggctcctggcagaattaggggtgatgagggtgctgtgctatgttgggcactcacctcggggtccggaaactgctgctccaggggtgggggtgggagaaagggtaggtggcacatgagaggtatggccaccttccctcaaagacctggaccccacccatgggcctttacttcctccctattttccgcacttgcactccctgtgttgtggggcacccatgctgctccggaggctctggcaggacctcctgtgtgcattactttttcttatccctcctaagctctgacagataggtgggtggcaggagaagcccaaggcacagagactcacccctgtccgtggggagccgcaccctgctctgagtctctcaccacagcctctcagagaggggacgggaatcccctctgcacccaccagcgccctgccgcccccaaacacccagaccccgattcttactctctgggccacagcagcagcagccataatggaggggccgggggagagggagagagagggcagagagaacataagtcagttgggccgacctggtagaccctgcagctctggggaccctctctctgttccttctgggtccccggagtttacggagggagcttttgcagcctcaagtgtggagtggccgtgggggacactgtgaggatgactgttgacgggacataatgtctgcagagccctttaactccttccacactgggatcatcccctcgacagacaaggaaaccaactcagagaggtgcagtgttgtgctcagggtcacacagctggcaaaccacagtgctgggatttggagccaggcctcaccagctgccccaggaactgccacccaggactcacctctttttcagcagtgagctgaagtccagaatcccagtgtcctcatggctatcactatggagagggacccccagtgaggctgcagtgagggactggaaagggattaggagcaggatgggagtggagtggggagggagaaagggacactagccagattgggctcccacccgtctcagacccctgggggtctgcggatggtgcaggtagggcctggggcaggggtacctgatccgccgaccacctccagccaggctcctgtgggggttagactcagtatcctcacctgcctgggaagcttgctctcccctgcagcccccactgacttcagctccgccccgcaaatcatccccagccctgacccccagtcgagaccctgaagggcctcagactccagcactggcctcccccaggccctgaggatggccactcacgtgcggcggaaggctgataggaggtccaggtctccggtgcccatggcctctgggttcaaagggtggagagatgggggaaggggcttcagagggggccgtttgagaagccctgccctgggggcggcctctgagtattcacagacttgcccattcatgaccccatgaggctgggcatctgccccaggatctcaccttcccagcctttcccagggtcaaggtaccaggcaggtgggacggtttattgtccccaattcccacccatctctcaactcaccttcacccatcgcccaaacattcagacagtgccaggccatgggccaggagccgtgacaccaagatgataaaacagagtcccacccagatgagacccggactcagccctaagcccccacgcctaccctgcaagccttggggtttctctcacaccctgtgtgtgcagcactgggcacgtggccagcactcatgtctggatgggacgaggcatcctccttagtgttgggaaaaggaggtaggagaccaggacccatggggagcccgagcccaggacagacaccagggccccctcaccgtggacagtgagattgaagttggagcagtcaaatttgtccttggtggacacctcacagcggtagctgccagtgaaggcaggctgggcatcggtgatgtgcagctcgaacagatagacctgtgtgcatggagggacggggcgtcaggggacaccaggggccgggagacaaggctccgcacccttaaaggagactgggagtggccgggcgcggtggctcaggcctgtaatccccactttgggaggctgaggcgggcggatcacataagaccaggagctccagaccagcctggccaacgtggtgaaattccgtctctactaaaaataacgaaaattagccaagtatggtggtgcacacctctagtttcagctactcgggaggctgaggtgggagaatcgcttgaacccaggaggtggaggttgcagtgagccgagattgagccactgcactccagcctgagcgacagagcgagaccctgtctcaaattatatatatatatatatatttaaaggaggctgggagtgacaaatgctcatcgatcttcgcaccctcaggctttagttaacccatacagagtttttgtacagagaaaggggactatctcgaaacccatgattgccatctgctggcacatggttgtggtgaaatacaggcttttgtgcaatgcacagccccgcacagcagaacatgttggcctctcttgctagaggcccccttgcctagcccaggactggggaaggttgggaaaagcagaggcttggagtgaacaaacaaggggacttaagccttaaggttctggtgggcagggcggaaaaaaacaaaacacaaaaaacgaaggcttaaggttctaggcctatgtctaagtgaccttggagcagccacttaacctctcaagctttggtttccgtgtctgtataatgaggaattgttctggttaatccctgagagtcccttgagcccttagccctgatactcacccatccaggggctttacaaccccactagctggtgcccccatgcttcacagtgtcctccaggcttcctgaccaccctgggcgaccccccacccccggccaaaccttattaggtgcccccttgaggtgatcatgtccaccaagtctcccaggtccccgacagtgctcccatgagcctcatcgcactccctggcccccaggcctccgggatctccctgtgggcccctggcccctccacctgcctcccagattccccacaccccttgcttgcagctcgtgtgtgcctctgggtctcatggtgccctctgtgtgccttgtgccttctagggctctccatgtcccctctctccgtgtctccacgaccccggtggacccaccttgctggcgcggtcgtagctgtcgtgcagctgcaggtgctggcccaccttgctgctcaggtccacccatttgcccttgaaccacttgaccacaggcggcttcaggaggctggcgccggccacgcgggctgagaaggtgatgctgccacctgcaaaggcaggggcgacaggcccggcttggggagtgtcctgctgcccccccttcccaccccaatgctgggcacagcagctcacactcacccacggtcacctcgccatcctgtggccgcatcacgaagaggccaatggggtcatcgggggctccaggggtaggaccattgagagctgctgagcttgaccctgtgagcaaaggctttttctgtttgtttgagatggagtcttgctctgtcacccaggctggagtgcagaggcacaatctcggctcactgcaagctccgcctcccaggttcacaccattctcctgcctcagcctcccaagttagctgggaccgcaggtgcccgccaccacgcccggctaatttttttgtatttttagtagagatggggtttcatcatgttagccaggatggtctcaatctcctgacctcatgatccgcccacctcggcctcccaaagtactggggattataggcctgagccaccgcacctggcccagcaaaggcttttgagacctgccctggacacgccctacccacggatcctgcccctccctgcccagcccctctcacctttgggacttggggcactttctcccagctcagcggctggggccggggcttctccaggggctccagtggcctcagcaggggcaggggcaggggccagcatgggctctgccttctctggaggggatcagatgggagtcgtggtgcagccactaaccagagacccctccaccctctctctcctgagcattggacccatgagcccgctgtggatgaggaaagtctgccatggctgtcctcccgctgcctgggcccctcagaggcagctcatgctgagctggagagccagcctgcctctcacattctcctccccgtcccaggccatcagttcccatgtcctctgcatctgccctgaacagctccaggtccatccctgctctgccccagccttagagcagcccctcagactgggctgcactcccctcatccacagctcctggggcttcccggccgtctgtgcagggtcatctccccagggaggtctgcagggggagagtggggttgtgtcttgttcatctctcccacctaccccatggctggaacaagccaggatggcacatgggggtactcagagaggtcatgtgcagaaaagggggaaagggcgttcctggcggggggcacagccacagcaaaggcaagaaagtgtgaaagcacctcctgttccctggatggatggagagtcgctgggctgcccctcccccagcagcccaaacctcagggaaggctgatcaggatcttacctgcctctatgaccttgaggtcgaacttgaccttggaggagccagcaatgactgcgtaagatccctggtcggcagggcccacttcccgcactgtcagcgtatgccgtgtgccctctgtggccaggccgtacttgttgctggcgctgatgtcactgcctccgcgctgccagcgcaccttcactcctgcccgctctgtctcggcctcgaacacggcagggctgcctgcggccacttccactgaccgtggcttcttgctaaaagctgagactgaagggccaggtggaggctacagcggcccctggttggagcgtgcaccccgcccctgcagcccctctcagtaaatactgtgctagcactttctatgcatcccctcacgtaatactctaccagttctctgaggtagttgcagttattctgttcatttctcagaggaggacactgaggctcagagaagctaagcggctcctccaagatcacacagctagcagtcgggagagccagggctgtggtcctgacctcccaacaagactttttctgcatgtgtccactttccctgcttggagacacccgtgatgaacccagctccctttcccccaaccatttcgggcccttggcagggggcggggaagtctgcctacttggaatgtggccaaatttgtcctccaaggacctcaggctgggtatcagcaactgagataaagctggcctgggagggcgctgggggatggggacctggatctctgccctggacaaccttcataagggcacagcccaggcccaggtccctgggctgtgattttccctgcccttggcctgggttcaggggctcctgactgtcctctctcagagaagaggggctgtgtcaccctcaacatgggggccacaccgtacaggctcatgaagcagataatgtcacagccaggaggaaccaacccaatgccaccaccacccccggcaccccaggttgggagactgagacccatagtgggtagagactggtctgaaggcatgccgtgagcctggctcagctccatactaaacgtgggctctgtccgcggggaaccttgctgtggaaggtgaaggcaatgggacagggaaggggtccctttgcattctcagaatgggttgaccccgggtgcttcctgtcttggctgtgtcccctctctgcgtccctgaccttgggtttaccttcacctctcatcagagggatgggaaaaagaaaccgagaatcaaaaaaggaccctggaggactggctgcccctgtcctggggctcagaggccacgtcctcgtcaaccccctcaagaactccctcctagccctgctccccaattgtagacacccccctgctcccacacttagacccaaccccagtcctaaagctacctggcttcttccccggctcaggcatcctgagagacgtcacaccaggcacgaagcaggcacaggtcacccaaagagggactgagtggggtcctgtccttcccactatatatggggacctcccccctccccaggctctgcttatctgcctcctgtccagccacctgctaaatatagatgaattccagagagctgaggtctctccagggagaaggtagggccacattgtccctggctggctcctgtcccttcccccctcaccccccgcagcacaattctgcctccccaacctttggcaagcctcaggggtactccaagccccgtgtgtgtccctcttacagcaaattgtacggtgggagcatgctgggcccataaccctaaggctaacgggtcaggagcatcctcgcaggcagttcaggcagtggtcatgtccacagaccctggggccagggtgtctctgagtcctagcactgccatctctttaatctcaaagcacctggtttcctcatctgtaaagcggggtgggtgaaagcagcacccactgcacaggattgtcacacgtatgaagtgggtttataattttaaaaatgttaggccgggtgtggtggctcatctgtaatcccagcactttgggaggccgaggcaggcagattatttgaggccaggagtttgagaccagcctgggcaacatggcaaaaccccatctctactaaaaaaataaaaaataaaataaatacacacacacacacaaattagccaggtgtggtggtgtggacctgtagtatcagctacccaggaggctgaggtgggaggatcgcttgagtccaaggagttccgggctgcagtgagccaaaatcgcaccactgcactgcagcctgggtgacagagtgataataataataaaaatattatttattattattttttattattaatatctcaaagaataataataaaaaaataaaaatgggctgggcgaagtggctcacacctgtaatcccagcactttgggaggctgaggcgggcagatcacttgagctcaggagttcgagaccagcctgggcaacatgatgaaaccccatctgtacaaaaaatacaaaaatcagtcaggcatgtgacgcacacctgtagtcccagatgctcgggaggctgaggcaggagaatcacttgagcccggggggtcagggctgcagtgagccatgttcgtgccactgcactccagcctgggcaacaaagtaagaccctgtctcaaaaaaaaaaaaataaaaatagaagaatgaagacacaacaccattttgccttctcttgtggccctgcagtaggactagggagctgcagggttgggctgcagtgagccctctggggttgaggaggtgtggggcgggtatttgtccctacgataatggccccagaatctgggttccctaaggtctttgacagcgttgggaagtccctcactcccaggctgtctactgccactacttgctaccgtctggaggaaaacacaggacttacaggcttctccgctcagcttggtctgtttctcccctgctgtggctaggagctagaaagcaaatagaacctgggggtcccaccagggattcacttgggtctaaagtcctgctgggcgtgcagctcgtgagaaccctttgcggcccacaggagctttggggcttaattcctgtcctcggaatgctgaagagtatcctcttccagataagcaaggcctcccactccatgttgacgtgtcgggacagacctggagtgtgatccaacttggccactcaacggctgtgaccttggggaaataatttgacctctacaagcctcagtttcccattctataaaatggagtgatattagactccacatctcaaggttggcagatactaattgaccagaatatcaaatgttgttgctggtcatggtcatcatcatcatcatcatcatcatcatgagttcaaacctcatcaaggcttaaaaacaacaactatcaggagtagagagcttttaaataggatctgctctcctaatcacaattgaggacttgttctttccaccaaactctaactcctgttcaggcgctctgtgtcattggtcctcatgttcccagggtccagcattgggtacagtcctcggtaaacacccgatggacaaatgacaaaaagagacgtcgcagcacacaggggccaaaagagatacacaacaaattttaaaagagactctgtgctgcaagaggatggattgagaataactttacttgttttttgggaggaggttaatgggtgggaggggtgagaggggagatctgatttacatacggacttgagactcccaaggcagtaccccgggtcgtcctctgcaaggttgccccggtggggtctgacgcccagctggcgtccgggagccggggtggagtcctggagggaggcgaagcgggatgtggagggggcctggagtggggggagggggcgggtgaggcgaggcccggcccgccacagtcctgcctctgggccccgggagcgtcctccctgtgtccgggccgggcgagggcttaatgctatggccagcggggaggcctggcggggcccggcgggggctgcgggctcagtggggcgggtggcgccgctcggccaggcccccgcggcccagcacttcgccgctgaactggtaggtgagcttcttcttcaccttcttgacctcgcccgtcttgccgtagttgcgcagcgcgcgcgccatcttctggtaggtcatcttcttgcggttgcccttctggatgccccagcggtgcgccagcgcctccttgtgcttggacgagaactggaaggtgcccttgtccttgtccacccaccagatgctgtccttcatgtcgccgctgcggagcaggtccaacaggaactggtacaggcggatcttcttcttgctgcctgcgggggggagggcccggtgggagggggcccggggcccacatgggagccgcccccaccgccttgcgtacgcacaggggcccggggacggggtggccgggaagggcaggggaacggctgccccagcccgcgccgggcgtgcatacacaacgcacccacactcacacacacacacatgcttgcgcacacacaggcgttcacacacacccactcacacccacgcactcaccccccccacgcgcacacactcgcacccacacagtgcaccaagtacacacacatgctcacatccacataacgcacccacacctccttacacatgctcacacatcacgcccacacccactcacacacgtgctcacacaacgcaccttctcacacccactcacactcatgcttaaacacaatgcaaccactcactcatgctcacacccacacacgctcacacgtacaatgtatctgatcacacacatgctgtcacacacatgcacacacaatgcacgtgctcacagactcacacccacatgctcacacacatgcttgtgcaatgcacccaaacgccagattgcacccacacccacccacttgcacattcacacccacatctgccctcacacactgtcactttctcacacacccacacaatgcaccagctcacactcacacacatgctcacacactcattcactaacatgcccccacacactggcacccacacgacacacccactcacatgcttgcacccacccacatgttcaaacccacactgcatctgcttacacattcacaacccactcacacacacctggtcacacccactcatgctcacacctcattcacacccactcacatgcacactcacacccacccaatgcacccactcacacacatgcacacacactcagacccacttactgcccccacacacggtcacacccaatgcaccttctcacactcatatgcccactcacacctgctcacacacacctcacaccaggttcacacactcatgttcacacacctgctcatacacctcacaccaggtctcataatcacacctgcttatacttgcttacacatgcttgcacaaacacacctgcttacacatcttacactgctcaccctcacaccttacattgctcacccttgcacacacatgcccctgctcacacacacatgcttacaccacaccattcactcacacatatccactcacatatgatcgcacctacccacacctcacacacacttgcacgcacacacctgcttacacacatctcacgttactcagccccacacgcacacacctgctcacacacatctcacattactcagctacacacacacgcccctgctcacacacttgtgctcacacacctcacaccattcactcacgcacacacccactcacacatgctcacgtctgctcacacacatgctcacctatccatacacacacttcctcacacacctcacaccaagtctcacacacacttatgcttacaaactcatgctcacacacatgctaacacttcacacatgctaacacctcacacattcacacccactcacatgctcacacctcacacatgctcacacctcatacctcacacacatgctcacatctcacacccactcacacacacctgcccacacatatctgcacacacacatgctcacacatatgctcacacatcacacatacctgctcacatacatgctcacacctcacagctgctcacttatcactcacacgctcacaccagctctttcacacctcattgacacctgctcactcatatttcacaccacttacacttgcacctcacacctgctcacgcatgcacatacattctgctcatgcatatccacttgcatgcttacacgcctgttcacacacaaccactcagacacctacttgcacactcaaatgctcacacacattctgctctcacatccactcacagcagctcacactcatgcatgctcacacacacctgctctcacactcacacatcacacccattctcttgtttttgagatggagttgctcttgttgcccaggctggagtgcaatggcacgatctcggctcactgcaacctccacctcccgggttcaagcaattctcctgtctcagccttccaagtagctgggattacaggcgttcaccaccacgcctgactaatttttgtatttttagtggagacggggtttcgccatgttggccaggctggtctcgaacacctgacctcaggtgatccgcctgcctcagcctcccaaagtgctgggatacaggcgtgagccaccacgcccggcccactcacacccattcatgctcacacactcattcacacacctgctttcacacatacacatacctgttcacacacatgcacacctgctcacacacgcaggtgcttaagcacgtcctcaccccccacacacacctgctcacacatgggaacacacacatgcttacacatgttaaaacacatatccactcacatacatgcacagacctgctcacatatacacatacatgctcacacaccccagctcacaccttcctgctcacacacacctgcttacatacaccctcaaacatgttcacacccactcacacatccactgacacacacctatgcccattcacacacacttatatcacacacatccctgcttacatacacattcacacatatacacttgctcacacacctgctgtcacacccccactcacacatatcactcacacatgcctgcttacagccactcacatataccatgctcacatccctgctcacacaggcacacccacacactgctgacacccactgacatcatacgtgcacagctgctcacacgcactgaaatacattcatgtgttgacagacacacaaacatggccacacccactctcagccacaccagctctcacattcaccttctcacacacccactcacacagccactcgcacacatgcacctgcccgtacctgtgcacacgcaccctctgcacacttgctcacacacacccagatgtacacacactcatggcacagagagacacacacacctggcacacttcatggagatgcccgtatgcactacacagcagatacacacacacagagacagccacagacagccccacaaaacacacacactggcaaacatgcacacacacacacacgcgactcggtggcgtggctgctgggtcagttggcctggctgggtgggggcagggcacagacacggccagggtcggggccagggtggagggccaggtgccccacctgtctccccaggcaggagcccaggcccgggctccaggccatccgcctcgccgtcagacacctccagtggggggctctgccgctcgccctcctcctcatctgagctgggctgggctggggacagggatgggtactggaggcacatccggggcaggtaggagacctggacggtgggggaaggagatcagagtcaggaagggccagcttacagctcaggggggctgggagggaggtcagctggggagagaaggagtgcagagggcaggggacaatggcaggcacaggagactggaggaagaagaccagggaaaaggggggccagttgaggtgctgcacatagggtgcaggctgtggggcgaggggtgctgacatccagcccacccagccctcccagctgggcctcctggtttaggactgtgggcaccggggaagtggtgccttgttctcctccctgcagcggtgctgtgtggacccgcattaggctggggtcagaagagggcatgctagggaccggtgcgttgggtctggaagggggtttcataggtgggatgatgagtgagtggagggaccctggaggtcagtaggggtggtagaggtcagcagaggtcactgatccgggttagggtcagtagggagggtcactggggagaggcagggtcagtagaggtgttcagtgacttggtgtgggatccatgagggctagtgaatgggggtggcagacagtgaggcccaggagggcccacaacaaggcgttgggatggggaggcttggtgagggtgcgagaattatctggggtctgtccatactcggggtgagatgagataaggggtgtggggtcatgaggtcacttggggggtcaggcggcagccgttggagctccagccgccgttggcactgtggggcaggaagctgagttgggtaagagcctgtgtcagcttcctgtgaagctcccgggccccaccacaggcctggcagtctcctgggggacggggcaggcggtggcatgcacctggtggccaagactgggatggggtggcaccatgggggtatcgaggacgtgcatctgctccagctccatgtggcggtagagctgctgcagctgcgggggctgcacgctctggagctccgtgaagttgttctcggcgaagctctcgaactcgctgtgcacgtggtgggggtggaagtcccagtaatggtctgtgggggacagccaggcagtatggggtgagctcagggttgggcagggcaggaaaaggttatagtaacattaaataatactgccaggccatatggggcctaaccatctcgtttaaccctcgccacctgcatggttactctaggcctgcattttatagatgaggacactgaggcttcgagcggctacatagcatgcccaaggtcaaaagcatccgggtcacagccaggactcagggctgaagcaaagctcgtgttctcagcaattccatcctgattcctgtgcagtcacacagaccgagcgtctaatcctggctctgccatttacttgctgtgtgacctcaggcacatatgtggcctctctaacctcagttgagttgcctgtaaaatggggatcacagttattgggaagatacgaatgagtacacatttgtaaaacacctcgcaccagagccggccctcagggaaagttgattcccctcctatcctgttaaaacctcccagccagggccgcgcgcggtggctcacgcctgtaaacccagcattttgggaggcggaggcgggcggatcatgaggtcaggagattgagaccatcctggccaacgtggtgaaatcccatctctactaaaatacaaaatattagctgggcgtggtggtaggtgccgtaatcccagctactcaggaggctgaggcaggagaatcgcttgaacccgagaggtggaggtagcagtgagccgagattgcgccactgcactccagcctggcgacagagtgagactctgcctcaaaaaaaaaaaaactcggccgggcgcagtggctcacgcctgtaatcccagcactttgggaggccgaggtgggtggataacgaggtcaggagatcaagaccatcctggctaacacagtgaaaccccgtctctagtaaaatacaaaaaaattagctgggcgtggtggcgggtgcctgtagtcccagctactcaggaggctgaggcaggagaatggtgtgaacccaggaggcggaggctgcagtgagccgagattgcgccactgcactccagcctgggcgacggagcgagactccgtctcaaaaagaaaaaaaaagaaaaaagaaaagaaaaaaacctcccacgggttcctgagctccctggctgcccacagtctctctctctgtctcacacacacacactcacacagccttgtcacatggccaaggtgtgacagcagagtcacagggctgacattcctcacacactagaacttgtccaggcacacggtggcccttcctcttcaaagccatgaccttaagcagtggcacctgtgttcccgtgaggttcctgggacctgagactttcctggaaaaccccctgtgggttccttgagtctgtggtggaggagactgaagtccggggaataaccccatgccaccaaaagccctgtcttggaactggggaagatcttcagcatgaacaccttttccaggaacaaaaactgccacacatctgcgggacttcctgggcgcaattcggggtccaaaatgaagcgtggtaataaagtgacaagatcggctgtctcatgtgggccaaagagggcgcctacgagactccaggtccaggcagtgtctctgggacaagtccaccaccagccatgcgtgcgtgtgtacgtgtgtacaaaggtgtacacatgtctgcctgcatctctctttctctctcacacaaacacctaatcacacatccctaatagataatcatgatttttggttctggactggatctcggagtactcgctttctaaacctgctttgcagtatgaccatggacaagacatttttttctcccggagcctctcattccccactctaaaagtcagaaatgcttttagacctgggtagttactgaggccttgtctacatgtataattatttggcctcacagtccagacaacccagactcccacctttaggaagccacatggcagagaggagagaaaggcagagctgggctcaagttctggctctgccatttaccactgtgtgacaatgggcaggtcattctatttctccaagcctgtgtcctcatctgttaaatggggctaacaattacacccatctcacaggcttgttttgagaagcaaatgacctattgcttgcaaagtgcttagactagaacttggcacaaagacagaccttgataaacattaacttcatcattatcattattattaataataataatagtttattctaaagagcctagattcccactgagtgtggttacacctataatcccagctacccaggaggctggagagggaggatcacttcagcccaggagtttgagaccggcctgggcaacatagtgagaccctatctctacaaaaaatgtttaaaaatttgccagacatggtggcacacacttctagtcccagctacttgggaggctgatacgaaaagatcgtttgaacccaggagtttgaggctgcagtgagctatgattacatcactgcctccagcctgggtgacagagtgagaccctgtctctttttttttttttttttttttctctgagatgaagtctcactcttgcccaagctggagtgcagtggcacgatatcggctcactgcaacctccacctcccgggttcaagtgattctcctgcctcagcctcccaagtagctggtaatacaggcatgtaccaccatgcccagctaatttttgtatttttagtagagatggggtttcactatattggccaggctggtcttgatctcctgacctcgtgatctgcccacctcagcctcccaaagtgctgggattacaggcttgagccactgcgcccagctgagaccctgtctcttaacaaaaaagtattcagtgtgcagggggaggggcttacaaaaaattttttttaactaaaaaaaaaagcctggattagcacttgaacaagcatagagcaaatgcttttaatacatgtttctttcctcttgttctccctgctcctggccaccttagtcaatggcccagagaaataactttaggggaccatgttgtcactgcagttgaagcccaagcatggcaccatgagggcagggactggttttgttcacctccgtcttcccagtgcctaagtagagtgggcactcaacaaacatttcctgaatgaatgaatcaatgattgcctctttttaaaaataaaaatgtctttctaggccaggtgcagtggctcacgcctgtaatcccagcactttgggaggccaaggcgagcgaatcacctgaggtcaggagtccgagatcaacctggccaacatgatgaaaccccgtctctactgaaaatacaaaaattagctgggtgtgatggcaggcgcctgtaatcccagctacatgggaggctgaggcaggagaatcgcttgaacctgggaggcggaggttgcagtgagccaagatcacaccactgcactccagcctgggtgacagagtgagactccatctcaaaaaaaaaaaatctctttttaaattgagatggaatctcactatgttgcctccaactcctgggctcaagtgatcctcccacctcagcctccccaaatgcttggattacaggcatgagccaccgagcccagctgaatcctagcctcttaagaagcctctcaggccgggcatggtggcttatgcctgtaatccaagcactttgggaagccaaggtgggcagatcacctaaggtcaggagtttgagaccagcctggccaacatagtgaaaccccgtctctacaaaaatataaaaattagctgggcctgatggcaggtgcctgtaatcccagctactcaggaggctgaggcaggagaatcccttgaacctagggaggtggaggttgtggtgagccgagatcatgccactgcattcccgcctgggcaatagagccagactcggtctccaaaaaaaaaaaaaaaaaaaaaagcctctgagactctcctctgcaaaattatctaaacctgaagcgaaaacaaaacaaaacttaatttgcattttcttttttttttgagatggagtctggctctgtcgcccaggctggagtgcagtggcacgatcttggctcactgcagctccgcctcctgggttcacgccattctcctgcctcagcctcccgagtagctgggactacaggtgcctgccaccacgcccggctaattttttctattttttagtagagacgggttttcactgtgttagccaggatggtcgcgatctcctgacctcgtgatccacccgcctcggcctcccaaagtgctgggattacaggcgtctggccttaatttgcattttcatcttgcagtgagctaacaggatcccgaaactctcctcgctgtaggagagtttgctctgctctttagtgaggaggctgtcctggggctctgggatttggtgaaatgattcctctccagttattgatccctgcttcagccccacttctggctctgcccatttttgccttctcctgcccaagttggagtgccctggtataatgccgaatggatcctgccatcaaacccccatccttgaacccactcccattccagggctggagggaccctgagtgcatgcaccccttaggtgtggggtaagaggcacccaattgctctgttttcctccgcacccccacctctgttctagctc

SEQ ID NO: 83 - DNA, 42373 bp, Mus musculus
gaggagtcaaactcacattgtcatgcttggtggcaagtgctactgccaggccacctctacaccatccaagggtataaagggtagtaaaatacactcacaaaggctacgcatgtgagcatggtggtttgtgcctgtaattacagcactggggacaccaaagatccaggatcaggatctaaaggtcactgagtgagttcagggctagcctgggttactgggtcttgtctaaaacagaacaaaacaaaaacgcatgcacattgtggagtagccatcaccattgtcttgagaactcatcttgccaagctgaaaccctgtgcccattatacaactgcccatcctccaacctgccagcccctggcaacctgcaatctccttccttccttccttccttccttccttccttccttccttccttccttccttccttccctccctccctccctccctccttccctcccttcctcccctcccttcctcttttcctccctccctcttttttgttttgtcttgttttgagacaggatttctctctgtgcagccctagctgtcttagaactctccctggctgtcctagaacttgctctgtagaccaggctgggcctcggactcagaaatctgcctacctctgcctcccaagtgctgagatcaaaggcgtgcatcaatatcgcctggctctactttctatctctgtgaatattattacattaggtgcctctgataagtgaagtcatactgcaattttcctgttataacagactcatttcacatagcagaacgtctcaagattcagcatgttgcagcacatgccagaatttctctgtttatatgttgaataatattcactgtatgagttcattttggaaggcagctatgcccatgacccagaccactacattttgcttaatggctcacttgttgatggatacttctgctgtttctagtttctagctgtggtgaataaagctgctatgaccatgacctgggcttacagtctccttaggactctgacttatactcctgtgcaggacttgctgggtcctgtggtacttctttcgtgtgtgtgtgtgtgtgtgtgtgtgtgtgtgtgtgtgtgtgtgtgaatgcaggtgtccatggaggtcagagcattgaatacttgagtacccgggagctggagttactggcagttatgaagttatgagctgcctaatgtgggtgctgctgggaagtgaactccaggtcctttggaagagcagtgcccaatcctaatccctgggctatctcctcagcccctcttttccctggaggagctgataagctacctttcatcatggcagcaacggctttacaagccccacagcaatgcataagtcttcatggttttagtacactagtcatctctttatgcactgttggcttttaggaatcttagtcctagggctggagttgactcacacacctatgtaaccaaccacctagcctccttagcaactgtccttcctccacctatcaaaccttccatccccctcacattcacctcttcgtctaataagacaccaagggtcttttctgtgcctggcacagggatagatgctgtggggtgaataggatgctgatacagccacattcaactctgtgtccgggtaagaattaaaatgccaataatcagggtacgccgttgagagaaacaaatacctcctgctcaccaggcttttgcaacatgcctgcaggcttttaggataggctgttctgcagtggtagtaatttcccaaaaaggagggttgttttgttggcccctcctttcttgattccttatctcctctggttttgtttgttcgtttgtttttatttgctttattttgttctgttctgtggggacagccttgaactccctatatagctcaggctagccttgaactccctataaagctcaggctgatgttaatgttcttttgtaaagatttgtttttattgttttcaattgtgtgtaggtgtatgtgcctgcttgtgtgtgtgtgcacacgtgtgtgctagtgtcctcagagggcagaggtgttaggtccccctggagctccagttgttctgagctgcccaacacggctctgggagccgaactcaggtcctttgggagagagtcagtgctcttgagctatgagccatctctgcagtccctggtcttctggtttgagcatactttgcttttctgaggacagccctggccttcagcctggggtttctgtcctgaggagataagctcagctgagtgactcttaaggcttggtgttttgtaatcttaatatcgcttggttcttgttcttcttaggactaagtaagaacatggatgaatgggtgggaacaagaaaggatcaggacaaatggactgacagctatagtggtttccacttgtgatcccagcacatgaagccagcctgggctctatatcaagaccttgtcacaaatgggctctcatttggctgggtggctctggctgcatagacagaggttgggtgatgggtagctaatggatggatgggtgtgtacagacagatggacaggagcatcaggagaggctctctgtgtcaccataggtcttacttaaagcttacattacttcacagtaatagcttagatcccgagagctggcatggtgtagtaagagttaaaatactgtgtaagtccctggaattacacagaagtgagctcggatcatgacactacactaccagtggccattgtagacaaaagacttttttttttttttattttgagataaggtctctctgtgtattcctggctgtcctggagcttgctacgtagaccaatctggtctcaaacttgcagagatcctcctggctctgcctttcaagtgctgggttaaaggcaggactttaatgtcttgaattagagctttctttactgtcaacaggaagagtcctgttgagacagggctttgtatagctcaggctagccttgaactccctatatagctcaggctagccttgaactccctatatagctcaggctggatttgatgttcttttgtaaagatttgattttattgttttcaattatgtgtaggtgtaagaggagcctctacctccacagagcagagcagagcagagcagagagatgaagtgggttaattagcgtgatgcctggtaggcagtaagttagcatcaggaatcccattgagcactgagaccttctgcccacagaatgtagaaagtgaacattggagctggcacagatatgcaaataacataacattctctgaagggctgagagtatgtgggtggccgctaggcagagggcaaggtggcacaataaagggacaaagccaagttaaacactgcattcacaaagaattgtccaagccaggtacggtggcacatgcctgtaatcctggcacttgggacgtagacacaggagggtcaagacttcaagatcatcctctgctacacagaaagtttggggctagcctgtgctacccgagactctgtctcaaaaggaaggaagaaggaggaagaaaggagggagggagggaggggggaaggaaggaaagacaatgacagaacaaaagagaaaagaaaagaaaggggagagagagagagccaagcatgttggtttaaatctgtaatgaagcaggagaatcaccatgaactcaaggctatctcagactgcgtgtctcataggttctgggccagcctgggttatagagtaaaacacaagaaataaggttcagggggccagaaaggctgacctttgctttctgactcacttcctggacactctctctgggggccccaaatttggagtgagtttgcctaccagactgttggttacataattgcctgggcacccaaatcaaggggaaaggtgaggttttgaaactgttgtagcgcagggcatcctggccatcgccttcaggagaccaagagcagggagcagaggcccacatttccccacagtgcttctcactgctgtctgtcatccacaacaactttgggaaatgctgctttaggcttcagagctagcagaggtggggtggggccagaaagagttaggtcaaatgcctctcatctctcacctagaggacagcaaacactcacagttcctgtccctggagctggaacgggctgcgggagagacaggggaaagtaaatggtggtgatcaagaggaagctgggtctgcaatccaaactgcagagccccattctgtcctttcgggtttagtgacctttgattttggtcctggggctcaaatgcaggaccttgcgcatgagagacaagtgccttcactacagtgttacggccctgggctttctgttttattttgaaataagatcttgctttctaggccaagatggcctcaaacttttaaaaacatatttttaaatatttatttgtctctctctgtctctctccctatctctctctgtgggtgtgtctgtgattttgtgtgtgtttgtgtatatacacacatgtctatgctttaggagtccagaagagggcgctgttgaatcttttggagctagagttacaggaggttgggagttgccatgtgaactcaacagccaaaatcaagccccaggaaccgacatcaaaggtcactaaacccgaaaggacagaatggggctctgtgattcggattgcagacccagcttcctcttggtcaccgccattactgtcccctgtctctccctgggaacttaactctggttttctgtaagaaaaagtggtcttaaccaccaggctacctctccagattcaggcctcagacctttgttttgagttagggtctcattttatctacatggcctggaactcactgtgtagaccagggtggtcttgaattcagagacctctctgcttctgcttctggagtgctgggattaaaggcatgtgccatcatgcctagcttgccttcatgttctttcctctattttctggttgttgaagttacagatgtgctagcgcaggctctttagggccagtatgagtgtacgggaataaatgttctccttttgtgccatgttctatcctaagcaccctctgggcatcagatagctcatttaccccttcacagtgtatggataaaatgggtataaactactcactcagatgaggaaactgaggcccaggagcatgcagcagtaaatgcatccgggtttgtctgaagctccaaagcatgcactttttcttctgtgccgcagtttcctagagatgggtcccgctgccagactcagaagatgtggcacatggacagagccttggtaacaaccttttaactggggaatcagaggctcagtggaaaaaaaaggtgtttaggctcatacagcccagcactgctcagcaggatgagaaagctagagccaggcatgtaagcccaaacttagaagtctaagtcgagatgatcacatgttcaaattcagcctgcgtgagaccctgcctcaaaaacacacgaatacggatgagtgaagggctcagtagatgacggtgcttactgtgcctgcctgaggttgatcttgggacccctgaggttctagaaggagggaatagattctgttcctctacgcatgcacagcatatttggcccctcccagtaagcaattaacaaaaagagtcctgtggtattggtacacagctggaaagcatatgtcatttcttaaaggatgtgtttgtgtgagagacaaagaaaaagcaagatcataggcatgcgtgcctgcgtgtacacacatgaacatatgcacacacatacacatgcacacatatacacatgcacacatgtacacatgtacacatatacacatgaacacatgcacacatatacacatgcacacatgtacacatgtacacatatacacatgaacacatgcacacatatacacatgcacagacatacacatgcacacacatacacatgcacacatgtacacacatacacatgcacacatgtacacacatacacatgcacacatacacatgcacacatgtacacaatacacatgcacacatatacacatgcacacacatacacatgcacacatatacacatgcacacacatacacatacacacatacaaatgcacgtggttactggaggacttcccctggttcatcaccttccacatccttcaggtcacatgaggaaatccctcttttaacaccaaattttcatttttttcgttcttcttcctaaattcatttattgatatatgcgtgtgtatgttcatgtgtgatcgcacgctgagctcaggtcgtcaggctcagtggtgagagcttttaccagctaagccatctcgctagctccataccatacaccaaactgtgcccaaaagtccctcagataggcagcaacttttgttcctggaaaaggtgtagggagaagccacatcacagatctacccagagctatgtggctgcttcctagagttgggtccacccttccacagacaccagacacccataggggctttctggggaaatctcttccttcagcttcccaggaacctgggcgtggctgcccctgcctgtagttttacagaagcagcattgtaggtttggacaaactctggtatgtgagaaatgtcagccccgtgactttgcaatcacaccctgatcatgtgacaaggacccatgcttgtgactttagatagccaggagtctgtggaaggtcacagaggcaggggaagccgttttccaaggcctgctgtgggtctagagtgggagcttatgtgtattcgcccaatagcaattctacctattttgtaggtgggtccactgaggccagagaggcttaggcctgtgctgaggtcacacagccaacagatggcaaagccaggactcagacgagggctcagaagtctgtgtctctgggcccagtcaggaagccacaccagtggctgctggtgacagctccaggtgtgactgtcattagggactttaacattggcatgttaggaaacctctctgcgcctcagagtcctttctataaagcagcggtggagtccgtgaatgttccaggagatgattaacgtactttctgcccagcctgaatggttatgttatgttactctatcatctccctgcccgggcaccttggctcacaccctcccccctggctttcccatagatcactactgggatttctccgcacaccatgtccacaacaacgagtttgagaacttccctgagaaccacttcacagagctgcagagtgtgcagcccccgcagctacagcagctctatcgccacatggagctggaacagatgcacgtcctcgatactcccatggtgccaccccacaccggcctcagtcaccaggtgtgtgctgctggctgtcctctgtccacctcccctccccaccccagacctccaggcctgtggtgaggcatggaaccttcacaggaagctgacataggctcttactcaacgtggcttcctgatctacagagccaacggcagctggtaccccaacagctgtgctgacctcccgcctgaccttagggacccacaccttagtctcacacacgatggatagatcccatatgatccactagtcctcggccatcttctctcaccctgttcctgcttgtgaccctcagggttccactgcctatagtccccattttctgtctctccatgtacccagactctgagtcactaaatgctcgcctctgcagacctcctggctccctattgatcctcattgctgactattctctgctccagggtcctaaccccgaccattgatctctgccatccctcactgaccttcactgcccattcattggctcatcaccccctcattaaggctcactcacttccgtattaagccccagctcattgctccccagaaccttcccactattcctagtgcactgccagggcacatggcccctttgcatgcgtaaagatatacctttatcttccctaaaccagaggccacagttggaagggtggtaggctcggtaactaacaactcattgtaccaagacctgcacccctgagtcttggtccagactggcccctagttttcccttcttagtcctcgaccctgctgacccctcctgcagccctgggctatcccttatggacttcacgcctgttcttccctttgcaggtttcctacatgccccggatgtgcttcccttatcaaaccttgtccccagcccaccagcagagctcagatgaggaggagggtgagaggcagagccctcccctggaggtgtctgatggagaagctgatggcttggagcctgggccaggtcttctgcacggggagacaggtagggtccagcatcaccgatccagtgactgtagctgcatttacatttatgaaccttgcatattcctagccaaggtcaactggcccagcagccatgtttcagaggtgtgtgtgtgtgtgtgtgtgtgtgtgcatgtgcatgtgcatgtgtatgcacacatgcgtgtttgtggatgcttctctacctgtacaggtctctaagtctgtctgtattgtgaatgaacaggcatcatttcaaagtgcgtgagagtctgtgtgtgcatcagtattgtgtaggagtgtgaatgggagactgtatgtatatctgtgaaggcctgggtgtatacaggactgtgagtgtgtgaggtcatgtgtgtgagtacctgtgaatgtgtgaaggcctatgagtgtgggaggaaggcctgtgagtgtgtaggtcttgtgtgtgagtgcctgcgtgtgaaggcctttggataggcatgtagatatgtgagagcagatatgggtatatgtatggatacacgtgacatatctatgaggatttgtatatatggaggggtgtgcacttgagtgggagtgggcacgtgtgtgcttgcacctaccatggctgggaggagctggtgggagggtccccataaaatccttgcatcctgtccacacaccacttggttgcccatctctcacaggcagcaagaaaaagattcgcctgtaccagttcctgctggacctgctgcgcagcggcgacatgaaggacagcatctggtgggtggacaaggacaaaggtaccttccagttctcgtccaagcacaaggaggcgctggcgcaccgctggggcatccagaagggcaaccgcaagaagatgacctaccagaagatggcgcgcgcgctgcgcaactacggcaagacaggcgaggtgaagaaagtcaagaagaagctcacctaccagttcagcggcgaggtgctgggccgtgggggcctggccgagcggcgcctcccgccccactgatcgcccgcagagaccgccaggctcctggaccccgccggccatagcattaacccgtcgcccggcccggacacagggaggacattcccagggccgaggcaggactgggggcccggcctcgccctcccatgcccggcctggcccgccccacccgctttgcctcccaccaggactctagcccgctccaagggccgcctgggcctcggacctcaaccgagggtcagcctggcttagtggccacggtgcttccttgggagtctggcgctggcacctttttgtatattgaatgctttttaaaaagctcttcctccccaccccctcattagtcactaaagacaagtaaaattattgacagctattctcccagagaagtgtctcattcaagagtttgcgtgtgccgggtccagggggcgtcccgtgtgcacgatctcttatttgtctagagagcatgtttccaaagctgggccctagggacacggggaccatggacacacagcgcttgtttctagtgagataagtcttggcttgttatcagggctcagggatcatactgaaaagtccttagcaatcttctgagtgagacaccatccaagagtggtggtggtggtggccgcagcaataagcacaggtgtttctgatcatatagcatctgtcaactttaccggctgtaccgtctctctagcctggccacaaagcattcttaatggagactccacaagcacagccttcccttcaaagcactcccaggggccacagacaagggacatctataaacatcttgcttcatttaggtgacgtagacagaatgtaggcaggtggtggcagacagggagtgaggacatctcctaatgtctgcacacctcaggaaacacaaaccctagggtgtcacactatagggggaaagacccctgcacacctcctggctatgtgggtccctcatagcccacgctgatgtcccctagtcagactgccgagtctcaagagaaggctatggcatgtgagctgacgacagctcagtaagagagcagcagttttttaaaagtattttttaattcatttatcgtgtatgtgtgtgtgtgtgtgtgtgtgtgtgtgtgtgtgtgtgtgtaagagtgtgcacacttgccacagcataaatgtggaggtcagtgacaacttgcaggagtcagttctctcctgccaccagtggaccccagaggtggaactcaggtcaccaggcaacagacacctttaccaacttggttcttcttcttcttcttcttcttcttcttcttcttcttcttcttcttcttcttcttcttcttcttcttcttcttcttcttcttcttcttcttcttcttcctcttcctcttctccttctccttctccttctccttctcctcctcctcctcctcctcctccttctcctcttcctcctcttcctcctcctcctcctcctcttcctcctccttcttcttcttctccttcttcttcttcttcttcttcttctggctctcaaacaccagttccttaaacatttaaacaaattttttgcctgcgtatatgtatgtgtgccatgtgtgtgcctggtgcctgcagtctagaagaggggtgttgggtcccctggagctggagttacagatggttgtgaggtattgtgtgggtgcttggaccggaacctgagttctcggcaagaacaagtgcttttaatcactgagccttctcttccagccccagaccagttctctggacgactcggagataagcatagcagtgcatacccagaatagcagcacttaggttgaggcaggaggattgtcattggtttgagaccaacctggattgctagttatagcttcaacacacacactcatgcacatgacttaggagcaggtgatatgactctaaagtaactaaaattgggtggaaatcacggctaggtttctattgactggaaaatgcttatatgtgaactccctccttctggtataagctatctattctagtctagaattccttaatggagatccccgtcatttactttttcccctgttacacctgatgagcctgatccaactgagggtcacagaacaagaacagtggcagtggggtggcagctggggggatttggaatgctctgcattcatctttggttagtccttgtgactttagcaagagctagctctgctcctgtcctctacttgggaggacatttagagatccactcccatgccctcgcctgcaggctcgcctagtttgtcccttgtgtgtgtggggtggggtgggggggactaactcccagcagattccctccctgcctaaccctccgccaagcccactcaggattccgtggtccaaggccagcccctgccccttgtggtgcagtaatgtgtgccaaagctctgctgaccaaaagaacaacagcagctagccctggataccctctctcccacccagcacctgtgccctcgatctttagctgtgggtgtcacgggccaagagcacctcgacagtgtaattttctggtggctggatacacagacaaaggtggggctacccctgagatccatggaggagtggaagggcggaagctatccagtcctgctgggggtggggaggagaagccagaggaccaagtggctctatcttctccatgaagatacctcagctggatggaatttgtctatatttagcaggtggctagcaggaggctgataagcagggctggggagggggcagtcctcataaatagtgagaacacaggacactgttcagtccctccttgggtggcctgcttgatgcctggtgtgactgttctcaagatgccggagccagggaagaaaccaggtagctccacgtaagggtttgggtcagtggtgcacacggcttgtgggcagggttaggtaccggtgtaggatgaggcctgtgggttccaggaagggacaggatggtcctctttgggctttgtctaattctctgcttcattccccatccctctaatgagatcaaggataaactcggtgtcagggccactgagagatgacttcactaagtcaggaagaatccagggtcaacagcccattctgtctggacctgtattttcttcttcagccagggtcctcaattcaaggagctcaatttaggctccagtggagctgagcccctgagctcagtttctaagggtactgagatgagggggtagcgaccctttccagctctgagtgtctgccacatgagctggaaaccctagggtattcacatgagacctggctccagatgtggggggacagtgcctctcttctctggaatagaacaggcaagccaaggacaaagactgtagccaaagacctggaccaggccaacacccttgcagaggtcatggggtcagggatccagtccccagcccccaggcccctgctgccttatctcaattgctcattcttagtctgaagccctcagaggacaaatttagctatatcccaagtaggcagagtgctggggcccttgccaagggttccacaatgggaagggaggctgggcctaccactggtgttcccaagcaggaaggtagggacgtcttatatggtggtggggacaacagcctggactctttcatctgtcattaacctcacctgacctgagacataaatatggctgcacccaccccatagaactgttggagcattaaacaagtagcttggggtgtgcttactacacagtcttcttgaagaagggtgtcgggggtggggtaccagggagcctacttcctgcaagttccatctggctcttcagtgtcagccttcaacaagaagccaaggtcagcggaggtgaccgctggcagtgctgccgtgttcgaggctgagacggagcggtcaggcgtgaaggtgcggtggcagcgggatggcagcgacatcaccgccaatgacaagtatggtttggcagcagagggcaagcgacacacactgacagtgcgggatgcgagccctgatgaccagggttcctacgcggtcattgcaggctcctcaaaggtcaagtttgacctcaaggtcacagagccaggtaagagcttgctgacctcgccccggggccctgaactcagagtccggggcatggactctgggcactggcaatgctgtaagccagaaatgcccgttctgctcttctgctccaagatctctctaagcattagttgtggctgcagctctttctgcactgtggaggtgggaacccgagagcggtgttctaggaagggtccactcccatagcagacccagagcctggtcacccagataaggacttggctagctgtatgtgttagtggggaaatcctaagagcttggtggtggtggtgctgggtcaaggccaaagctcggaaagggacaacagatggaccacaatgctgctcagagcagaaatctggacatgggacaggtggatcgtgagtgctggaggacgagaagcaagttggctcctcttcttggagtgaggccagtggctaaaagagcctaggatactgctgtacaagtggaatgtatcttaggtgggacataggtctgatatccgagtggagggctctaattagaaactgttccatgaccccacctcagcccctccagagaaggcagaatctgaagttgctccaggagcccccaaagaagtccctgctccagccactgagttggaagaaagtgtctcaagtcctgaaggtaaagagggctggacaacgagggacaggccaatggatggggaatatcccaggacagacctcaaaagccttcttttcagggtcagtctcggtaacccaggatggctcagctgcagagcatcagggagcccctgatgaccctattggcctctttctgatgcgaccacaggatggtgaggtgaccgtgggtaagtgggaactttgtgctcatactcggggttaggggaaaggaagccccagaggaccaaggtcggagaagtcacctttctcttgcaggcggcagcattgtcttctcagcccgagtggctggggccagcctcctgaaaccgcctgtggtcaagtggttcaagggcaagtgggtggacctgagcagcaaagtgggccagcacctgcagctgcatgacagctatgacagagccagcaaggtgggacgcctggtcaggggcatggggagccagggagtacaggcatagggaggctgggagactgggaagcagggcagagctgaaatgttcagccataccagctgcacactgcacaaaacagctcccaagtggagccacctgccatctgcttggacttctatcatggtcatgtgcaggcaagagcccgtatgggtcttttattttattttttttttattttgttttttgagacagggtttccctgtgtaaccctggctgtcctggaactcactctatagaccaggctggccttgaacacagaaatccgcctgcctctgcctcccagaagtgctgggattaaagatgtgcaccaccactgcccaccccatcatgggtcttgaaaggtggatgctttctttaaattatagaagcgctctgtatgtgtcagccctgagaagtgagcttggcaggctttgccacaccccttctctttagggacgcagggcctctcctgtcccaaccttccttcatcctcctgctcacaggtctacttgtttgagttgcacatcacagatgctcagaccacttctgctgggggctaccgctgtgaggtgtctaccaaggacaaatttgacagctgtaacttcaacctcactgtccatggtgagggagtcctggggtctcgtctggtcttgtggtcttcatgggtcctggtcccttgggcttgtctctatctcccaactagagagggtgactagctgtggccagaagccagtgccggtcacccgaggtgtgaacgaaatgcatgctttcaggagaatcgtgggagcaagtcaagggtgggatgctgtttctgtgtccctgcctcacacagtttgaatgtgaactgggaggtgagtgggaggcagcccactgtggagactgagatgagaaactgcctcatctctctaaatatgaaccctgggagaagctgagaagatggagtcttgtgctcccactccctgaggtcacccccaccactacattctctttgcacacagaggccattggttctggagacctggacctcagatcagctttccgacgcacgtgagtggctctctttccttgggaatgggggtggggggcggggagaccagtgtgagggctgagggcccttgacattttagatagacgcatgtggggggtccaagctgaagtctgtggggggcaagggcaagctgccaggtcactgagaaactaacttccacaggagcctggcgggagcaggtcggagaaccaggtacccttcctgtcctccatctatcccatcacagagatgggtgggagccccacctgactgcaccccttcctcctataccactccatcgcctaagcccctgctagctcttcagagaagcctcatggggtctctctcttcagtgacagccatgaagatgctgggactctggactttagttccctgctgaagaagaggtgagtccttgggtcacatcttctagggcagagattaagacatggcattgagatttccaagctgtgtgtccctgaacagaatgaggcacttctctgagccagtttccttatcaagggggaatcttgtcccagtgtggacaagagttgtcttaataaccatccttagtcccagtgtggacaagagttatgtcttgtgcccctcaaaacctcctggtgaatctaccatagaccatttccacagattctgaaggccctaagaagtaggaagaaggttcccaaagcagtagcagtaaggacctagccctgacttcatttctttttctgtcctttctttccctctctctccatcttcccttcatggctactgctgctgctcctgcccagagagtaaggcgtggggctgggaggctctgggtcttacaagaggattttagctttggggacatgtaccctttctgctggggtttgggggaactcacacacaccagggtgacattcttaaggcttggaatggctctgacactgtctggttttatgaagaatgagactcctgccctgaaaagtaggggcactgtatggggaagagggaacaagtgaaggcactgggaaggatcccagtcttggcagggaggtgtccagacttctaatgtatgcctgtctttttccttcatctggagcagcagtttccggaggtgagttgaggttgggccctcctcaacaccctaagccaagagtcctccctagttcaacacccaagactcttagactgagaggggaggagaggggaggggaagggaggggaggggacgggagaggaagggaagggaagacctcatcctgtgtcctggaagggacaaggagggactgccttgagcttcccagtgggctgtgggacacagggactcaaagctggaggcacctgctgaagaagacgtgtgggagatcctgagacaggcaccgccgtcagaatatgagcgcatcgccttccagcacggagtcacagaccttcgaggcatgctgaagaggctcaagggcatgaagcaggatgaaaagaagagcacaggttagccctttccacacaagggaaagcacaaggcaccagctagctcccaacaaaggagccgggctggagaacaacacacaaaaacctgtagtatgggcagagggagcctctgggggcaagacaagcagtggtagcaaaaaaaacaatttaaaaaagaaaaagttcagcaaggcactgcatgttttacgtaattgcctagttaattctcccaacagcactgccaaacaaggcatagtatcagttcacttttacaagtgaggagacagagacacagagactccaggaactagctcaaaccccacagctgtcttcaggcccagcctgagtatttgagggcttctgcacagcccttcagctgcagagctgtttttaccaacatggctgcaaggggaggcattgttgtgaggtggccctggactcctccataccacacattggtgggtttgtggccttgggtcacccgcctaagccctgttctatctctacaacctgagacccatgacaatgatctggagaactgggaggtatggcgctaagggaggggaagccagcagggatgctacggtgagcttggcattaccaagaggaagagaggacgtgtgctacattcctagctctcacaacaagcttctatcatggtggatgcctctagccctgcccaagggctgagcagttagaaagaacctcaaggaagacaaagcaagacagacagagatgagaagacagggtcattatggaaacccggagggtgtgtctgggatacgcagcagggggaggaagatgcaggcacctgccatagccgctgtggttgtgcttgggggaagggtgtgggcattgggggtagctgggctgagttgtggggttcagcctttcagaagaagctggagcctgcctaccaggtaaacaagggccacaagattcggcttactgtggaactggctgatccggacgccgaagtcaagtggcttaagaatggacaggagatccagatgagtggcaggtgtggcagaggtggggcagggttctgggtcctgggtcctgggtcctggggttaagggggagccgtactgccttgtatatttctgtgagatctctctgactctggctcccagtccctgtttgtatcttcccccacctttggaatttaattccaggtcatttatcaatttctctctctctctctctctctctctctctctctctctctctctctctcctctgtgtggaacatggcaatggccccttctgtttcatagcaagtaagtctcctccccgacagcttgaagcagccatggggttggtgaaagtcaccaagcccaagaggggcatccgtgccctcctgatatgctgctgtgccctgcccaggtacatcttcgagtccgtcggtgccaagcgcaccctgaccatcagccagtgctcactggctgacgacgcagcctaccagtgtgtggtggggggcgagaagtgcagcacggagctctttgtcaaaggtgggccagggaccagggaaccctgggaggaaaagaggccacaggggaccagctcttatgtcgctcctccctggacagagcccccggtgctgatcactcggtccctggaagaccagctggtgatggtgggtcagcgggtggagtttgagtgtgaggtctcagaagaaggggcccaagtcaaatggtgagggcaggagcatgggggtgtgaggtggggctggagagggggacatctgcccagaggagacactgtcccatgcctggccaggctgaaggatggggttgagctgacacgtgaggagaccttcaaataccggttcaagaaagatgggcggaaacaccacttgatcatcaatgaagcaaccctggaggatgcaggacactatgcagtacgcacaagtggaggccagtcactggctgagctcattgtgcaaggtgagggcccctagcccaagcctggttggcctcatggaaggagcaggctttgggatagtgtttgataccatgacctcagcttcctatctgtgagataggtatgctgaagtataccctgcagagagtgttaggaggtcaacccctgaacctgagtttcctgtataactataatatcaagacacacatgtgtgtcccgtaactgcacatacctaaccagaggcctgcataccactgcctgtgagcccacatgtccccacagaggaccacactacactcacattccccgggagctcacaggctctgcccatcccccagagaagaagttggaggtataccaaagcatcgcggacctggcagtgggagccaaggaccaggctgtgtttaagtgtgaggtttcagatgagaatgtacgcggcgtgtggctgaagaatgggaaggaactggtgcctgacaaccgcataaaggtgtcccatataggccggtgagtgaaaaagagtcaggttaaggagggaggccagacgactcatgaagggaagagagaaaaagagaggaagagaaagttacagaggtcagacatgggagggaatcacatgggagtcacccaagacagaaggcagagatacagaggcaaaggttgggagacactaagggtgaggtgccctgccattccccaaactgggcagtggcagtaaccactgaggaggtggcactggctcatcccagagcctttgagggccgtgctgggctccagttcagagattacccacatcagtgtttgcctgtctccaaggtccctgacatggggttgcccctgtgcagacatcacgtctgcactgctgacctcagaaaacacacaagggagctggaaaacacaaaatttgataaagtagccacagtttaaaatatgaggacactaaggagctagggtaaggcacagctccctgaagttgggggtggatggagaggccagggttgtgagctcagttaccactgcccttccagggtccacaaactgaccattgacgatgtcacacctgctgatgaggctgactacagctttgtccctgaagggtttgcctgcaacctgtctgccaagctccacttcatgggtgagctagcattgtgtgtgtgtgtgtatgtctgtgtgtgtatgtctgtgtgtgtatgtgtgtgtgtgtgtgcatgcgtgtgtgtgtgtgtgtgtgtctgtgtgtgtgtatgtgcctgtctgtgtgtgtgtgtggggtggggcatgtccaggatgccctatgtcttggtccttcccttcccttaatgttccttgctttccttctctttcagaggtcaagattgactttgtgcctaggcagggtgagtcttgggatccatttgttgccacctcatccttttctcctacccccacatcccatcgcaaccctagccccttcctacttcagacacagggatggcaaatgtctgggaataggacctaagacccctgtcttagttagggcttctatggctgtaaggaaacactgtgataagaaagcaagtcgaggagaaaagggttcatttggcttacacttccacattgtagtccaccactgaaggaaaccgggacaggaattcaaacagggcaggaacctggaggcaagagctgttgcggaggccatggtgggtgctgcctgctggcttgctcctcatggcttgcacagcctgtttcttatagaatgtaggaccaccatccacaaagggccggcctctccgcatcaatcactaagaagacactctactgactagcccgcagcctgatcttatggaggcactttctcagtagaggtctcctcctctccgatgactagagtttgtgtcaagttgacataaatctagccagcacagcacagctacaccacccaggaccacaggttcatttgtaatttctctgaccttgaattctttgtgtgggcgcatgttcatgtgtgtgcaggtagattaatgcacaagtacacttgtgtggtgcagcctcgtccttgttattcctggacactgtccagtctgtggggctctcactgggacctggggctccttcattgggtgagaataggtgaccattgagtgggccccagagcccacctgcctccacccctccagtgctgggtttatacgtgcacatctggcttttctatgtgggttctgggcataaaactcaagtctaactttgccagctgagccatctcttctggccctgatttattcaggtttaaaatgaaaggtgacagtgtgtacttcacagagatgttgtcaccactatgagatgttagcatacctattcctctcctttcctcctcctcttcatcttcctcctcttcttcctcctcctcttcttcctcctccctccctccctcctgccatccctgcctctctctgcctctctctgcctctgtctgtctctctgtctgtctctctctctctttccttccctgagacagggtttctctgtgtatccctggctgtcctggaactccctctgtagaccaggctggccttgaactaggagatctgcctgcctcccaagtgcaggggtcaaaggtgtgagccaccactgccagtgcctctttttctttgacactaagatttaatcaggcatttcagaatcctaactttagcagactaactcaagatagggctttctccagctctgtgctgtccaaagtgggctcgctctacattatcaaccacgtgaagtatgtttggaagcacactgaacaccaatcacctggtgccctgggttgatgtgttgatgcccccccctaaagaatcttgtggtaatgacttccttatacctgtctaacacacgctttcctgacttgtgtgcccccttttttctattaggatatctggtgttcccccagacatagcgggtgagatgtgatacttggtaaccagaatgttatagacttcccaaagaaattcctgggcatgatggaaggttctagatcttgtttgggttggtagtcacacaggtgtgtacgtttattcagaatctcgagaatgggcaagtgagaaagcttagagaggaaatggtacttgtcacacaagcctgggacctgggttcaatctccagaggtcacaggagggtggaaataagaaaccaactctaccacgttgcccccacccacctgccatgtgtgcacacacagactgtcaggcctaatgacacatgtaatgatagtaatgataggtaccacattgaggtgcagtttgttcttcacgccttgccgtagaccatgcatagttaatgggaggctgaggcagcaagacttaagagtttgaggctagcctgggctaacctagtgagaccctgtctttagttttgttttttgcttttgcatttgctttcggagacaaggtccctctatatagttctggctgtcctggagctcacttagtagaccaggctatcatagctcacagagatgcactggcctttgcctcctgagtcctgggacttcatgcttatatcaccatgcttggctgagacccaagaaaatcctgcagaactatctatgctaaaacttggactttttattgtatataaattatacccagatgaaattgacaaaaaccaaccatcagggacatgagctcccagcacccactaagcaacctctgtacctcctctgccacatttgtgggcccccttttctctgaactgtactcctccatacagaacctcccaagatccacttggattgtcccggcagcacaccagacaccattgtggttgttgctgggaacaagttacgcctggatgtccctatttctggagaccctgctcccactgtggtctggcagaagactgtaacacaggtactgtagtttcccctccccacagttttccttcctgtacaatgggtgggtggggcaaatgagggtgaagctttgctcccgtcctgaaggcatacgctctactcagcttaagcacagaggtcctgcactggccagaagacagagcaaggcgggaaggaacgctgactcagcacccctaaccctaattccagtccattttgttcctaggggaagaaggcctcaactgggccacaccctgatgccccagaagatgctggtgctgatgaggagtgggtgtttgataagaaggtaagattgaggttgggttgtggctcgtggtcctcactcttccctatgcagccatgccatatctaccctaaggaagacctgttgggctcgttcatggtgcagagggatggaactgacaagcccctcgacagggtgttggtgttcttgactttgctaggacgtcattggaattaaaatgatccctgggtccctgcctcattcctcccactttcttctttttattcatttttttttattcttgagaatttaatacatgtatacaatgaaatatgagcatacccaccattgtatccctcctactcccattatcccccctcccaacccctttctgtctcttcttctggacagagtctcattatgcagccctacctgactgacctggaattacctgtgtagaccaggctggcctctgcctcccgggtgctccgtttttatgtttttctctaacccactaagttcaatagtgctgaaaatgcacgcatgagcagggaccacccactggagcacgggcagcctaccactgccctccctagcagttctgaccagccaacattgccccagttcagggtgggggcccggagggcacttccatgacttcctccaatgtctgactggctttgacaagtgccgacaagcaccactgttgagccatgatggctatagctgcaccatggccagaagacggcatttctcggcactcctccccatcctttagtccctacatcctttgtgtccgtatgccaaaatgttccctgagcctttggggtggagggcagtgggcttggtagagatatgtggctgagggctggacattccatctcttactctcagcactgacttctatacgtcgctgtcttgactgcttgctgtccccaaagaagcttcttgactaagcttgcgaccagccaggtctacggggaaagcatttagaaggcaatttgacaacatggccatttagcaaaataatagagccagggtcaactccagggcctgtgacctcctcagccatgggcttttgagcagggttacagaaccaggcatggcattcccctctgtgggacaggctcagatcctaacaggaagcagtgcttaccctataacagttgtgccagtatacccgtacttgcttggcaggttggtgtcttggcatgcagggtccagtgctggggaagcctggatagcctttcatttccaacaacccgcttagcacctctggctctctgaaagctagccagcggggagaacgcttcctcactgattttagattgtgtgcctccagagctgaccttggctatgtgtgggtgggttccctggcactctgcagcaaggccagctgccaggcacggcccagttctgcctttctcctctgtgtcacttctggctcttctgagggtttgaatacctgtagtctttctgtagctttgtggggttcacattcttcgcacttgacagataggaaaactgacacacacagaggctaagttccatgacaaaactagactagagtctgagccttgtgcctgtgtcttggctatggtgtcacattgaaaaattttgaactagtcacttacaggtagtttccacccaggctgtgtcctgccccccacttcccacagaccctgaactgaacttccctggcagtgaagggctgatggcaactgtggaggctctgatgggccttgtctccaactctctctccctttcagctgttgtgtgagactgagggccgggtccgggtggagaccaccaaagaccgcagcgtctttacagtcgaaggggcagagaaggaagatgaaggtgtctacacagtcacagtaaagaaccccgtgggcgaggaccaggtcaacctcacagtcaaggtcatcggtgagacaacctgagctccaggccggggagcacaggacaacaccagagagggcccattcactcactcacccattcactcagctactcagcaatgctcacggggacactccagagcaggcaatggtagtgactgggactgcttgagatgagtcctttgatgggtgtgtagaaatgtcactgtttgtgggacaatcactgtgtcctggagggctgggtggggtggggtggatgtagacattggacctgggacacacaggaggtgaaagtgaacagtgggaggcataagtgtggatggtagatgatggatggtaaggtaatccgggtctagatagcttggactctggtgctggtggtgaagagaagggtgagcgatgctgtgggactctgagttggacatagctgatgtggttcctcttccccatcaagatgtcccagatgctcctgcggcccctaagatcagcaacgtgggcgaggactcctgcactgtgcagtgggaaccgcctgcctatgatggcgggcagccggtcctgggtgagttccccgggcacagggacagccaagggcagctgtcacctgagtgacagggcaccggcccgacttctcatctcctctctcaggatacatcctggagcgcaagaagaaaaagagctacaggtggatgaggctcaactttgatctgctgcgggagctgagccacgaggcgaggcgcatgatcgagggtgtagcctatgagatgcgagtctacgcagtcaatgccgtgggaatgtccaggcccagccctgcctctcagcccttcatgcctattggtgagcctgccagatccccagaatgcagggaccaagggggtggatggttgcagcctcttagccggcaggcggcctctgcacagggctttgcacatggtctctagtgctctcagggggaaaactgccttgcattacacacgaagaagctcaggctggacaagttaaatgacctcagggttacctcgctggtagaatggacatcctagtgaacactagttacatccctcctggatttgagacaggatttcatttatgtagccctggctggcctggaactctgtatgtagaccaggctggcctcagactcactttcctctgccttctgagtgctggaattaaaagcatatgctatcctctcagaggcctcaaggggctgatcagatcccctggaattggagttacaagagcttgtgagccaccaggtgggtgctgggaagtgaccggagtcccctacaagagaaataaatctctaagagatgagtcatagcattagcccccagccttcccctttttaaggaacttttggtttgtgtaactcacctaatcatacattggcaggaagttctctcgcttcacactgggttttggctttctcttacacttccagcattccctacactgataagcaagttctttccgaatccttgtgttctcttggttcctttcctcttttgtgagtgagtcgctgttttgtatcagctcttggttcgtaagtcaatccagagacatgtctttaaacgcagaccaaataaatattcctggaggtgccttggaagccagcagaagggaagtccttcctatgagatcagcagacaactgaggtcctggtaattcatggctgcttctctgcatggtacagactcacatcctctctgtctctgtccagggccccctggcgaaccaacccacttggctgtggaggatgtgtcagacaccactgtctcactcaagtggcggcccccagagcgcgtgggggccggtggcctggacggatacagcgtggagtactgccaggagggatgtgagtactccacctggggccagcccttgggtgctagcaaggtaaagtgtgattttgactcatttatgcctgcacccaggctccgagtggacacctgctctgcaggggctgacagagcgcacatcgatgctggtgaaggacctacccactggggcacggctgctgttccgagtacgggcacacaatgtggcaggtcctggaggccctatcgtcaccaaggagcctgtgacagtgcaggagatactgcgtgagtgcccttctgctaaaaggcctgccactggccaccctttgccaatcaagacaggctggggacatgggctttagtaggcaagggcagggacaggggctggggcaggaagggccagggccttcatctatgccttgggctctcttggttcagtccctaattctggaacaggtactccagcacataggtattgtcctcagaactgaacagtgaggcttttcggagccatttagggtcgtctgggatacacttcccattcttctgttagtctttgttgttgtttgagacagggtctctctacatagtcctggctgttctggaactatgtagaccaggctagcctcaaacttactgtctgcctctaactcctgagggctgggaatgtgccatttgcacctggctcattctgttctttacctcaacaaaggtagaaggattggttctctaggtcagagggaagcaacaaattgacaagcatagaatcagagcctttgcttacatttttcaagaattgtggctccaaataacttccttaccatcttgaactgaagctgaacacagtggcaccccgcccccacacacccgtgcccccgtgcccccaccctgtagtgctggaggagggtgagggatgtgtagcaggcttggctgtatgagctccccctcaaaagataacacaggggctgggaagatgggctctctgttaagagcacttgctgttcttgcagaggatcagggcttggtttcagcacacatatgtgtggctcataaccatttctaactccagttctaggggacccattgcctttttctgacctctacaaacacaggcacacacatggcgcacatatatgcatgcaggctagatgctcatgcacataagtccataaataaatctaaaaagtgaaacacacacacacacacacacacacacacacacacacacacacgatagtaatatatcgaagctcactgtacagcttttagtgttgagcatactgcaattgctgtgggttaggagagtctggcccatgggaacttttttctcagctatagtgctctggaccctgccccaggagagaatggacctgtggaatccttagggttgggctacagaagggctgttagtgagctgcctcctttctacccacagaacgaccacggctccaactgcccagacacctgcgccagaccatccagaagaaagttggggagcctgtgaacctcctcatccctttccaggtaggctgactccttccctgtccctaagaagaaaccacagttgaaggatctcctgaaggctgcagaccctgaggcctccatccacgtgttgctggtgcagaacctgccccttcggagcgtcaagctcagggttgggctggtcatcttcccccagggcaaaccccggcctcaggtgacctggaccaaagaggggcagcccctggcaggtgaggaggtgagcatccggaacagccccacagacacgatcttgttcatccgagctgcccgccgcacccactcgggcacctaccaggtgacagttcgcattgagaacatggaggacaaggcaacgctgatcctgcagattgtgggtatgtgggcccggaacctccctttcagcacccttgtctcctgaccttgtgtctgggagcccagctcagagctcctgccgagggcacttagaaggagggccttctaggtactaacaggctcctgcttctgctcggtcacttcagaacgctcagtgtgccaatcagatctgtctcctgcagacaagccaagtcctccccaggatatccggatcgttgagacttggggtttcaatgtggctctggagtggaagccaccccaagatgatggcaatacagagatctggggttatactgtacagaaagctgacaagaagaccatggtgagcctggggccctgggtctacatataccctcccctgtgcttaccattcacccccaatccattattctggtttcctgcatggtaggggtagtggcacagggggtacccaagaaaggcagaggtccctcagagagtcctcccttccttcaccatcctccaggagtggttcacggttttggaacactaccgacgcactcactgtgtggtatcagagcttatcattggcaatggctactacttccgggtcttcagccataacatggtgggttccagtgacaaagctgccgccaccaaggagccagtctttattccaagaccaggtgctgtaccctccctcacactgtgaggaatctggggaaggagggggagcctcacttggggtgaccttcttggtaccaagacttgtcaccaacaggcatcacatatgagccacccaaatacaaggccctggacttctctgaggccccaagcttcacccagcccttggcaaatcgctccatcattgcaggctataatgccatcctctgctgtgctgtccgaggtagtcctaaggtagggactcaaggtcctgggctagactgacaggaggctggtctcctaggctccttatggttaactctccccagtctatattgtctttcccctgagcagagcctaatcccccattgctgactctctgttcattctcagcctctggctgagtctggtgctctagtgggaatttctagaatagtctctctgaattctcaccggttcttccatcaccaaaatgctctccttctcttctgtttacttgatgttcagcccaagatttcctggttcaagaatggcctggatctgggagaagatgctcgcttccgcatgttctgcaagcagggagtattgaccctggagatcaggaaaccctgcccctatgatggtggtgtctatgtctgcagggccaccaacttgcagggcgaggcacagtgtgagtgccgcctggaggtgcgaggtaaggagccttctgggccagggcttgggagaaagcaggacagcaccatggaccctgggcttggctctgctgtcctggttcaaggagtacctctggctgctagatcactggtcctgacatgttcagtggatcttggcttttggaagactagggaatcacatggtttccttccctcttacagttcctcagtgaccaggatggctccccagagatggctaggtacgtattccaaaccacctaaggccaagggcctagggtggctatcaggaaatgggggtacaagaagccacagttcatccacaaggcagcctatgtctcaggtacaaatggatgccaggctgtgtaccagaccggaagggagttggaggagcacccttttctgctactgcatgtgtgtgtgcaactgtgcatcctggaaggactggccagcagtgacaccaggcaggtctgctgggttctgaagaaactgaccctaaggataatgttaatactgggagcataaagtgtgtgggcttcagaagtggtgactggggacaggcccttttggctggctcattgtgtaggagcaataaaagatctgtgccattcctgggggttgatgtctcctgttcatgtccatgggaaagcatacagcattcgcttggtcaccccactctccagttcagtgtcctggacttgtgggacatcagcactggaaaggatgtcagcctccctccaccctcatgctcaggtgaggaagtgtggaagtgaaagccgttggaggcacaggcatatgggcctcatgccagtaacccaggcaacaccagctgggtgctatacgggggacagggcagtagagccctgtactgtattagacatcaagactccaagagcccacagctcacgaccacatctcatgggacagagtgactccatgcagctcagacacaggaaatcacaaccttctctgacttcctcccaagagaccacatttccttacaaatcttgtggccggcaggtctcagaagtgtcatggcagtgtgctgggtattctgcccacaggtgccagggtttcccatggcatagatagcccatgagggttggacatgggttaccactttattttttacagaaccctggtccgaaggcccttgggaggcccaggtcaccacagcacatctgaacacacgtgtacagggtcacagagcagtacccctgttttcctgtgacttctttatcaagctgttcaggtgtgaatgcccaagtcacctcctctctagtgcccagaacatctcaggactttacagccgtagtgtcgtaggtgttcctttctggcaccccaggaagcccaggaggcaggaggccagggcaggctctcagtatgccaacgctggatgcagatgagctagggacagccttcctcaggcccgggctgagaggagtgcacaggagcccaagtggagttcaggacatttatttcacatcacacagctgtacatttttctataaataatgtggagctgaaatatttacattctcctcctatccagtccatagctttcttctggcactgaagccaggagactctgcctgcagacaggcgtgcactctgggctcagctcagccctgacccacctatccccggcccttaggcagagcagctggtgctgtctgggacaccatcacctcattcctccgtcctctcatgccaaaggccaggaagaccactgcacaaatcccagctcggcacatggcagccactcagggacacccatcgatggagctggggcaggcagcagcatgacatgcacccacagtttagaaactgtgaggaagcaggaaggtcgcccaccacttactgagcttcctttgaacctcccctcctcctcccaggccctcagccaggaagatttgtccccaggtgtctttcacttcccagagtggaactgtcccaggtgccccacagtgccagatcatagaggacagagagaagactcctaaactggaggatataaggactaggacaagggaccacagtgcaaacatctcaaggacaggcaatagtgggctcacagtgaccccacagacacacacaccacacacaccacacacacacacacacacacacacacacacacacacacacacactctggagccctgagggaacagaaggctagtctgctattgtaggaagagaaagtaatgaggctagcttagccccgtgacagatgaacacaaagacactcagacgtaagagaagaccagctagaccgtgggaaggaacttgctgagaacacacacacattcccatctcagtccagcagcttcggtgcttaggagcagcaagaggtgaggggagacccctgggcttggccagctgtggaacccttctatcagctagagacaggccgaggtggggttcgaaggtcttcttcactgctacgaactgcggccacatacgagaagagacacaacacagagtagcagatctcgtgggcctgcagggaacagaagacccgttggatcagccacactgagactccttcttaggtagagggtcagcctagagtacgaggcctgccctgacactagtgcaggcccctgggctgagtgagcctcaggcaagtctctggaagcctttctcctgagagaggggggtcagcacatgtaccccagatgaaaggtgtgtttgacttgagttgaacccctggcatctagtcccccgcgagggtccacccttcttgccggaaggttcccagggagccctgcgtgcttcggcctgctgtggctgggacgcatactcaccattggcgtcttgtacttgtggctcaccacttctttaatttcaggaactaaaaccggacgggcaagagacaaaacagaaagttcaaaactaagagcaacagggtcctactcccccgggcggctgcgcccggtgccaggctccccttccctctgtagcctctcacagtggctgtggcggcttaggctacgatagaacagagctcagcctgtccaggcagactcttcaaacagacatcgcaagtctgccgtggctttttacttgatgcctgcgatctacgtgcttctatgcatgtcccaaggtagaagggctggccatcctcccgcctggtcacagctactgtccagggcttttgaggagttgcagtagggaagagagaggtctctagcctgtgcctcccttgctgagatgcccatgaactcatccctgtcaccagagctcacaagtctagtcgtgataaacgtcactcctcccacaacccccactcagaggctcatgaggttgtatgaagtaataggatactaaacccaacatcagacttggaggaggcatcaactcctgggaggcaggagaatctcaggcctgcctgtgtgagggagagcgtcagagggctctggagcagacacactgatcaggagagaaaggcgaggacggcacccaggtggaggtggagcatcaggcaagtacacacatgtccacagcccagaatgcaagattaggagtcaccccatcccagccatgcagggtctgtgcccggccagaagaaggagcagggtcccccaggtctagccatcagtgtggccttgtgagactgggaggagggcgtggcatccctctggggacagagaagatacagtgagagctggccacaccttcttctgaccctgggaggtagaatacccagaacccagtgttagcatgaaataaactcgtcagaggcagagcaagaagccccaggtcattctcctgagttggaagagttccccaagtatctctctggcaaaagagagaaggtagcagcacggtgaagagagaactcagaacggtgagccagcacaaggggaggggcgttggtaaggaagagggtggggagaaggaggagagaccactaatcatggaagcagctaggttggttgaaaagagcccaccacccactgcagggcccaaggctggggcctgggaataggcagcaggagccgaggtcacgttacctgccggagaacgaaggttttcatagcagcgatgaggggcacaaaagaatgaagcacaaacacagcaggaactcaaagccccagggtgagccccactacaccactcctttgtgcctgtttggggaggctggatccagctccagacagacctgcccttctgcctctgaggcccacgaggcttctctggcctcagctgagtctgtctgtggtgcctcgtgccctcctctacaacagagggaaccagagtggtgccagggaagcttgggtgggaccctgttgggctgctagagagatggcaggaggcaacatggacacaacagagtttgaggatcaccagtctgctctgccccagaactttctgaccactggctggccaaaccaggaaagagggcgctacatcatcaccatcctagactctaagctgtccaaggcttcctgctcctcagggaccactggctctcttgtctctctcctttctgttctatcttctcgggctcctctccttccctgtcactcctctcctcctgaccttctcctctgcagaggctttgtccccctgccctagtccctcctctggagctccaaggtttgagttactgccatgtgagtccagacctaagagcaaaatagtgtaattaccaaattcttccaggacaaagacgcctcgaactgtattgcactttttaatgtgattcagctctatgaaaacctgcaagagagggagggggcgggggtaaggcccataggctccacccctgccccatgaagcccactctcccagctacagcccatgctccccaaggaaacctagttcccaaagggaggacataagaattcacacacacacagtcaaaagcgctaagaagcgaagaaagcagaaagggcaggtaccttccgctcctggccggaggagaaagcatgggagagaaaggaaggcattagttttaatggtcaaacccaaccaaaggcccctctgctggcctgggctaccccgcccatcccctctgcccaggcagcactcataggacacagtgccccagggatctctgactcaggtcccttaggtctctacccttccatacatcctcctccggcgcagagggctggcacgggtgcaaagctcccctcagactgtccttagggtgggagatgatcttatcttccttgacacaggatccaggacctcccaagaagtatgcagtaacattaataactgctaccacgtgccgagcactgacttggcactttacgaacttatctgactgttatagtctacaatacggtctccatgttacggatgagaaagaaataggatcagagcatttgtttgcttgtgaatgaagctgggcctcatatccaagtctatgcttttcccatctgttactccaagtgcataggcacactgaggatggaagctttgttcaccatagctgcctgctgtcagcagaagacgggtcagggccacaggccactgctcccttaatgttctagaccatggggtcagacccagaagtcagccttcgctgttcctctctgtaggatgctacttctaggagccaagccttccaggacaggccagtttggaaatggtgtgaaactgttaatggagtaggcccaggatgcggaacactgagtgctgaacaaggaggtgggtgggggtctaggtatgaattaacaagagctcatcttttctgggagcaagggatgcaacactgaaacgggatcagaagccacctctctagctccttcatggactaaaaaagtacataggcattacccttccttgggagaaccctaagatctttatgggtgtagtgccacactaggttccagagtggaaatacactaatagagggacaggatatctgggcagctatttagctctttcttgtgcctaaatttcccagctagacgtcttcccagctaaactggccaggagggacaaagtaatgacaaagtcagatatccacccgcattgagttcctgttgcttggccaggggcttcaggatatcatactaggacctagttcagagtcttgaggactttaggggaggggaggaaaggcacttgtgtgaggagtcagagccgggaacggacctgggatgatgcgctggcctcagagggaattagcttaaggaatgtccactgagagaaaaagtatcactgtgttaaaagaccaagaagaaaaagagaagtcagctcctagggtggaatcacagtaggaaaaggatcctgaagtcaaaggatcccccgccaaaggaggggcgtgaggcctgtggagcagggcagggtaaggacatccagaggaagagaaaggacaagaaccagcaggaaaaggcaaacacccatacttggagaggacagagacagacagacagacagacagactgatacacacacacacacacacacacacacacacacacacacacacacacacacacatgaagtacacagggagatcggccaatctactctcaaagcaaaaccaccaagagaagcacaccctgggaatacagaaaggcagagacacgcaagaggggccaagtgagacgctcccactcacactgtgtgagtctaatgggtgggcagcacagccaccaagcctctttctctttcccagttcccaacacaggctccctgctgcatctgctcagagcctggtggtctcgccagtcactgtgccctcccctttgatgtctctctgtctagccattcacctctctctggcctaaggctctccctcttactcactgggagagcgcggagagcctggaaactgatcttatgtagcaaaacactagggccggaggccgcctgctgccgcttgtgcatacctggttgtgcatgaacttgagattgatcccttccagggtgacttgaagcaagccaccctctccagtcttcatgtcctgcacagggaactcaccgcctagctcaggccctgtggtgaaaggaaggcgtcagctgacctgtgaggtgcaaatcccacagcccaactttctgagcaggtctgtggtgaggagggggctacggcgtgggggtgggggtgggggtaggggtgtgtgaggggtgcgtgaagggtctgttcctcaccaggtttgatgctttgctgtcgggcagcagcacgttccatgctgtccttcacacagtagtacagctctcgacactgtagcacagggaggggtggacttgtgacaggagccctgccaagctgccatttcccctgttctagagcttccaaaggctactactgtctcagagccagggtgagcattccacatgagagctagaggccagctctggctctagctgtggattttggaattgtaacttcccagtgaggaattctttttttttttttttttttaaagatttatttattatatataagtacactgtagctgtcttcagatgcaccagaagagggcgtcagatctcattacagatggttgtgagccaccatgtggttgctgggatttgaactcaggaactttggaagagcagtcggcactccaaaccgctgagccatctcaccagccccccagtgaggaattcttaaatacctatccaatccccagcccaaacacagaccctgagtaccttcttggtatagaacttgttgagctgggtctcagagccatttctccgccataagcacaggaccttggtcttgggacagtaggtcatattgatgagcttctcataccaccagcgctcgtacaccgtcccaatgttactacgcaacaccacgcagtcatcacacacctgaaaaggcacagcattcatcagtggtcctggtcgttgacaggttttcccatcccaggccgcactacgtgcccctcacagggaaaggatagcatgactgaccctgggagcagccctatggtcaagttttctgaccaatgctcaggttcccttaggggaaacacaagcaatggacatactttctgttaggattactgatagaaatggaatctttgaaaatgtgcactgtccaagtcagttagtgtgtaccccctcatattttctctctagaccaagggcttggagggtatctcttgcctccatcttacaacatggagaaatcagctctgttaccaagcagaaggttaggtgtaactggggagaaaacactggggtcagtacatcttctagttttagctcttctctaaatacttttatgtagaattcactaaactactttatttggaatttacttctaaattctactataaaatactttgatgattatgtaagtaacacacgaacgacggttactgcataaaaattactcagcacaggatggtaagcgagcattaagaagcaaggcccccttcatctgcttttcttgctcaacagctccctccagatggactcacccattctcatagcttcagtggagtgacactgcggcatgctggttagaacatgggtctcaggccaggctgtgtggcttgaggtcctagctctaccatacttagctatgtcatgttgaacaagctcttttgttcatgcctcctcctggctaaggaggggctcactgacagtaagaactattaaatgtattaatatgcacacttttttgtgttgttatgtttgtttgtttgcttgcttgcttaaatatagtgttcctctctatgtactcctggctgtcctggaccttgttatgtagatgaggctagcctcgaactcacagagatcattctgcctctgccttccaaatgcagggaaaaaggagtgcaccactgtacctggcacaacatccataaaattcttaaggtgcatcaaaagccaggtacaggtctgggtatatagcttaacagtagggtgtttgcacataggaagtacccaggtagctgcgttgacaatctagttactacacaaaaccataataatagctgggcgtggtggtgcacatctttaatcccagcactcgggaggcagaggcaggcggatttctgagtttgaggccagcctggtctacaaagtgagttccaggacagccagggctacacagagaaaccctgtctcaaaaaacaaacaaacaaacaaacacaaaacaaaacaaaaaaccccataataattagggccagtgagatggctcggcaagaacagtgcttgctaaacaagtgaggaaacttgattttgatcccccaagccctcataaacatggagcgagatagaaccagctctacaaggttatcttctgatctccacacacatgtggcagcacatacaaataacaagtaagttataatttatataattattattaatatattgatgctctgggttggcgagatggttcagcaggtaagagcaatgactgctcttccgagggtcctgagttcaaatcccagcaaccactcataatgagatctgacgccctcttctggtgctacagtgtacttatttataataataaataaatatttgggctggagcgagcagggactgagcgagtggggttgactggagggagcagaggtcctaaaattcaattcccaacaactacatcaaggctcacaaccatctgtacagctacagtggactcatatacataaaacaaacaaacaaagaaacaaacaaacaaatctttataaaaaccatattggtgctcttcaaatctttctccatccaagccctctctgccctctcttctctgctcttgaccactcttacttagaaggtattcttgcaaagacactgaatctaaaaatcaagcatctctactgggctaacagtttatataagaaacacaaatgaccaagaaacgggttcaaggcgatgtgatcactaaaaagtctagatgccctaaagatagaaagtgaatttctttactttccactggcaatgggtggagcctctgtaaggacacacttatagctatcaaagctgggcaagcagtgcacgcctttaatcccagtgcttggaggcagaggtggacagatctaatgtgagttcaaagctagctgggtctatacagtgggtttcaggccagttatggctatattataaaactctgtctcaaaaacaaaacaaaaaaaaaaacaaaacaaaaacaaacaaaaaaggaaacagggcgccgaaatggctctgggagtaaagggacttgccaccaaggctgaacaccaaggagtttcagtttgatacccagaatccatatggtgcaaagagaaaactaactcctataagttgttctctgactttcacacacatgctgtgatacacatgcataaataaatataacttaaagatttattttattatatatgtaagtacactgtagctgtcttcagacacccagaagagggcgtaagatcacattatgggtggttgtgagctaccatgtggttgctgagatttgaactcaggaccttcagaagaccaatcagtgctcttaaccactgagccatctctccaacccccataaatttttataaaagaaggaaagataaaagaataaagtctttttattctagtatagaggagtatagctgtcctggaattcgctctgtagaccaggcaggcctcaaactctgccttcaggtgctgggattaaaggtgtgcaccaacactgcctggctatggtcacaccttgttgcttgcctacagtctcctggaggatacaaaggagactacgacacttgtcagatgaaaggctgaggacagtaaaaaacggaaggaggtggcggtgagaatacgcagcagccaccacccaggcacgccattttatggtattctcattcatggacaatgcaattatgtcacacatccacgactgaagaaaagaaatggtgagggaccacatagttacctaataatttgcataataacttgataaattagtgataaatggggcaggggggaccctagcattgctctaggagcttcttgtgtctccagcataaactcacttccatgaaaaagatgtctccatttgtgtccgtccctgcatgcacaacaaaagtctgcttcttcatgtgccggctgccgctggaccggatggagagatcacgtccattctgaggagaaagagacacttagaaactttcagctgttgctcttacacatagatttggaattaaaaaaaaaatgtctcagggagtgtgggtggggtggggagtctatgaagggggcactggaagggggacaacatttgaaatgtaaataaataaaataattaaaaaataaagtctcacttagcaattaaattcctaacagtttccttagtcatatctttttgtttgtttgtttattttctttgtttcaaggcaagatttttctgtgcagccctggctgtcctggaactccctcggtagaccaggctggcctcgaactcagagatcagcctgcctctgcctcccgagtgctgaagttaaaggcctgtgccactgtgcccactgcatagcactatattatctgctagccactggccacagggaaggaccaaagacttgttggagtcatagtcccaacgtctcttaaaaacttaagatctcaaagaacttctgtttatgtgagttataactatgatttctattcttgaaatactaataacattttaatgtttattaattcatttaaaaataattggactgggaggaagggggctgtgatggggatgtaatagttggctgatagccaagtataagataagcaacacaccttttatacaatgtatttctcctaataacagcaacaatgaaaagagtatcagtgttttacttataaatctccttaatgtttggtttaggagacaacagctgcattcttgagctaggcaaggtaccacacactcaagaggctgaggcaggaggatcataagtttgaggccagcctgagctacatcacaaaacaccatttaaaaaaaaaaaaaaaaagaaaaagaaagaaagaaagaagggagcactagaaaggaaggagtcggccctggtgtgcgcctgttttctccagcacttgggagctggggccagaggatcagaaagctaagatcattcttaatcgagtaccagttgaaccatgaaatcttattctcatcagaaaaaaataaaataaaataaggagcacacctttaataccagcacttgagagaggcagcagcaggtagatttctgtgagtttgaggccagcctggtctacatattaagttctaggccaatcaatgctacatagtgagacctgtctcaaaaataaaatagaacaaaataaaattaaaaaggggttgataagacacacagcaagtgtagaacctgacagcctgaatttgatctctagggcccacacagtaggagagaactctagcaaattgtcctctaacacacatacacaaaaccaaataaaaatccaatttaaaaataagagctgtctttgtttaaaggatttctgtgagtgggagggcagcctggtttatatagcaagttccaggatagccatggttttatatatatagagagatgctgtctctataagggagggaaggagggagggaaggtgggagggagggagggaggagaggagagaaaagaaaggaaggaaaggaaggaagaaaggaaggaagggagggaggaagggagggagggaaggggtgagaag

SEQ ID NO: 84 - DNA, 42373 bp, Mus musculus
cttctcaccccttccctccctcccttcctccctcccttccttcctttcttccttcctttccttcctttcttttctctcctctcctccctccctccctcccaccttccctccctccttccctcccttatagagacagcatctctctatatatataaaaccatggctatcctggaacttgctatataaaccaggctgccctcccactcacagaaatcctttaaacaaagacagctcttatttttaaattggatttttatttggttttgtgtatgtgtgttagaggacaatttgctagagttctctcctactgtgtgggccctagagatcaaattcaggctgtcaggttctacacttgctgtgtgtcttatcaacccctttttaattttattttgttctattttatttttgagacaggtctcactatgtagcattgattggcctagaacttaatatgtagaccaggctggcctcaaactcacagaaatctacctgctgctgcctctctcaagtgctggtattaaaggtgtgctccttattttattttatttttttctgatgagaataagatttcatggttcaactggtactcgattaagaatgatcttagctttctgatcctctggccccagctcccaagtgctggagaaaacaggcgcacaccagggccgactccttcctttctagtgctcccttctttctttctttctttttctttttttttttttttttaaatggtgttttgtgatgtagctcaggctggcctcaaacttatgatcctcctgcctcagcctcttgagtgtgtggtaccttgcctagctcaagaatgcagctgttgtctcctaaaccaaacattaaggagatttataagtaaaacactgatactcttttcattgttgctgttattaggagaaatacattgtataaaaggtgtgttgcttatcttatacttggctatcagccaactattacatccccatcacagcccccttcctcccagtccaattatttttaaatgaattaataaacattaaaatgttattagtatttcaagaatagaaatcatagttataactcacataaacagaagttctttgagatcttaagtttttaagagacgttgggactatgactccaacaagtctttggtccttccctgtggccagtggctagcagataatatagtgctatgcagtgggcacagtggcacaggcctttaacttcagcactcgggaggcagaggcaggctgatctctgagttcgaggccagcctggtctaccgagggagttccaggacagccagggctgcacagaaaaatcttgccttgaaacaaagaaaataaacaaacaaacaaaaagatatgactaaggaaactgttaggaatttaattgctaagtgagactttattttttaattattttatttatttacatttcaaatgttgtcccccttccagtgcccccttcatagactccccaccccacccacactccctgagacattttttttttaattccaaatctatgtgtaagagcaacagctgaaagtttctaagtgtctctttctcctcagaatggacgtgatctctccatccggtccagcggcagccggcacatgaagaagcagacttttgttgtgcatgcagggacggacacaaatggagacatctttttcatggaagtgagtttatgctggagacacaagaagctcctagagcaatgctagggtcccccctgccccatttatcactaatttatcaagttattatgcaaattattaggtaactatgtggtccctcaccatttcttttcttcagtcgtggatgtgtgacataattgcattgtccatgaatgagaataccataaaatggcgtgcctgggtggtggctgctgcgtattctcaccgccacctccttccgttttttactgtcctcagcctttcatctgacaagtgtcgtagtctcctttgtatcctccaggagactgtaggcaagcaacaaggtgtgaccatagccaggcagtgttggtgcacacctttaatcccagcacctgaaggcagagtttgaggcctgcctggtctacagagcgaattccaggacagctatactcctctatactagaataaaaagactttattcttttatctttccttcttttataaaaatttatgggggttggagagatggctcagtggttaagagcactgattggtcttctgaaggtcctgagttcaaatctcagcaaccacatggtagctcacaaccacccataatgtgatcttacgccctcttctgggtgtctgaagacagctacagtgtacttacatatataataaaataaatctttaagttatatttatttatgcatgtgtatcacagcatgtgtgtgaaagtcagagaacaacttataggagttagttttctctttgcaccatatggattctgggtatcaaactgaaactccttggtgttcagccttggtggcaagtccctttactcccagagccatttcggcgccctgtttccttttttgtttgtttttgttttgtttttttttttgttttgtttttgagacagagttttataatatagccataactggcctgaaacccactgtatagacccagctagctttgaactcacattagatctgtccacctctgcctccaagcactgggattaaaggcgtgcactgcttgcccagctttgatagctataagtgtgtccttacagaggctccacccattgccagtggaaagtaaagaaattcactttctatctttagggcatctagactttttagtgatcacatcgccttgaacccgtttcttggtcatttgtgtttcttatataaactgttagcccagtagagatgcttgatttttagattcagtgtctttgcaagaataccttctaagtaagagtggtcaagagcagagaagagagggcagagagggcttggatggagaaagatttgaagagcaccaatatggtttttataaagatttgtttgtttgtttctttgtttgtttgttttatgtatatgagtccactgtagctgtacagatggttgtgagccttgatgtagttgttgggaattgaattttaggacctctgctccctccagtcaaccccactcgctcagtccctgctcgctccagcccaaatatttatttattattataaataagtacactgtagcaccagaagagggcgtcagatctcattatgagtggttgctgggatttgaactcaggaccctcggaagagcagtcattgctcttacctgctgaaccatctcgccaacccagagcatcaatatattaataataattatataaattataacttacttgttatttgtatgtgctgccacatgtgtgtggagatcagaagataaccttgtagagctggttctatctcgctccatgtttatgagggcttgggggatcaaaatcaagtttcctcacttgtttagcaagcactgttcttgccgagccatctcactggccctaattattatggggttttttgttttgttttgtgtttgtttgtttgtttgttttttgagacagggtttctctgtgtagccctggctgtcctggaactcactttgtagaccaggctggcctcaaactcagaaatccgcctgcctctgcctcccgagtgctgggattaaagatgtgcaccaccacgcccagctattattatggttttgtgtagtaactagattgtcaacgcagctacctgggtacttcctatgtgcaaacaccctactgttaagctatatacccagacctgtacctggcttttgatgcaccttaagaattttatggatgttgtgccaggtacagtggtgcactcctttttccctgcatttggaaggcagaggcagaatgatctctgtgagttcgaggctagcctcatctacataacaaggtccaggacagccaggagtacatagagaggaacactatatttaagcaagcaagcaaacaaacaaacataacaacacaaaaaagtgtgcatattaatacatttaatagttcttactgtcagtgagcccctccttagccaggaggaggcatgaacaaaagagcttgttcaacatgacatagctaagtatggtagagctaggacctcaagccacacagcctggcctgagacccatgttctaaccagcatgccgcagtgtcactccactgaagctatgagaatgggtgagtccatctggagggagctgttgagcaagaaaagcagatgaagggggccttgcttcttaatgctcgcttaccatcctgtgctgagtaatttttatgcagtaaccgtcgttcgtgtgttacttacataatcatcaaagtattttatagtagaatttagaagtaaattccaaataaagtagtttagtgaattctacataaaagtatttagagaagagctaaaactagaagatgtactgaccccagtgttttctccccagttacacctaaccttctgcttggtaacagagctgatttctccatgttgtaagatggaggcaagagataccctccaagcccttggtctagagagaaaatatgagggggtacacactaactgacttggacagtgcacattttcaaagattccatttctatcagtaatcctaacagaaagtatgtccattgcttgtgtttcccctaagggaacctgagcattggtcagaaaacttgaccatagggctgctcccagggtcagtcatgctatcctttccctgtgaggggcacgtagtgcggcctgggatgggaaaacctgtcaacgaccaggaccactgatgaatgctgtgccttttcaggtgtgtgatgactgcgtggtgttgcgtagtaacattgggacggtgtacgagcgctggtggtatgagaagctcatcaatatgacctactgtcccaagaccaaggtcctgtgcttatggcggagaaatggctctgagacccagctcaacaagttctataccaagaaggtactcagggtctgtgtttgggctggggattggataggtatttaagaattcctcactggggggctggtgagatggctcagcggtttggagtgccgactgctcttccaaagttcctgagttcaaatcccagcaaccacatggtggctcacaaccatctgtaatgagatctgacgccctcttctggtgcatctgaagacagctacagtgtacttatatataataaataaatctttaaaaaaaaaaaaaaaaaaagaattcctcactgggaagttacaattccaaaatccacagctagagccagagctggcctctagctctcatgtggaatgctcaccctggctctgagacagtagtagcctttggaagctctagaacaggggaaatggcagcttggcagggctcctgtcacaagtccacccctccctgtgctacagtgtcgagagctgtactactgtgtgaaggacagcatggaacgtgctgctgcccgacagcaaagcatcaaacctggtgaggaacagacccttcacgcacccctcacacacccctacccccacccccacccccacgccgtagccccctcctcaccacagacctgctcagaaagttgggctgtgggatttgcacctcacaggtcagctgacgccttcctttcaccacagggcctgagctaggcggtgagttccctgtgcaggacatgaagactggagagggtggcttgcttcaagtcaccctggaagggatcaatctcaagttcatgcacaaccaggtatgcacaagcggcagcaggcggcctccggccctagtgttttgctacataagatcagtttccaggctctccgcgctctcccagtgagtaagagggagagccttaggccagagagaggtgaatggctagacagagagacatcaaaggggagggcacagtgactggcgagaccaccaggctctgagcagatgcagcagggagcctgtgttgggaactgggaaagagaaagaggcttggtggctgtgctgcccacccattagactcacacagtgtgagtgggagcgtctcacttggcccctcttgcgtgtctctgcctttctgtattcccagggtgtgcttctcttggtggttttgctttgagagtagattggccgatctccctgtgtacttcatgtgtgtgtgtgtgtgtgtgtgtgtgtgtgtgtgtgtgtgtgtgtgtgtgtgtatcagtctgtctgtctgtctgtctgtctctgtcctctccaagtatgggtgtttgccttttcctgctggttcttgtcctttctcttcctctggatgtccttaccctgccctgctccacaggcctcacgcccctcctttggcgggggatcctttgacttcaggatccttttcctactgtgattccaccctaggagctgacttctctttttcttcttggtcttttaacacagtgatactttttctctcagtggacattccttaagctaattccctctgaggccagcgcatcatcccaggtccgttcccggctctgactcctcacacaagtgcctttcctcccctcccctaaagtcctcaagactctgaactaggtcctagtatgatatcctgaagcccctggccaagcaacaggaactcaatgcgggtggatatctgactttgtcattactttgtccctcctggccagtttagctgggaagacgtctagctgggaaatttaggcacaagaaagagctaaatagctgcccagatatcctgtccctctattagtgtatttccactctggaacctagtgtggcactacacccataaagatcttagggttctcccaaggaagggtaatgcctatgtacttttttagtccatgaaggagctagagaggtggcttctgatcccgtttcagtgttgcatcccttgctcccagaaaagatgagctcttgttaattcatacctagacccccacccacctccttgttcagcactcagtgttccgcatcctgggcctactccattaacagtttcacaccatttccaaactggcctgtcctggaaggcttggctcctagaagtagcatcctacagagaggaacagcgaaggctgacttctgggtctgaccccatggtctagaacattaagggagcagtggcctgtggccctgacccgtcttctgctgacagcaggcagctatggtgaacaaagcttccatcctcagtgtgcctatgcacttggagtaacagatgggaaaagcatagacttggatatgaggcccagcttcattcacaagcaaacaaatgctctgatcctatttctttctcatccgtaacatggagaccgtattgtagactataacagtcagataagttcgtaaagtgccaagtcagtgctcggcacgtggtagcagttattaatgttactgcatacttcttgggaggtcctggatcctgtgtcaaggaagataagatcatctcccaccctaaggacagtctgaggggagctttgcacccgtgccagccctctgcgccggaggaggatgtatggaagggtagagacctaagggacctgagtcagagatccctggggcactgtgtcctatgagtgctgcctgggcagaggggatgggcggggtagcccaggccagcagaggggcctttggttgggtttgaccattaaaactaatgccttcctttctctcccatgctttctcctccggccaggagcggaaggtacctgccctttctgctttcttcgcttcttagcgcttttgactgtgtgtgtgtgaattcttatgtcctccctttgggaactaggtttccttggggagcatgggctgtagctgggagagtgggcttcatggggcaggggtggagcctatgggccttacccccgccccctccctctcttgcaggttttcatagagctgaatcacattaaaaagtgcaatacagttcgaggcgtctttgtcctggaagaatttggtaattacactattttgctcttaggtctggactcacatggcagtaactcaaaccttggagctccagaggagggactagggcagggggacaaagcctctgcagaggagaaggtcaggaggagaggagtgacagggaaggagaggagcccgagaagatagaacagaaaggagagagacaagagagccagtggtccctgaggagcaggaagccttggacagcttagagtctaggatggtgatgatgtagcgccctctttcctggtttggccagccagtggtcagaaagttctggggcagagcagactggtgatcctcaaactctgttgtgtccatgttgcctcctgccatctctctagcagcccaacagggtcccacccaagcttccctggcaccactctggttccctctgttgtagaggagggcacgaggcaccacagacagactcagctgaggccagagaagcctcgtgggcctcagaggcagaagggcaggtctgtctggagctggatccagcctccccaaacaggcacaaaggagtggtgtagtggggctcaccctggggctttgagttcctgctgtgtttgtgcttcattcttttgtgcccctcatcgctgctatgaaaaccttcgttctccggcaggtaacgtgacctcggctcctgctgcctattcccaggccccagccttgggccctgcagtgggtggtgggctcttttcaaccaacctagctgcttccatgattagtggtctctcctccttctccccaccctcttccttaccaacgcccctccccttgtgctggctcaccgttctgagttctctcttcaccgtgctgctaccttctctcttttgccagagagatacttggggaactcttccaactcaggagaatgacctggggcttcttgctctgcctctgacgagtttatttcatgctaacactgggttctgggtattctacctcccagggtcagaagaaggtgtggccagctctcactgtatcttctctgtccccagagggatgccacgccctcctcccagtctcacaaggccacactgatggctagacctgggggaccctgctccttcttctggccgggcacagaccctgcatggctgggatggggtgactcctaatcttgcattctgggctgtggacatgtgtgtacttgcctgatgctccacctccacctgggtgccgtcctcgcctttctctcctgatcagtgtgtctgctccagagccctctgacgctctccctcacacaggcaggcctgagattctcctgcctcccaggagttgatgcctcctccaagtctgatgttgggtttagtatcctattacttcatacaacctcatgagcctctgagtgggggttgtgggaggagtgacgtttatcacgactagacttgtgagctctggtgacagggatgagttcatgggcatctcagcaagggaggcacaggctagagacctctctcttccctactgcaactcctcaaaagccctggacagtagctgtgaccaggcgggaggatggccagcccttctaccttgggacatgcatagaagcacgtagatcgcaggcatcaagtaaaaagccacggcagacttgcgatgtctgtttgaagagtctgcctggacaggctgagctctgttctatcgtagcctaagccgccacagccactgtgagaggctacagagggaaggggagcctggcaccgggcgcagccgcccgggggagtaggaccctgttgctcttagttttgaactttctgttttgtctcttgcccgtccggttttagttcctgaaattaaagaagtggtgagccacaagtacaagacgccaatggtgagtatgcgtcccagccacagcaggccgaagcacgcagggctccctgggaaccttccggcaagaagggtggaccctcgcgggggactagatgccaggggttcaactcaagtcaaacacacctttcatctggggtacatgtgctgacccccctctctcaggagaaaggcttccagagacttgcctgaggctcactcagcccaggggcctgcactagtgtcagggcaggcctcgtactctaggctgaccctctacctaagaaggagtctcagtgtggctgatccaacgggtcttctgttccctgcaggcccacgagatctgctactctgtgttgtgtctcttctcgtatgtggccgcagttcgtagcagtgaagaagaccttcgaaccccacctcggcctgtctctagctgatagaagggttccacagctggccaagcccaggggtctcccctcacctcttgctgctcctaagcaccgaagctgctggactgagatgggaatgtgtgtgtgttctcagcaagttccttcccacggtctagctggtcttctcttacgtctgagtgtctttgtgttcatctgtcacggggctaagctagcctcattactttctcttcctacaatagcagactagccttctgttccctcagggctccagagtgtgtgtgtgtgtgtgtgtgtgtgtgtgtgtgtgtgtgtgtgtggtgtgtgtggtgtgtgtgtctgtggggtcactgtgagcccactattgcctgtccttgagatgtttgcactgtggtcccttgtcctagtccttatatcctccagtttaggagtcttctctctgtcctctatgatctggcactgtggggcacctgggacagttccactctgggaagtgaaagacacctggggacaaatcttcctggctgagggcctgggaggaggaggggaggttcaaaggaagctcagtaagtggtgggcgaccttcctgcttcctcacagtttctaaactgtgggtgcatgtcatgctgctgcctgccccagctccatcgatgggtgtccctgagtggctgccatgtgccgagctgggatttgtgcagtggtcttcctggcctttggcatgagaggacggaggaatgaggtgatggtgtcccagacagcaccagctgctctgcctaagggccggggataggtgggtcagggctgagctgagcccagagtgcacgcctgtctgcaggcagagtctcctggcttcagtgccagaagaaagctatggactggataggaggagaatgtaaatatttcagctccacattatttatagaaaaatgtacagctgtgtgatgtgaaataaatgtcctgaactccacttgggctcctgtgcactcctctcagcccgggcctgaggaaggctgtccctagctcatctgcatccagcgttggcatactgagagcctgccctggcctcctgcctcctgggcttcctggggtgccagaaaggaacacctacgacactacggctgtaaagtcctgagatgttctgggcactagagaggaggtgacttgggcattcacacctgaacagcttgataaagaagtcacaggaaaacaggggtactgctctgtgaccctgtacacgtgtgttcagatgtgctgtggtgacctgggcctcccaagggccttcggaccagggttctgtaaaaaataaagtggtaacccatgtccaaccctcatgggctatctatgccatgggaaaccctggcacctgtgggcagaatacccagcacactgccatgacacttctgagacctgccggccacaagatttgtaaggaaatgtggtctcttgggaggaagtcagagaaggttgtgatttcctgtgtctgagctgcatggagtcactctgtcccatgagatgtggtcgtgagctgtgggctcttggagtcttgatgtctaatacagtacagggctctactgccctgtcccccgtatagcacccagctggtgttgcctgggttactggcatgaggcccatatgcctgtgcctccaacggctttcacttccacacttcctcacctgagcatgagggtggagggaggctgacatcctttccagtgctgatgtcccacaagtccaggacactgaactggagagtggggtgaccaagcgaatgctgtatgctttcccatggacatgaacaggagacatcaacccccaggaatggcacagatcttttattgctcctacacaatgagccagccaaaagggcctgtccccagtcaccacttctgaagcccacacactttatgctcccagtattaacattatccttagggtcagtttcttcagaacccagcagacctgcctggtgtcactgctggccagtccttccaggatgcacagttgcacacacacatgcagtagcagaaaagggtgctcctccaactcccttccggtctggtacacagcctggcatccatttgtacctgagacataggctgccttgtggatgaactgtggcttcttgtacccccatttcctgatagccaccctaggcccttggccttaggtggtttggaatacgtacctagccatctctggggagccatcctggtcactgaggaactgtaagagggaaggaaaccatgtgattccctagtcttccaaaagccaagatccactgaacatgtcaggaccagtgatctagcagccagaggtactccttgaaccaggacagcagagccaagcccagggtccatggtgctgtcctgctttctcccaagccctggcccagaaggctccttacctcgcacctccaggcggcactcacactgtgcctcgccctgcaagttggtggccctgcagacatagacaccaccatcataggggcagggtttcctgatctccagggtcaatactccctgcttgcagaacatgcggaagcgagcatcttctcccagatccaggccattcttgaaccaggaaatcttgggctgaacatcaagtaaacagaagagaaggagagcattttggtgatggaagaaccggtgagaattcagagagactattctagaaattcccactagagcaccagactcagccagaggctgagaatgaacagagagtcagcaatgggggattaggctctgctcaggggaaagacaatatagactggggagagttaaccataaggagcctaggagaccagcctcctgtcagtctagcccaggaccttgagtccctaccttaggactacctcggacagcacagcagaggatggcattatagcctgcaatgatggagcgatttgccaagggctgggtgaagcttggggcctcagagaagtccagggccttgtatttgggtggctcatatgtgatgcctgttggtgacaagtcttggtaccaagaaggtcaccccaagtgaggctccccctccttccccagattcctcacagtgtgagggagggtacagcacctggtcttggaataaagactggctccttggtggcggcagctttgtcactggaacccaccatgttatggctgaagacccggaagtagtagccattgccaatgataagctctgataccacacagtgagtgcgtcggtagtgttccaaaaccgtgaaccactcctggaggatggtgaaggaagggaggactctctgagggacctctgcctttcttgggtaccccctgtgccactacccctaccatgcaggaaaccagaataatggattgggggtgaatggtaagcacaggggagggtatatgtagacccagggccccaggctcaccatggtcttcttgtcagctttctgtacagtataaccccagatctctgtattgccatcatcttggggtggcttccactccagagccacattgaaaccccaagtctcaacgatccggatatcctggggaggacttggcttgtctgcaggagacagatctgattggcacactgagcgttctgaagtgaccgagcagaagcaggagcctgttagtacctagaaggccctccttctaagtgccctcggcaggagctctgagctgggctcccagacacaaggtcaggagacaagggtgctgaaagggaggttccgggcccacatacccacaatctgcaggatcagcgttgccttgtcctccatgttctcaatgcgaactgtcacctggtaggtgcccgagtgggtgcggcgggcagctcggatgaacaagatcgtgtctgtggggctgttccggatgctcacctcctcacctgccaggggctgcccctctttggtccaggtcacctgaggccggggtttgccctgggggaagatgaccagcccaaccctgagcttgacgctccgaaggggcaggttctgcaccagcaacacgtggatggaggcctcagggtctgcagccttcaggagatccttcaactgtggtttcttcttagggacagggaaggagtcagcctacctggaaagggatgaggaggttcacaggctccccaactttcttctggatggtctggcgcaggtgtctgggcagttggagccgtggtcgttctgtgggtagaaaggaggcagctcactaacagcccttctgtagcccaaccctaaggattccacaggtccattctctcctggggcagggtccagagcactatagctgagaaaaaagttcccatgggccagactctcctaacccacagcaattgcagtatgctcaacactaaaagctgtacagtgagcttcgatatattactatcgtgtgtgtgtgtgtgtgtgtgtgtgtgtgtgtgtgtgtgtgtttcactttttagatttatttatggacttatgtgcatgagcatctagcctgcatgcatatatgtgcgccatgtgtgtgcctgtgtttgtagaggtcagaaaaaggcaatgggtcccctagaactggagttagaaatggttatgagccacacatatgtgtgctgaaaccaagccctgatcctctgcaagaacagcaagtgctcttaacagagagcccatcttcccagcccctgtgttatcttttgagggggagctcatacagccaagcctgctacacatccctcaccctcctccagcactacagggtgggggcacgggggcacgggtgtgtgggggcggggtgccactgtgttcagcttcagttcaagatggtaaggaagttatttggagccacaattcttgaaaaatgtaagcaaaggctctgattctatgcttgtcaatttgttgcttccctctgacctagagaaccaatccttctacctttgttgaggtaaagaacagaatgagccaggtgcaaatggcacattcccagccctcaggagttagaggcagacagtaagtttgaggctagcctggtctacatagttccagaacagccaggactatgtagagagaccctgtctcaaacaacaacaaagactaacagaagaatgggaagtgtatcccagacgaccctaaatggctccgaaaagcctcactgttcagttctgaggacaatacctatgtgctggagtacctgttccagaattagggactgaaccaagagagcccaaggcatagatgaaggccctggcccttcctgccccagcccctgtccctgcccttgcctactaaagcccatgtccccagcctgtcttgattggcaaagggtggccagtggcaggccttttagcagaagggcactcacgcagtatctcctgcactgtcacaggctccttggtgacgatagggcctccaggacctgccacattgtgtgcccgtactcggaacagcagccgtgccccagtgggtaggtccttcaccagcatcgatgtgcgctctgtcagcccctgcagagcaggtgtccactcggagcctgggtgcaggcataaatgagtcaaaatcacactttaccttgctagcacccaagggctggccccaggtggagtactcacatccctcctggcagtactccacgctgtatccgtccaggccaccggcccccacgcgctctgggggccgccacttgagtgagacagtggtgtctgacacatcctccacagccaagtgggttggttcgccagggggccctggacagagacagagaggatgtgagtctgtaccatgcagagaagcagccatgaattaccaggacctcagttgtctgctgatctcataggaaggacttcccttctgctggcttccaaggcacctccaggaatatttatttggtctgcgtttaaagacatgtctctggattgacttacgaaccaagagctgatacaaaacagcgactcactcacaaaagaggaaaggaaccaagagaacacaaggattcggaaagaacttgcttatcagtgtagggaatgctggaagtgtaagagaaagccaaaacccagtgtgaagcgagagaacttcctgccaatgtatgattaggtgagttacacaaaccaaaagttccttaaaaaggggaaggctgggggctaatgctatgactcatctcttagagatttatttctcttgtaggggactccggtcacttcccagcacccacctggtggctcacaagctcttgtaactccaattccaggggatctgatcagccccttgaggcctctgagaggatagcatatgcttttaattccagcactcagaaggcagaggaaagtgagtctgaggccagcctggtctacatacagagttccaggccagccagggctacataaatgaaatcctgtctcaaatccaggagggatgtaactagtgttcactaggatgtccattctaccagcgaggtaaccctgaggtcatttaacttgtccagcctgagcttcttcgtgtgtaatgcaaggcagttttccccctgagagcactagagaccatgtgcaaagccctgtgcagaggccgcctgccggctaagaggctgcaaccatccacccccttggtccctgcattctggggatctggcaggctcaccaataggcatgaagggctgagaggcagggctgggcctggacattcccacggcattgactgcgtagactcgcatctcataggctacaccctcgatcatgcgcctcgcctcgtggctcagctcccgcagcagatcaaagttgagcctcatccacctgtagctctttttcttcttgcgctccaggatgtatcctgagagaggagatgagaagtcgggccggtgccctgtcactcaggtgacagctgcccttggctgtccctgtgcccggggaactcacccaggaccggctgcccgccatcataggcaggcggttcccactgcacagtgcaggagtcctcgcccacgttgctgatcttaggggccgcaggagcatctgggacatcttgatggggaagaggaaccacatcagctatgtccaactcagagtcccacagcatcgctcacccttctcttcaccaccagcaccagagtccaagctatctagacccggattaccttaccatccatcatctaccatccacacttatgcctcccactgttcactttcacctcctgtgtgtcccaggtccaatgtctacatccaccccaccccacccagccctccaggacacagtgattgtcccacaaacagtgacatttctacacacccatcaaaggactcatctcaagcagtcccagtcactaccattgcctgctctggagtgtccccgtgagcattgctgagtagctgagtgaatgggtgagtgagtgaatgggccctctctggtgttgtcctgtgctccccggcctggagctcaggttgtctcaccgatgaccttgactgtgaggttgacctggtcctcgcccacggggttctttactgtgactgtgtagacaccttcatcttccttctctgccccttcgactgtaaagacgctgcggtctttggtggtctccacccggacccggccctcagtctcacacaacagctgaaagggagagagagttggagacaaggcccatcagagcctccacagttgccatcagcccttcactgccagggaagttcagttcagggtctgtgggaagtggggggcaggacacagcctgggtggaaactacctgtaagtgactagttcaaaatttttcaatgtgacaccatagccaagacacaggcacaaggctcagactctagtctagttttgtcatggaacttagcctctgtgtgtgtcagttttcctatctgtcaagtgcgaagaatgtgaaccccacaaagctacagaaagactacaggtattcaaaccctcagaagagccagaagtgacacagaggagaaaggcagaactgggccgtgcctggcagctggccttgctgcagagtgccagggaacccacccacacatagccaaggtcagctctggaggcacacaatctaaaatcagtgaggaagcgttctccccgctggctagctttcagagagccagaggtgctaagcgggttgttggaaatgaaaggctatccaggcttccccagcactggaccctgcatgccaagacaccaacctgccaagcaagtacgggtatactggcacaactgttatagggtaagcactgcttcctgttaggatctgagcctgtcccacagaggggaatgccatgcctggttctgtaaccctgctcaaaagcccatggctgaggaggtcacaggccctggagttgaccctggctctattattttgctaaatggccatgttgtcaaattgccttctaaatgctttccccgtagacctggctggtcgcaagcttagtcaagaagcttctttggggacagcaagcagtcaagacagcgacgtatagaagtcagtgctgagagtaagagatggaatgtccagccctcagccacatatctctaccaagcccactgccctccaccccaaaggctcagggaacattttggcatacggacacaaaggatgtagggactaaaggatggggaggagtgccgagaaatgccgtcttctggccatggtgcagctatagccatcatggctcaacagtggtgcttgtcggcacttgtcaaagccagtcagacattggaggaagtcatggaagtgccctccgggcccccaccctgaactggggcaatgttggctggtcagaactgctagggagggcagtggtaggctgcccgtgctccagtgggtggtccctgctcatgcgtgcattttcagcactattgaacttagtgggttagagaaaaacataaaaacggagcacccgggaggcagaggccagcctggtctacacaggtaattccaggtcagtcaggtagggctgcataatgagactctgtccagaagaagagacagaaaggggttgggaggggggataatgggagtaggagggatacaatggtgggtatgctcatatttcattgtatacatgtattaaattctcaagaataaaaaaaaatgaataaaaagaagaaagtgggaggaatgaggcagggacccagggatcattttaattccaatgacgtcctagcaaagtcaagaacaccaacaccctgtcgaggggcttgtcagttccatccctctgcaccatgaacgagcccaacaggtcttccttagggtagatatggcatggctgcatagggaagagtgaggaccacgagccacaacccaacctcaatcttaccttcttatcaaacacccactcctcatcagcaccagcatcttctggggcatcagggtgtggcccagttgaggccttcttcccctaggaacaaaatggactggaattagggttaggggtgctgagtcagcgttccttcccgccttgctctgtcttctggccagtgcaggacctctgtgcttaagctgagtagagcgtatgccttcaggacgggagcaaagcttcaccctcatttgccccacccacccattgtacaggaaggaaaactgtggggaggggaaactacagtacctgtgttacagtcttctgccagaccacagtgggagcagggtctccagaaatagggacatccaggcgtaacttgttcccagcaacaaccacaatggtgtctggtgtgctgccgggacaatccaagtggatcttgggaggttctgtatggaggagtacagttcagagaaaagggggcccacaaatgtggcagaggaggtacagaggttgcttagtgggtgctgggagctcatgtccctgatggttggtttttgtcaatttcatctgggtataatttatatacaataaaaagtccaagttttagcatagatagttctgcaggattttcttgggtctcagccaagcatggtgatataagcatgaagtcccaggactcaggaggcaaaggccagtgcatctctgtgagctatgatagcctggtctactaagtgagctccaggacagccagaactatatagagggaccttgtctccgaaagcaaatgcaaaagcaaaaaacaaaactaaagacagggtctcactaggttagcccaggctagcctcaaactcttaagtcttgctgcctcagcctcccattaactatgcatggtctacggcaaggcgtgaagaacaaactgcacctcaatgtggtacctatcattactatcattacatgtgtcattaggcctgacagtctgtgtgtgcacacatggcaggtgggtgggggcaacgtggtagagttggtttcttatttccaccctcctgtgacctctggagattgaacccaggtcccaggcttgtgtgacaagtaccatttcctctctaagctttctcacttgcccattctcgagattctgaataaacgtacacacctgtgtgactaccaacccaaacaagatctagaaccttccatcatgcccaggaatttctttgggaagtctataacattctggttaccaagtatcacatctcacccgctatgtctgggggaacaccagatatcctaatagaaaaaagggggcacacaagtcaggaaagcgtgtgttagacaggtataaggaagtcattaccacaagattctttaggggggggcatcaacacatcaacccagggcaccaggtgattggtgttcagtgtgcttccaaacatacttcacgtggttgataatgtagagcgagcccactttggacagcacagagctggagaaagccctatcttgagttagtctgctaaagttaggattctgaaatgcctgattaaatcttagtgtcaaagaaaaagaggcactggcagtggtggctcacacctttgacccctgcacttgggaggcaggcagatctcctagttcaaggccagcctggtctacagagggagttccaggacagccagggatacacagagaaaccctgtctcagggaaggaaagagagagagagacagacagagagacagacagaggcagagagaggcagagagaggcagggatggcaggagggagggagggaggaggaagaagaggaggaggaagaagaggaggaagatgaagaggaggaggaaaggagaggaataggtatgctaacatctcatagtggtgacaacatctctgtgaagtacacactgtcacctttcattttaaacctgaataaatcagggccagaagagatggctcagctggcaaagttagacttgagttttatgcccagaacccacatagaaaagccagatgtgcacgtataaacccagcactggaggggtggaggcaggtgggctctggggcccactcaatggtcacctattctcacccaatgaaggagccccaggtcccagtgagagccccacagactggacagtgtccaggaataacaaggacgaggctgcaccacacaagtgtacttgtgcattaatctacctgcacacacatgaacatgcgcccacacaaagaattcaaggtcagagaaattacaaatgaacctgtggtcctgggtggtgtagctgtgctgtgctggctagatttatgtcaacttgacacaaactctagtcatcggagaggaggagacctctactgagaaagtgcctccataagatcaggctgcgggctagtcagtagagtgtcttcttagtgattgatgcggagaggccggccctttgtggatggtggtcctacattctataagaaacaggctgtgcaagccatgaggagcaagccagcaggcagcacccaccatggcctccgcaacagctcttgcctccaggttcctgccctgtttgaattcctgtcccggtttccttcagtggtggactacaatgtggaagtgtaagccaaatgaacccttttctcctcgacttgctttcttatcacagtgtttccttacagccatagaagccctaactaagacaggggtcttaggtcctattcccagacatttgccatccctgtgtctgaagtaggaaggggctagggttgcgatgggatgtgggggtaggagaaaaggatgaggtggcaacaaatggatcccaagactcaccctgcctaggcacaaagtcaatcttgacctctgaaagagaaggaaagcaaggaacattaagggaagggaaggaccaagacatagggcatcctggacatgccccaccccacacacacacacagacaggcacatacacacacacagacacacacacacacacacacgcatgcacacacacacacacatacacacacagacatacacacacagacatacacacacacacacaatgctagctcacccatgaagtggagcttggcagacaggttgcaggcaaacccttcagggacaaagctgtagtcagcctcatcagcaggtgtgacatcgtcaatggtcagtttgtggaccctggaagggcagtggtaactgagctcacaaccctggcctctccatccacccccaacttcagggagctgtgccttaccctagctccttagtgtcctcatattttaaactgtggctactttatcaaattttgtgttttccagctcccttgtgtgttttctgaggtcagcagtgcagacgtgatgtctgcacaggggcaaccccatgtcagggaccttggagacaggcaaacactgatgtgggtaatctctgaactggagcccagcacggccctcaaaggctctgggatgagccagtgccacctcctcagtggttactgccactgcccagtttggggaatggcagggcacctcacccttagtgtctcccaacctttgcctctgtatctctgccttctgtcttgggtgactcccatgtgattccctcccatgtctgacctctgtaactttctcttcctctctttttctctcttcccttcatgagtcgtctggcctccctccttaacctgactctttttcactcaccggcctatatgggacacctttatgcggttgtcaggcaccagttccttcccattcttcagccacacgccgcgtacattctcatctgaaacctcacacttaaacacagcctggtccttggctcccactgccaggtccgcgatgctttggtatacctccaacttcttctctgggggatgggcagagcctgtgagctcccggggaatgtgagtgtagtgtggtcctctgtggggacatgtgggctcacaggcagtggtatgcaggcctctggttaggtatgtgcagttacgggacacacatgtgtgtcttgatattatagttatacaggaaactcaggttcaggggttgacctcctaacactctctgcagggtatacttcagcatacctatctcacagataggaagctgaggtcatggtatcaaacactatcccaaagcctgctccttccatgaggccaaccaggcttgggctaggggccctcaccttgcacaatgagctcagccagtgactggcctccacttgtgcgtactgcatagtgtcctgcatcctccagggttgcttcattgatgatcaagtggtgtttccgcccatctttcttgaaccggtatttgaaggtctcctcacgtgtcagctcaaccccatccttcagcctggccaggcatgggacagtgtctcctctgggcagatgtccccctctccagccccacctcacacccccatgctcctgccctcaccatttgacttgggccccttcttctgagacctcacactcaaactccacccgctgacccaccatcaccagctggtcttccagggaccgagtgatcagcaccgggggctctgtccagggaggagcgacataagagctggtcccctgtggcctcttttcctcccagggttccctggtccctggcccacctttgacaaagagctccgtgctgcacttctcgccccccaccacacactggtaggctgcgtcgtcagccagtgagcactggctgatggtcagggtgcgcttggcaccgacggactcgaagatgtacctgggcagggcacagcagcatatcaggagggcacggatgcccctcttgggcttggtgactttcaccaaccccatggctgcttcaagctgtcggggaggagacttacttgctatgaaacagaaggggccattgccatgttccacacagaggagagagagagagagagagagagagagagagagagagagagagagagaaattgataaatgacctggaattaaattccaaaggtgggggaagatacaaacagggactgggagccagagtcagagagatctcacagaaatatacaaggcagtacggctcccccttaaccccaggacccaggacccaggacccagaaccctgccccacctctgccacacctgccactcatctggatctcctgtccattcttaagccacttgacttcggcgtccggatcagccagttccacagtaagccgaatcttgtggcccttgtttacctggtaggcaggctccagcttcttctgaaaggctgaaccccacaactcagcccagctacccccaatgcccacacccttcccccaagcacaaccacagcggctatggcaggtgcctgcatcttcctccccctgctgcgtatcccagacacaccctccgggtttccataatgaccctgtcttctcatctctgtctgtcttgctttgtcttccttgaggttctttctaactgctcagcccttgggcagggctagaggcatccaccatgatagaagcttgttgtgagagctaggaatgtagcacacgtcctctcttcctcttggtaatgccaagctcaccgtagcatccctgctggcttcccctcccttagcgccatacctcccagttctccagatcattgtcatgggtctcaggttgtagagatagaacagggcttaggcgggtgacccaaggccacaaacccaccaatgtgtggtatggaggagtccagggccacctcacaacaatgcctccccttgcagccatgttggtaaaaacagctctgcagctgaagggctgtgcagaagccctcaaatactcaggctgggcctgaagacagctgtggggtttgagctagttcctggagtctctgtgtctctgtctcctcacttgtaaaagtgaactgatactatgccttgtttggcagtgctgttgggagaattaactaggcaattacgtaaaacatgcagtgccttgctgaactttttcttttttaaattgttttttttgctaccactgcttgtcttgcccccagaggctccctctgcccatactacaggtttttgtgtgttgttctccagcccggctcctttgttgggagctagctggtgccttgtgctttcccttgtgtggaaagggctaacctgtgctcttcttttcatcctgcttcatgcccttgagcctcttcagcatgcctcgaaggtctgtgactccgtgctggaaggcgatgcgctcatattctgacggcggtgcctgtctcaggatctcccacacgtcttcttcagcaggtgcctccagctttgagtccctgtgtcccacagcccactgggaagctcaaggcagtccctccttgtcccttccaggacacaggatgaggtcttcccttcccttcctctcccgtcccctcccctcccttcccctcccctctcctcccctctcagtctaagagtcttgggtgttgaactagggaggactcttggcttagggtgttgaggagggcccaacctcaactcacctccggaaactgctgctccagatgaaggaaaaagacaggcatacattagaagtctggacacctccctgccaagactgggatccttcccagtgccttcacttgttccctcttccccatacagtgcccctacttttcagggcaggagtctcattcttcataaaaccagacagtgtcagagccattccaagccttaagaatgtcaccctggtgtgtgtgagttcccccaaaccccagcagaaagggtacatgtccccaaagctaaaatcctcttgtaagacccagagcctcccagccccacgccttactctctgggcaggagcagcagcagtagccatgaagggaagatggagagagagggaaagaaaggacagaaaaagaaatgaagtcagggctaggtccttactgctactgctttgggaaccttcttcctacttcttagggccttcagaatctgtggaaatggtctatggtagattcaccaggaggttttgaggggcacaagacataactcttgtccacactgggactaaggatggttattaagacaactcttgtccacactgggacaagattcccccttgataaggaaactggctcagagaagtgcctcattctgttcagggacacacagcttggaaatctcaatgccatgtcttaatctctgccctagaagatgtgacccaaggactcacctcttcttcagcagggaactaaagtccagagtcccagcatcttcatggctgtcactgaagagagagaccccatgaggcttctctgaagagctagcaggggcttaggcgatggagtggtataggaggaaggggtgcagtcaggtggggctcccacccatctctgtgatgggatagatggaggacaggaagggtacctggttctccgacctgctcccgccaggctcctgtggaagttagtttctcagtgacctggcagcttgcccttgccccccacagacttcagcttggaccccccacatgcgtctatctaaaatgtcaagggccctcagccctcacactggtctccccgccccccacccccattcccaaggaaagagagccactcacgtgcgtcggaaagctgatctgaggtccaggtctccagaaccaatggcctctgtgtgcaaagagaatgtagtggtgggggtgacctcagggagtgggagcacaagactccatcttctcagcttctcccagggttcatatttagagagatgaggcagtttctcatctcagtctccacagtgggctgcctcccactcacctcccagttcacattcaaactgtgtgaggcagggacacagaaacagcatcccacccttgacttgctcccacgattctcctgaaagcatgcatttcgttcacacctcgggtgaccggcactggcttctggccacagctagtcaccctctctagttgggagatagagacaagcccaagggaccaggacccatgaagaccacaagaccagacgagaccccaggactccctcaccatggacagtgaggttgaagttacagctgtcaaatttgtccttggtagacacctcacagcggtagcccccagcagaagtggtctgagcatctgtgatgtgcaactcaaacaagtagacctgtgagcaggaggatgaaggaaggttgggacaggagaggccctgcgtccctaaagagaaggggtgtggcaaagcctgccaagctcacttctcagggctgacacatacagagcgcttctataatttaaagaaagcatccacctttcaagacccatgatggggtgggcagtggtggtgcacatctttaatcccagcacttctgggaggcagaggcaggcggatttctgtgttcaaggccagcctggtctatagagtgagttccaggacagccagggttacacagggaaaccctgtctcaaaaaacaaaataaaaaaaaaataaaataaaagacccatacgggctcttgcctgcacatgaccatgatagaagtccaagcagatggcaggtggctccacttgggagctgttttgtgcagtgtgcagctggtatggctgaacatttcagctctgccctgcttcccagtctcccagcctccctatgcctgtactccctggctccccatgcccctgaccaggcgtcccaccttgctggctctgtcatagctgtcatgcagctgcaggtgctggcccactttgctgctcaggtccacccacttgcccttgaaccacttgaccacaggcggtttcaggaggctggccccagccactcgggctgagaagacaatgctgccgcctgcaagagaaaggtgacttctccgaccttggtcctctggggcttcctttcccctaaccccgagtatgagcacaaagttcccacttacccacggtcacctcaccatcctgtggtcgcatcagaaagaggccaatagggtcatcaggggctccctgatgctctgcagctgagccatcctgggttaccgagactgaccctgaaaagaaggcttttgaggtctgtcctgggatattccccatccattggcctgtccctcgttgtccagccctctttaccttcaggacttgagacactttcttccaactcagtggctggagcagggacttctttgggggctcctggagcaacttcagattctgccttctctggaggggctgaggtggggtcatggaacagtttctaattagagccctccactcggatatcagacctatgtcccacctaagatacattccacttgtacagcagtatcctaggctcttttagccactggcctcactccaagaagaggagccaacttgcttctcgtcctccagcactcacgatccacctgtcccatgtccagatttctgctctgagcagcattgtggtccatctgttgtccctttccgagctttggccttgacccagcaccaccaccaccaagctcttaggatttccccactaacacatacagctagccaagtccttatctgggtgaccaggctctgggtctgctatgggagtggacccttcctagaacaccgctctcgggttcccacctccacagtgcagaaagagctgcagccacaactaatgcttagagagatcttggagcagaagagcagaacgggcatttctggcttacagcattgccagtgcccagagtccatgccccggactctgagttcagggccccggggcgaggtcagcaagctcttacctggctctgtgaccttgaggtcaaacttgacctttgaggagcctgcaatgaccgcgtaggaaccctggtcatcagggctcgcatcccgcactgtcagtgtgtgtcgcttgccctctgctgccaaaccatacttgtcattggcggtgatgtcgctgccatcccgctgccaccgcaccttcacgcctgaccgctccgtctcagcctcgaacacggcagcactgccagcggtcacctccgctgaccttggcttcttgttgaaggctgacactgaagagccagatggaacttgcaggaagtaggctccctggtaccccacccccgacacccttcttcaagaagactgtgtagtaagcacaccccaagctacttgtttaatgctccaacagttctatggggtgggtgcagccatatttatgtctcaggtcaggtgaggttaatgacagatgaaagagtccaggctgttgtccccaccaccatataagacgtccctaccttcctgcttgggaacaccagtggtaggcccagcctcccttcccattgtggaacccttggcaagggccccagcactctgcctacttgggatatagctaaatttgtcctctgagggcttcagactaagaatgagcaattgagataaggcagcaggggcctgggggctggggactggatccctgaccccatgacctctgcaagggtgttggcctggtccaggtctttggctacagtctttgtccttggcttgcctgttctattccagagaagagaggcactgtccccccacatctggagccaggtctcatgtgaataccctagggtttccagctcatgtggcagacactcagagctggaaagggtcgctaccccctcatctcagtacccttagaaactgagctcaggggctcagctccactggagcctaaattgagctccttgaattgaggaccctggctgaagaagaaaatacaggtccagacagaatgggctgttgaccctggattcttcctgacttagtgaagtcatctctcagtggccctgacaccgagtttatccttgatctcattagagggatggggaatgaagcagagaattagacaaagcccaaagaggaccatcctgtcccttcctggaacccacaggcctcatcctacaccggtacctaaccctgcccacaagccgtgtgcaccactgacccaaacccttacgtggagctacctggtttcttccctggctccggcatcttgagaacagtcacaccaggcatcaagcaggccacccaaggagggactgaacagtgtcctgtgttctcactatttatgaggactgccccctccccagccctgcttatcagcctcctgctagccacctgctaaatatagacaaattccatccagctgaggtatcttcatggagaagatagagccacttggtcctctggcttctcctccccacccccagcaggactggatagcttccgcccttccactcctccatggatctcaggggtagccccacctttgtctgtgtatccagccaccagaaaattacactgtcgaggtgctcttggcccgtgacacccacagctaaagatcgagggcacaggtgctgggtgggagagagggtatccagggctagctgctgttgttcttttggtcagcagagctttggcacacattactgcaccacaaggggcaggggctggccttggaccacggaatcctgagtgggcttggcggagggttaggcagggagggaatctgctgggagttagtcccccccaccccaccccacacacacaagggacaaactaggcgagcctgcaggcgagggcatgggagtggatctctaaatgtcctcccaagtagaggacaggagcagagctagctcttgctaaagtcacaaggactaaccaaagatgaatgcagagcattccaaatccccccagctgccaccccactgccactgttcttgttctgtgaccctcagttggatcaggctcatcaggtgtaacaggggaaaaagtaaatgacggggatctccattaaggaattctagactagaatagatagcttataccagaaggagggagttcacatataagcattttccagtcaatagaaacctagccgtgatttccacccaattttagttactttagagtcatatcacctgctcctaagtcatgtgcatgagtgtgtgtgttgaagctataactagcaatccaggttggtctcaaaccaatgacaatcctcctgcctcaacctaagtgctgctattctgggtatgcactgctatgcttatctccgagtcgtccagagaactggtctggggctggaagagaaggctcagtgattaaaagcacttgttcttgccgagaactcaggttccggtccaagcacccacacaatacctcacaaccatctgtaactccagctccaggggacccaacacccctcttctagactgcaggcaccaggcacacacatggcacacatacatatacgcaggcaaaaaatttgtttaaatgtttaaggaactggtgtttgagagccagaagaagaagaagaagaagaagaaggagaagaagaagaaggaggaggaagaggaggaggaggaggaggaagaggaggaagaggagaaggaggaggaggaggaggaggaggagaaggagaaggagaaggagaaggagaagaggaagaggaagaagaagaagaagaagaagaagaagaagaagaagaagaagaagaagaagaagaagaagaagaagaagaagaagaagaagaagaagaagaagaagaaccaagttggtaaaggtgtctgttgcctggtgacctgagttccacctctggggtccactggtggcaggagagaactgactcctgcaagttgtcactgacctccacatttatgctgtggcaagtgtgcacactcttacacacacacacacacacacacacacacacacacacacacatacacgataaatgaattaaaaaatacttttaaaaaactgctgctctcttactgagctgtcgtcagctcacatgccatagccttctcttgagactcggcagtctgactaggggacatcagcgtgggctatgagggacccacatagccaggaggtgtgcaggggtctttccccctatagtgtgacaccctagggtttgtgtttcctgaggtgtgcagacattaggagatgtcctcactccctgtctgccaccacctgcctacattctgtctacgtcacctaaatgaagcaagatgtttatagatgtcccttgtctgtggcccctgggagtgctttgaagggaaggctgtgcttgtggagtctccattaagaatgctttgtggccaggctagagagacggtacagccggtaaagttgacagatgctatatgatcagaaacacctgtgcttattgctgcggccaccaccaccaccactcttggatggtgtctcactcagaagattgctaaggacttttcagtatgatccctgagccctgataacaagccaagacttatctcactagaaacaagcgctgtgtgtccatggtccccgtgtccctagggcccagctttggaaacatgctctctagacaaataagagatcgtgcacacgggacgccccctggacccggcacacgcaaactcttgaatgagacacttctctgggagaatagctgtcaataattttacttgtctttagtgactaatgagggggtggggaggaagagctttttaaaaagcattcaatatacaaaaaggtgccagcgccagactcccaaggaagcaccgtggccactaagccaggctgaccctcggttgaggtccgaggcccaggcggcccttggagcgggctagagtcctggtgggaggcaaagcgggtggggcgggccaggccgggcatgggagggcgaggccgggcccccagtcctgcctcggccctgggaatgtcctccctgtgtccgggccgggcgacgggttaatgctatggccggcggggtccaggagcctggcggtctctgcgggcgatcagtggggcgggaggcgccgctcggccaggcccccacggcccagcacctcgccgctgaactggtaggtgagcttcttcttgactttcttcacctcgcctgtcttgccgtagttgcgcagcgcgcgcgccatcttctggtaggtcatcttcttgcggttgcccttctggatgccccagcggtgcgccagcgcctccttgtgcttggacgagaactggaaggtacctttgtccttgtccacccaccagatgctgtccttcatgtcgccgctgcgcagcaggtccagcaggaactggtacaggcgaatctttttcttgctgcctgtgagagatgggcaaccaagtggtgtgtggacaggatgcaaggattttatggggaccctcccaccagctcctcccagccatggtaggtgcaagcacacacgtgcccactcccactcaagtgcacacccctccatatatacaaatcctcatagatatgtcacgtgtatccatacatatacccatatctgctctcacatatctacatgcctatccaaaggccttcacacgcaggcactcacacacaagacctacacactcacaggccttcctcccacactcataggccttcacacattcacaggtactcacacacatgacctcacacactcacagtcctgtatacacccaggccttcacagatatacatacagtctcccattcacactcctacacaatactgatgcacacacagactctcacgcactttgaaatgatgcctgttcattcacaatacagacagacttagagacctgtacaggtagagaagcatccacaaacacgcatgtgtgcatacacatgcacatgcacatgcacacacacacacacacacacacacacctctgaaacatggctgctgggccagttgaccttggctaggaatatgcaaggttcataaatgtaaatgcagctacagtcactggatcggtgatgctggaccctacctgtctccccgtgcagaagacctggcccaggctccaagccatcagcttctccatcagacacctccaggggagggctctgcctctcaccctcctcctcatctgagctctgctggtgggctggggacaaggtttgataagggaagcacatccggggcatgtaggaaacctgcaaagggaagaacaggcgtgaagtccataagggatagcccagggctgcaggaggggtcagcagggtcgaggactaagaagggaaaactaggggccagtctggaccaagactcaggggtgcaggtcttggtacaatgagttgttagttaccgagcctaccacccttccaactgtggcctctggtttagggaagataaaggtatatctttacgcatgcaaaggggccatgtgccctggcagtgcactaggaatagtgggaaggttctggggagcaatgagctggggcttaatacggaagtgagtgagccttaatgagggggtgatgagccaatgaatgggcagtgaaggtcagtgagggatggcagagatcaatggtcggggttaggaccctggagcagagaatagtcagcaatgaggatcaatagggagccaggaggtctgcagaggcgagcatttagtgactcagagtctgggtacatggagagacagaaaatggggactataggcagtggaaccctgagggtcacaagcaggaacagggtgagagaagatggccgaggactagtggatcatatgggatctatccatcgtgtgtgagactaaggtgtgggtccctaaggtcaggcgggaggtcagcacagctgttggggtaccagctgccgttggctctgtagatcaggaagccacgttgagtaagagcctatgtcagcttcctgtgaaggttccatgcctcaccacaggcctggaggtctggggtggggaggggaggtggacagaggacagccagcagcacacacctggtgactgaggccggtgtggggtggcaccatgggagtatcgaggacgtgcatctgttccagctccatgtggcgatagagctgctgtagctgcgggggctgcacactctgcagctctgtgaagtggttctcagggaagttctcaaactcgttgttgtggacatggtgtgcggagaaatcccagtagtgatctatgggaaagccaggggggagggtgtgagccaaggtgcccgggcagggagatgatagagtaacataacataaccattcaggctgggcagaaagtacgttaatcatctcctggaacattcacggactccaccgctgctttatagaaaggactctgaggcgcagagaggtttcctaacatgccaatgttaaagtccctaatgacagtcacacctggagctgtcaccagcagccactggtgtggcttcctgactgggcccagagacacagacttctgagccctcgtctgagtcctggctttgccatctgttggctgtgtgacctcagcacaggcctaagcctctctggcctcagtggacccacctacaaaataggtagaattgctattgggcgaatacacataagctcccactctagacccacagcaggccttggaaaacggcttcccctgcctctgtgaccttccacagactcctggctatctaaagtcacaagcatgggtccttgtcacatgatcagggtgtgattgcaaagtcacggggctgacatttctcacataccagagtttgtccaaacctacaatgctgcttctgtaaaactacaggcaggggcagccacgcccaggttcctgggaagctgaaggaagagatttccccagaaagcccctatgggtgtctggtgtctgtggaagggtggacccaactctaggaagcagccacatagctctgggtagatctgtgatgtggcttctccctacaccttttccaggaacaaaagttgctgcctatctgagggacttttgggcacagtttggtgtatggtatggagctagcgagatggcttagctggtaaaagctctcaccactgagcctgacgacctgagctcagcgtgcgatcacacatgaacatacacacgcatatatcaataaatgaatttaggaagaagaacgaaaaaaatgaaaatttggtgttaaaagagggatttcctcatgtgacctgaaggatgtggaaggtgatgaaccaggggaagtcctccagtaaccacgtgcatttgtatgtgtgtatgtgtatgtgtgtgcatgtgtatatgtgtgcatgtgtatgtgtgtgcatgtgtatatgtgtgcatgtgtattgtgtacatgtgtgcatgtgtatgtgtgcatgtgtatgtgtgtacatgtgtgcatgtgtatgtgtgtacatgtgtgcatgtgtatgtgtgtgcatgtgtatgtctgtgcatgtgtatatgtgtgcatgtgttcatgtgtatatgtgtacatgtgtacatgtgtgcatgtgtatatgtgtgcatgtgttcatgtgtatatgtgtacatgtgtacatgtgtgcatgtgtatatgtgtgcatgtgtatgtgtgtgcatatgttcatgtgtgtacacgcaggcacgcatgcctatgatcttgctttttctttgtctctcacacaaacacatcctttaagaaatgacatatgctttccagctgtgtaccaataccacaggactctttttgttaattgcttactgggaggggccaaatatgctgtgcatgcgtagaggaacagaatctattccctccttctagaacctcaggggtcccaagatcaacctcaggcaggcacagtaagcaccgtcatctactgagcccttcactcatccgtattcgtgtgtttttgaggcagggtctcacgcaggctgaatttgaacatgtgatcatctcgacttagacttctaagtttgggcttacatgcctggctctagctttctcatcctgctgagcagtgctgggctgtatgagcctaaacaccttttttttccactgagcctctgattccccagttaaaaggttgttaccaaggctctgtccatgtgccacatcttctgagtctggcagcgggacccatctctaggaaactgcggcacagaagaaaaagtgcatgctttggagcttcagacaaacccggatgcatttactgctgcatgctcctgggcctcagtttcctcatctgagtgagtagtttatacccattttatccatacactgtgaaggggtaaatgagctatctgatgcccagagggtgcttaggatagaacatggcacaaaaggagaacatttattcccgtacactcatactggccctaaagagcctgcgctagcacatctgtaacttcaacaaccagaaaatagaggaaagaacatgaaggcaagctaggcatgatggcacatgcctttaatcccagcactccagaagcagaagcagagaggtctctgaattcaagaccaccctggtctacacagtgagttccaggccatgtagataaaatgagaccctaactcaaaacaaaggtctgaggcctgaatctggagaggtagcctggtggttaagaccactttttcttacagaaaaccagagttaagttcccagggagagacaggggacagtaatggcggtgaccaagaggaagctgggtctgcaatccgaatcacagagccccattctgtcctttcgggtttagtgacctttgatgtcggttcctggggcttgattttggctgttgagttcacatggcaactcccaacctcctgtaactctagctccaaaagattcaacagcgccctcttctggactcctaaagcatagacatgtgtgtatatacacaaacacacacaaaatcacagacacacccacagagagagatagggagagagacagagagagacaaataaatatttaaaaatatgtttttaaaagtttgaggccatcttggcctagaaagcaagatcttatttcaaaataaaacagaaagcccagggccgtaacactgtagtgaaggcacttgtctctcatgcgcaaggtcctgcatttgagccccaggaccaaaatcaaaggtcactaaacccgaaaggacagaatggggctctgcagtttggattgcagacccagcttcctcttgatcaccaccatttactttcccctgtctctcccgcagcccgttccagctccagggacaggaactgtgagtgtttgctgtcctctaggtgagagatgagaggcatttgacctaactctttctggccccaccccacctctgctagctctgaagcctaaagcagcatttcccaaagttgttgtggatgacagacagcagtgagaagcactgtggggaaatgtgggcctctgctccctgctcttggtctcctgaaggcgatggccaggatgccctgcgctacaacagtttcaaaacctcacctttccccttgatttgggtgcccaggcaattatgtaaccaacagtctggtaggcaaactcactccaaatttggggcccccagagagagtgtccaggaagtgagtcagaaagcaaaggtcagcctttctggccccctgaaccttatttcttgtgttttactctataacccaggctggcccagaacctatgagacacgcagtctgagatagccttgagttcatggtgattctcctgcttcattacagatttaaaccaacatgcttggctctctctctctcccctttcttttcttttctcttttgttctgtcattgtctttccttccttcccccctccctccctccctcctttcttcctccttcttccttccttttgagacagagtctcgggtagcacaggctagccccaaactttctgtgtagcagaggatgatcttgaagtcttgaccctcctgtgtctacgtcccaagtgccaggattacaggcatgtgccaccgtacctggcttggacaattctttgtgaatgcagtgtttaacttggctttgtccctttattgtgccaccttgccctctgcctagcggccacccacatactctcagcccttcagagaatgttatgttatttgcatatctgtgccagctccaatgttcactttctacattctgtgggcagaaggtctcagtgctcaatgggattcctgatgctaacttactgcctaccaggcatcacgctaattaacccacttcatctctctgctctgctctgctctgctctgtggaggtagaggctcctcttacacctacacataattgaaaacaataaaatcaaatctttacaaaagaacatcaaatccagcctgagctatatagggagttcaaggctagcctgagctatatagggagttcaaggctagcctgagctatacaaagccctgtctcaacaggactcttcctgttgacagtaaagaaagctctaattcaagacattaaagtcctgcctttaacccagcacttgaaaggcagagccaggaggatctctgcaagtttgagaccagattggtctacgtagcaagctccaggacagccaggaatacacagagagaccttatctcaaaataaaaaaaaaaaaaagtcttttgtctacaatggccactggtagtgtagtgtcatgatccgagctcacttctgtgtaattccagggacttacacagtattttaactcttactacaccatgccagctctcgggatctaagctattactgtgaagtaatgtaagctttaagtaagacctatggtgacacagagagcctctcctgatgctcctgtccatctgtctgtacacacccatccatccattagctacccatcacccaacctctgtctatgcagccagagccacccagccaaatgagagcccatttgtgacaaggtcttgatatagagcccaggctggcttcatgtgctgggatcacaagtggaaaccactatagctgtcagtccatttgtcctgatcctttcttgttcccacccattcatccatgttcttacttagtcctaagaagaacaagaaccaagcgatattaagattacaaaacaccaagccttaagagtcactcagctgagcttatctcctcaggacagaaaccccaggctgaaggccagggctgtcctcagaaaagcaaagtatgctcaaaccagaagaccagggactgcagagatggctcatagctcaagagcactgactctctcccaaaggacctgagttcggctcccagagccgtgttgggcagctcagaacaactggagctccagggggacctaacacctctgccctctgaggacactagcacacacgtgtgcacacacacacaagcaggcacatacacctacacacaattgaaaacaataaaaacaaatctttacaaaagaacattaacatcagcctgagctttatagggagttcaaggctagcctgagctatatagggagttcaaggctgtccccacagaacagaacaaaataaagcaaataaaaacaaacgaacaaacaaaaccagaggagataaggaatcaagaaaggaggggccaacaaaacaaccctcctttttgggaaattactaccactgcagaacagcctatcctaaaagcctgcaggcatgttgcaaaagcctggtgagcaggaggtatttgtttctctcaacggcgtaccctgattattggcattttaattcttacccggacacagagttgaatgtggctgtatcagcatcctattcaccccacagcatctatccctgtgccaggcacagaaaagacccttggtgtcttattagacgaagaggtgaatgtgagggggatggaaggtttgataggtggaggaaggacagttgctaaggaggctaggtggttggttacataggtgtgtgagtcaactccagccctaggactaagattcctaaaagccaacagtgcataaagagatgactagtgtactaaaaccatgaagacttatgcattgctgtggggcttgtaaagccgttgctgccatgatgaaaggtagcttatcagctcctccagggaaaagaggggctgaggagatagcccagggattaggattgggcactgctcttccaaaggacctggagttcacttcccagcagcacccacattaggcagctcataacttcataactgccagtaactccagctcccgggtactcaagtattcaatgctctgacctccatggacacctgcattcacacacacacacacacacacacacacacacacacacacacacacgaaagaagtaccacaggacccagcaagtcctgcacaggagtataagtcagagtcctaaggagactgtaagcccaggtcatggtcatagcagctttattcaccacagctagaaactagaaacagcagaagtatccatcaacaagtgagccattaagcaaaatgtagtggtctgggtcatgggcatagctgccttccaaaatgaactcatacagtgaatattattcaacatataaacagagaaattctggcatgtgctgcaacatgctgaatcttgagacgttctgctatgtgaaatgagtctgttataacaggaaaattgcagtatgacttcacttatcagaggcacctaatgtaataatattcacagagatagaaagtagagccaggcgatattgatgcacgcctttgatctcagcacttgggaggcagaggtaggcagatttctgagtccgaggcccagcctggtctacagagcaagttctaggacagccagggagagttctaagacagctagggctgcacagagagaaatcctgtctcaaaacaagacaaaacaaaaaagagggagggaggaaaagaggaagggaggggaggaagggagggaaggagggagggagggagggagggaaggaaggaaggaaggaaggaaggaaggaaggaaggaaggaaggaaggaaggaaggagattgcaggttgccaggggctggcaggttggaggatgggcagttgtataatgggcacagggtttcagcttggcaagatgagttctcaagacaatggtgatggctactccacaatgtgcatgcgtttttgttttgttctgttttagacaagacccagtaacccaggctagccctgaactcactcagtgacctttagatcctgatcctggatctttggtgtccccagtgctgtaattacaggcacaaaccaccatgctcacatgcgtagcctttgtgagtgtattttactaccctttatacccttggatggtgtagaggtggcctggcagtagcacttgccaccaagcatgacaatgtgagtttgactcctc

SEQ ID NO: 85 - DNA, 151838 bp, Homo sapiens
attctcctgcctcagcctccccagtagctgggactacaggcacctaccaccatgcctggctaattttttgtatttttagtagagacagggttttaccgtgttacccaggatggtctcgatctcctgaccttgtgatccacccgcctcggcctcccaaagtgctaggattacaggcatgagccaccacgcccgccctgcctagaagttacattttaatcaaggctgctttctttccttccccaggaggagctcctggttgacagtttctttgttcataatttagtcttggaaggaggataaggtcagagagaaaggaggggaggtaggcagttctttatgtctgtattttctcaggctgttcttatttctccaagagtgggactccataccatagaggacatgttagtgacaccctcattcatttattcattttcagtgcatggtgatacactgcagcttgtctgtgcctaattaagtggttctatagattacactaactggattccaataaactaaatttgctgaccttttctgtgaaggccagaggctgtcagtagtatcaaaacatgcctgcattcatgtgcatacacacacaatgtgacctttaaaataaaggtgttatttaacaatgattgagagaaagacaaactcctttcctaaaaagacacgttaagcagagggcattaggaaaacagatctttaaaaatatttcatagttatgtggttttgttgtaaagacaagtatgtatttataaaaactcatagctgtggccaggcgcggtggcttatgcctgcaatcccagcactttgggaggccaaggcaggtggatcacgaggtcaggagatcgagaccatcctgactaacatgtgaaaccctgtctccactaaaaacacaaaaaaatttagctgggcgtggtggcgggtgcctgtagtcccagctactctggaggctgaggcaggagaatggcctgaacccggcaggtggagcttgcagtggccaagatcgtgccattgcattctggcctgggcgacacagtgagactccgtctcaaaacaaaacaaaacaaacaaacaaacaaaaaaaacgaaaacaaaaacaaaaaacctcatagctgcatacttttaaaacttggaaatcaaaatttctaacccatttaggattaaaaggaaatgtttcagtggattttgtactcatttgttagtttagaagaacaactggttcccatcagggaaaatggaaagacgctaacagcattacaagagcagcagcacctttgcataattagtgaacaggatggaacattaatatcataggccaggcacggggggctcacgcctgtaatcccagcactttgggaggccgaggcaagtggatcacctgaggtcaggagttcaagacaagcctggccaacatcatgaaaccccatgtctactaaaaatacaaaaaaattagcggggcgtgttggtgggcatctatataatcccagctacttgggaggctgaggcaggagaattgcttgaaccccaggggcagaggttgcagtgagctgagatcgtgccactgtactccagcctgggtgacagagagagactctgtctcaaaaaaaaaaaaaaagaaaaacattacatagtaagcagaactaatgacagcttcatccatttgtgtgtatgtactcttttagagcaaatgtataagttatgatatccatttaaaaaggaacaaaataagccgggtgtggtggctcacatctgtaatcccagcactttgggaggccaaggtgggtggatcacttgaaccccaggtgcagaggttgcagtgagttgagattgcaccactgcactccagcctgggcgacagagtgagactccatctcaaaaacaaacaaacaaagaaacaaaaaaactgaactttagaagcagaactttgaaaagaacaataaatcaatatgctgaaatcgaagggccgggcgcagtggctcatgcttgtaatcccagcagtttgggaggccgaggcgggtggatcacttgaggtcaggagtttgagaccagcctaaccaacatagtgaaacgctgtctctactaaaaatacaaaaatttagccaggcaagatggtaggtgcctataatcccagctactcaggaggctgaggcaggagaatcacttgaacctgggaggcagaggttgcagtgagctgagatcacgccactgcacttcagcctgggtgacagagcgagactccatctcaaaagaaaaaaaaaaattagtttggcattgtggtgggtgcctgtaacccagctatgagggaggctgaggcacgagaatcacttgaacccaagaggtggaggttgcagtgagctgagatcgcgccactgcactccagcctgggcgacagagcaagattctgtctcaaaaaaaaaaaaatgctgaaaaatgtaaaacaagtccaaccacaatgctcttactaaaaatattattataaacaatattaacattttatgtttataatatattaaatactattaatcatgttgcaaatattactaatgctggaagttttagtgagaacaaaaagtaatatattaaacagaataaaattaaaaatagttaaaaatatatagattctgtaagtcctatactgggcagaggtgcttacattcttttactgatatgaatatgccttcaaaaaattttttttaattttaaaaaaggaatataccatcaaaaaagtttggaggccactggcttaaactactacagtgttgtaatacagaacaacactgtgaactgccaatagggaactacagtgcatggcatttctcaaactcgtctggccatgagtcatttggaggcatgaaagttccaagaaaccctctttggaccatgctgtatggtggataagagcatgaacctggagtcagacaaagctgacttcagctaactaccagactcatcttatactagctaggcgacctgagcattttactaaatctttttgaacttttttccttatctgtgaaatggggatagtgatatctacctcatatggttgtatggactttaaaaacaatattgtatataagtgcatagtataatgcctgatgtcttgtaagcaccccttaaaaggaagtttctatcattctatcatctctgatagttatttagagacctgatgtatctttcataactacacttcttcagagcagaaattgaatcttctcttatgagtcccatggaacacttagctgcaataggtatgtgagaatgaagaaataaatgatattaatagaagcagagttctctgaaagactgagagactaactataccaccaaagacagaaatgtttctttctcagctgtttataacttaccattttaatggctacaccagaacattcacataggatgaatcctcatagtaattttccttacctaggcagttgataacaattagtctgttactaattgtttccagctgctcccctttgattaatcaatcaaaacaaatttataatggttctcctgtggtttgatactgctaggagcctagcatgcctgtgatgaagacaagatgactacgtgtgcttaaaagtccggggagtaggctaggcacgatggcttacgcctgtaatcccagcactttgggaggctgaggcgggcagatcacctgaggtcaggagttctagaccagcctggccaacatggtgaaaccctgtctctactacaaatacaaaaattagccaggcatggtggtggctgcatgtaatctcagctactcgagaggttgaggcaggaggactgcttgaacctggaaggtggaggttgcagtgagccaagatcatgccactgtaccgcagcctgggcaacacagcaaaactctgtctcaaaaaaaaaaaaaaaaaaaagtcaggggaataaggactggagtggccaaagcaagttcagcatcagaggattaggtgggctttaaaggagagacagtgactcaggcctataatcccagcactttgggaggctgaggtagatggatcacttgaggccaggagtttgagaccagcctggccaatatgacaaaactgcaactctactaaaaatacacggattaggtgggcatggtggtacatgcctgtaatcccagctacttgggaggctgaggcatgggaatcacctgaacccaggaggcagaggctgcagtaagctgagatcatgccactccagcttgggcaacagagcaagactctgccttgaaaaaaaaaaagagaaacaaaagaaaagttatttcagacccaggtaaaaagaacaaaggcatgatagtgtccatttctggctctgatttccttttgtgccccttcctctggaatgttcctcttacaaagttttgttatagtagtactaatgatactactaccacttatgacaattacataattagttacttaataaataatccaaataagtcctagacatcacttggcccagttttggagtagtataacattcagaggaagaacctagcaaccaaaaatgaagttaattcctatgtatattttcctaattacaacccacagtaacacttctgaaaatcacctctctttctatgcctttaggtctccattcagcagctgcttaaagcccctctttctttacttttctcagtatctgtgggggtcagttagggttacattcagctgcatggaactgaaacctggatgcacatacttcacaaaacagaggttttatttttctttctgtaaccagaactctggaggtaggcagttcagggcaggtacagctgcttgaagaagtatcagggacccaagcttcctttagcttccatcttttgcaaaatagctgcttcacttctaggctttgatctacgttctcagcaggaaaaagaataaagagtaaatgacaaaagatctgtgctgttgctggcaggttgggcatttggtggcatcagcagctggatcagccttgttgagtgggagccctgctactctgtatttgcatccttttctctgatgttcccccagggtatgccactttttaaaaatgtcgactgttggctgggtgagaggggtgcagttttagaagcttccccaggtatggccttggccttccccactatgacagctcttgctccacaggccaaggaactatcatagaggttctgccaaccaccaagtatgcccatgctaagtacccattcagagaggacaaggactcatcactatatacccttgctgggaatccggtcttcctcagtcattaggttctggaaattggctcaggttgagaaacagggcaagggattatgactattggggcagctcctctcagctgcctccttatctgtccttgtgttttaaaaactacatcttgaggcacacagtatcctactaactaccttcatagcttcctgtgggtcaggcttccttggatgccattctatcttgccacttctaacaatgccacttaatcttctgctagttatgcactgctacctggtctctagcaggcccattgctatcagggaccctagctcctgaaacatcttccactataagccctggtctacagagaaaagtgactattggacttctcagtgatgcttgtgtccctctcaatagcacattccttattgcttgtgataaacagcagaacacagctgacaggataggatgtaaataatatgtcattcccacttctgagtcttttgctcccttcttccattgtttgccaggacagctctggcctttctattttgcttagtgtggaccactgctttctccaagctttctagagccatcctagcaatctgttagctttatctcctggagtccttgccagaatgtaaatactgtagtacaggaatgtgcttatatcaatatgctctgctttatttagcattattttctcctccctccccaattcagcacactggggaccctttacccagttctcccaccttctgcagatgtgtatataagttgggtaggttttttttcagaggagtctctctctgtcacccaggctggagtgcagtggcccgatctcggctcactgcaaggcccgcctcctgggttcacaccattctcctgcctcagcctccagagtagctgggactacaggcgcccgccatcacacccggctaattttttatttttttatttttagtagagacagggtttcaccatgttagccaggatggtctcgatctcctgaccttgtgatccacccacctcggtctcccaaagtgttgggattataggcatgagccaccgcacccggcctaagttgggtaggttttttagctccttcaggatacagtgcctctcctcccttagcaggtctagcattttcttaatggggttatgtgtgacttgaccttagttattggtctgttagacaggtggaaaagtgcaggtagatctgaggagagcgtgtgttgccttgcaaggcagataatacttcttgatcttcaagcaagggggtggggtgctagtttcttgagggaggagtgggacacttctacaaacccagagcactcaaggtgatgtggggttttaaggttctcaagtgcattgacccagatgccccatctaaagtgtcagggtcccacttctcaactatgcccctgaccttggtatagtacactcactagggctgaaaacctttttggcgttcttctgctcttataattaaatcctgagcttcatcttccgctttttctgccttatgcagctcctacttcctttatatgctgctaaggaggcacactggctttcttccttagcctttaattggtgattcatcatcctcaacctttcattgtctttctccaaagcacaggtttactccatcagtagccatccaatttcattgttcttaaactactatttgccctatattgttaaaatgcctgatagattgcacctacgagtgcattgttccactgaggttacatcccacccattccagctcttcaccattgctgaaagttttaacatcgtactgctatggcacgccggggcctgtcagggcttcccctgtggaccttactgctaactggccaggggaatgattcagctccactggatcaaaccacattcatgggacgtttttgtccgtttgttttgagacagggtcttgctctgtcacccagcctggagtgcagtggtacaaacatggctcactgcagcctctacctcctgggatcaagcaatcctccagcttcagcctcctgagtagctgagatgacagctgctcaccgccatgtccagcaaatttttttattttttgtaaagatacgattttaccatgttggtcaggctggtcttgaactcttgggctcacgcgatccacctgcctcagctcctaaagtgctgggattacaggtctgagccatggtgtccggccacactcatggatttaattgcccttggaatcaacaccgtgcaggaaaggagtaggattgagcagaaaaagttgaactaaatgtagttacagcaaatgcctcagcttccggatcctaagggagctctggtgccaggagagcccttcagagcagccccaccctgagccctgcatctgccagtcagtgcagacggacctggtgagaggcagctttcttcagctgaaggcaactcctggaaagggatttagctgataggtgttgacaagtaatgcgcccagcagctgaggaaatgagcaccttagtcctgaagagtggtgtgctctttggtatgctgggatggttggttgtgccagtggagatgggggtggtgggcagaatgaagggaatactactgtaaaagctttttattttttatttatatttattcatttatttattttttaagacaaggtctaactctgatgcccgggctggagtgctggaatgcaatgacaccatcacagctcactgtagccttgacctcctgggctcaagcgatcctcccacttcagcttcccaagtaactggaaccacaggcacatgccaccatgcccagctaattaaaaaaaaaaattttgtagagatgaggtttcgccatgttgcccagggtggtctggaactcctgggctcaagtgatccacccaccttggcctcccaaagtgctgggatgacaggcatgagccacggctcccagcttggaacaaaactcttcgaagaaaaaattggcagagcttgttgcctgaccaaaaaacagaggctgaatgagagagatgcatttaaaacaatacgaaacactaagggttccctgaatactgttggacagtgcaaaatgggggaagttaggatacaaatctaattctgttctactgtaaggctcatgccttttcactagactagtgctggtcaaactggtgttccatgggctacattcagacagcagacgtattttgtttggctacacagcatttaaaaaatgtaaattggctgccactatgtaaaaattggaagagtttatatgtaagttcagatctctagcttctcttgagtaactagaagatctagcaacactgggtcaacattcctgcatggcagtaactggagttgagtgacagatactctttaaatggagagagtatctcttatctggataaatggaggtgggtatatgcttcttaattcaccacagtctctatgcattaccttctttggcattttttttttgagatggagtcactctgtcgcccaggctggattgcagcagcacaatctaggctcactgaaacctcagcctcctgggttcaagcaattctcctgcctcagtcaccctagtaagtagttgggattacagccatgtgccaccatgcccggcttttttttttttttttttttttttttagtagagatggagtttcaccacattggccaggctggtctcaaactcctgacctcaggtgatctgcctgcctcggcctcccaaagtgctgggattacaggcatgagccacagcgtccagtcttctttggcacttttgtttagcattcctgccatatgtactatgtatggtctaacaaagtacataatacataacaggcatttgggtacttttatttttatttattttttagagacagggtcttgctctgttgcctaggctggagtgcagtggcgagatcacagctcactgcagccttgacctctctagctcaagtgatcctcccacctcagcctcccaagttgctgggaccacagatgcacaccactatgcctaactaatttaaataattttttttggtagaagctgggatctcactatgttgcccaggctggtctgaacttctaggctcaagcaatcctcccacctcggcctctaaaagtgctggcattataggtgtgagccaccacgaccggcccatttggacacttaatactggttcagcagaactgaatgaatttaattggagaggaagttggggtgaagtctaggcctctgactataatgagaggtttggcactgaggggaggcaacagaacagggagtacaaattaggatgaattaatgacatgctggcaggagcttgagtaaaggaagaagagcagagggccagggcctgaagtttgggtgtcttaccacagagctaaagaagagtgggcaatggtagactaaactagagaagaagaggagagaaaggcacagaggaacttcagcaacggaatgccagggaaggcaagggagctgagggtttgggcagttgcatccagtgtagggaagaagatcagggagatagacaggcaaaaagccatggcaacaaggaagtagttagggactttcagaggaagtatgagaaaaggagaggaaggtcataggtctgaagtttagcagtgcagtagggggcactggaatactatcttgggggtatgagtgagtgctttttcaggggtcctacttgggagaaacatagatagacattcatttaatattcatccatttctttccagcatagtcatcattctgacatcatctaaaagaaattagtatctgcattgcatccttaaagaagaagggacaaaagacatgtccaaactgtctgtctgttctagtggaataaaacattaatttaatatgtattttggacaaccaccaacctagagattggaaacttttctcaaggatatatctctctgtatgtgggctactggctttgtggcttttctgtaggaaaattaaaattctagttttgttctcccttatcacccagtgtctgtgtggcttaactggctgattagcgcgtgcttggaatgtgtaaattcattttaacattggcctaggggcctgtgtggtagctcacccctgtcatcccagcactttgggaggccaaggcagggggatcacttgaggccaggagttccagaccagcctgggcaacatagcaagactgtgtctctaccaaaaaaaaaaaaaaaaaaaaaattagccaaagcagggtgacactcacctgtagtcccagctattcaggagcttgaggtgggaggatcacttcggcccaggagtctgaggctggagtgagctatgattgagccactgcactccactgcacagagtcagaccttgtctctgaaaaacaaaaacatttgcctaggtaaaatgtatcgaggaagacaaattttaaaattactcattccaggccaggtgcggtggctcacacctgtaatcccagtactttgggaggctgaggtgggcggatcatgaggtcaggagttcaagaccagcctggccaatatggtgaaacaccgtctctactaaaaatacaaaaattagccggctgtggtggcgcatgcctgtagtcccagctactcgggaggctgaggcagaagaatcacttcaaccgggaggcggaggttgcagtgagccgagatcgcgcctctgcactccagcctgggtgacagggtgagactctgtcttaaaaaaaaaaaaaaaaaattagtcattccaaagtccaatgtcagacatagattatccgttgttttggatgtaatcctcttcctggaaaactggcacaacccaattacacatgaaatcctttcaactctggtattggaggtatagggaaggactttgttttaggagacccatagtctacctctattgttctaggagttaaaccacgttggtttacatcctgactttgccacctgtcaactcagaccttgggcaaatcaaaggtctgagggaggagtgcaggctcccagcgttcccacgggggtggggacgtgacgtattcatcagttcatgaagttaatgatatgtattgaaaaggtttgttcaaggatttaaataagacgatgaatatattgaattaataatgaatgcaaggccttaaaggtgttttgagggtggtgaaacttgaatctctcatcaactgtgcaatagttatattaacttggatggctatgagttttgcagaggaaagctgggcttaaatcccaatgctagacctggtggctagaccttgattgccaccgggtctagcattgggatttaagcgacctctaaaaaaaaaaaatcacggaatctctctttggccttccttttttgtttctcagcagtctaccaagctacgaagaacctgaaaatcggaggtcgtgtaccttattttttctgagagcttaagctgagagcacagcctccccaggagattagcggcagagatccgcgcgctgggagaaaggctagccccagggcgccctaacttccaactccgggagcaatccaaacccggaggccggcgggggaggggacagctgtagggggcggtggggatgggagtggatgctcccgggtcagctctggcactcgccagctgagcccagcgccagtctaggtgagccccacggcggtgagggacgctcgccagacggcccagaggagttagatgacgtcacctccaggaggactcgctttttcattaatgaaaccggccggcgcgggcgcatgcgcggcaggccgccttccctctcgcttccccctcccctttcccagccgcgctctcaatctctagctcgctcgcgctccctctccccgggccgtggaaaggatcccacttccggtggggtgtcatggcggcgtctcggactgtgatggctgtggggagacggcgctagtggggagagcgaccaagaggccccctcccctccccgggtccccttcccctatccccctccccccagcctccttgccaacgccccctttccctctccccctcccgctcggcgctgaccccccatccccacccccgtgggaacactgggagcctgcactccacagaccctctccttgcctcttccctcacctcagcctccgctccccgccctcttcccggcccagggcgccggcccacccttccctccgccgccccccggccgcggggaggacatggccgcgcacaggccggtggaatgggtccaggccgtggtcagccgcttcgacgagcaggtaaccggcccgtggcgggcgggaggtgggagcggagtgggggtggggacagagtaggtgaggggaggtaggagcggccgcctcccccgcggctgcctcaggctctggaggaaaggaagggaagggaagagaagggaaggggggataagtgggggtggccaaggcgggaggtgaggggtaggaggggacagctgggagcttgggcaccctttccctcctaagtcggggggtggggccttgtccctgaccagcctccgaccctccatcccctttatcccagcccttccgcttggaaatggggatgagtgacctgggggcgcctttaggggcgcgccatctggatttaataattacccccttacttttgtttttgagcagaggtgggtaacgtttaggggttctctcttcctcttccctccgtgaccctcctaactggggacgagcgaaccctaaggcctgtcttatataccctcaataggagaacgataacattccgcccctcccccagtttcttcagcttcctctcctggagggggaagagcagaagaaagcaaggaaggcacaggttttcttactttctgctccatcgtctcatcctgccccgagagcttcaagtgcacactcactgcacatctttgtgatgccctacaacgtcgtcccccatatcctgatgacacagactgccttttttttttattgccgtttgcagtggaaaccgtggttctgaaatatcttccccttccttgataattgcagtctcttccccccccccttttttttttgccagcggtctgaggatgtgatgcattctcgagtgagaatgttggggagtaaaggggagaagggtgaaaggaaagtgagaaactgcttcagagccaccgacaacagagcaaagccagctgggatgtggtcctggagcggatcattctgctagtgtttgtggttgtttttgactctctcctggttgacaagagaactttcattgagaatatttgggatgaaaaaaaagttttgtagcttgaggaggtgactttttatcgcctgagtttcacacaataaatcctggggctgattagaataaatgcacacatagccttttgtcagtggaaattggtttaactttgtgttgctgtaggtagttggggatggtttaagggatgctttctgcagctgtgggtgcagtgggcttcctgtgatgggggaattgtttaagattgagtcaacctattttgtttactggatataatggtaaaacattatgggagctgaaggggtgggggaagagctcttctgttatttgatgcataaacatttctttacgggactcagcgtttcagacctacctggaaaatatcttggaatagacagaggaagttgagaagaagctatgtagataaaatagagttatgaagctgtcagagacttgaaggaattgttttatccattcgtatgcttccagacccaaaggcatctaaactaaactactaatccatctgaagtataatgttactgcatataaaagattacattattgatagagcgttagatttaaaacttggtagaaaagactctgtaattttaagaaaggatttaaaaggcacatagaagacttccaaagctgaaccttgtggacagcagaatctggatgtaggaaattgaaggatccacgccgcaattctccttaaattttaaaaattaaaaatttttttcagttttttcttaattttatttttttacttcttacctgttcatctctaggcttatttgccatattggaaaaagatacttaagagaggaatgattttgggctgggcgcggtggctcacgcctgtaatcccagcactttgggatgccaaggcaggtggatcacctgaggtcaggagtttgagaccagcctgaccaacatggagaaacctcgtctctactaaaaatacaaaaattagctgggcatggtggcgggcgcctgtaatcccagctactcgggaggctgaggcaggagaattgcttgaatccgggaggtggaggttgcagtgagctgagatcacaccactgcactctagcctgggcgacagagcgagactcttgtctccaaaaaaaaaaaaaaaaaaaaaggaggaatgattttgattatatacccagtaaagcaagaaagtgtttctccttctgtccctagctttaaaagaccttaaggcttcgttgtttgttatgcatattgtggaatcaaactcaccaccatctgttaaaaattaaggacattagtttttaaaacagcatttttctgcattccttatgttgtaattaagagaaagatatataggagagattattcctcactttttttttttgagacaaggtcttgctctgtcgcccacgctggagtgcagtagcttgatgtcggttcattgcaacccctgcttcccacattcacgtgattctcctgcttcagtctcccaagtagctgggattacaggtgtgcaccatcgtgcctggctaatttttgtatttttagtagagacgggggtttcaccatgttggtcaggctggtcttgaactcctgacctcaggtgatctgccccccaccccctgctcggcctcccgaagtgctgggattacaggcatgagccactgtgcctggcctattcctcacatttttctcttagaaagttaaagtctctgaccttgagatacaaaaatgtaagggttttcagtgtttaacataaggtacttatatatattatatatagtatatatataaaataaattaatatattaatttattatataagtgataaatgtttaattcaaattagagttcaccttacggttgaaaatgtcttttagtcagaaaactgaggcatgggaaggttaagtgacatagatctaataagagcttcagtatgaaaagtagtgaatgcttgaccatcagggagatacttttcctaagtatcccataaaatttgttctaatccattaaatatatttagaagactttattttattttttttatttttgagacggagtttcatgattcttgcctaggctggagtgcaatgatgcgaccttggcttactgcaacctctgcctcctgggttcaagtgattctcctgcctcagcctcccaagtggctgggattacaggcgcctgccaccactcctggataacatttgttatttttagtagagtgctgagattacaggcgtgagccatcgcttacatttttattgaggggagaaaaagccctgcatgtactgagagatagttgtataagaatcttaagagttggccgggcgcggcggctcacgcctgtgatcccagcactttgggaggccgaggcgggccgatcatgaggtcaggagatcgagaccatcctggctaacacagtgaaaccccatctctactaaaaatacaaaaattagctgggtgtggtggtgggtgcctgtagtcccagctacttgggaggctgaggcaggagaatggcctgaacctgggaggtggagcttgcggtgagccgagattgcgccactgcactccagcctgggtgacagagcgagactccatctcagaaaaaaaaaaaaaaaaaaagaatcttaatagtttcaactgtttataaaacttttgaattttggattatattatctgtactttgctttactgggcccagggggagttaagctttccttcttattacagctaagagtttgcctgttggaccacttaacgcccccagggagcatgtgcatgtctaaagatggcaactctgtttatgattgctgttttggttggatttctaatattcggtgtgattaaagcagaaatgcatttctagccactgctgattacagacatattgcactctgatgggtatcgcttagcaacttagtgcagtagactcagttaaaagaagtggatgtgtgccatattgacattttgagctcacattcttgtgggtaatataaaattccttaacctgataatattgcagctaaacctagtatttagggtctaagttgaatgagtattaccaattttagaagtaatcacctccttggttagggaaatgacagttgcacaggtggacagccagaaagctgaatgttatcagttaaatcttacatctctccttaacctgccttcgtggtgccaaatagcaagtttctaattgaaactgacaaattgtaggtgtgtagcttttttttttttttttttgagacagagtttcgctcttgtctcctaggctggagtgcaatggggagatctcagcatactgcaacctctgcctcctgggttcaagccattctcctgcctcagcctcccaagtagctgggattacaggcgcccaccaccacgcctgcctaatttttgtatttttagtagagacgggggtttcaccgtgttggccaggctggtctccaactcctggcttcaggtgatccacctgccttggcctcccaaagtgctgggattacaggcgtgagccaccacgcccggccatgtgtagcttttaattgtggttcattaacccagtttctaagcaaattagaaccttctgtgtatctcccctagttctgtatgccccactggttcctgtagagctttatttctgaagggaagtatgggaaaactatggatatttgaactaaaaaaaaaaaaaaaagaattaaaaagaactccatcccaaaatgatttgttgtaaatatgttcatttaaagcaattatattttccatatctgatcaagcaaaagtagtacataaaagccaaaaaacccaatttaaagaatatgttatggaataaactctgattttagaggttgtagtagcatatttgttgttctcatacattgagtgttcatctgaatgtacgttgaatatgcggtgagtgattcacagtataaaatgattggcaagtatcttcgaaattacaaaccacatactgattagacaaatagatttgcaaaactgaagctttttggatttaaaaaatatctcctagcctcattcttcaagcctggtgtgtaatttttataaggccttatagtagttgaaaatgagtactcttttatggtgacgaattctttatggtgagtgagaaataatgcttattcttccaattttagtatatgtggtgctgaatcgagcacaataatgcttattctttgcttcggaattttttaatttattattattgttattttaaatttttatttatttatttattttgagatggagtctcactctgtcgcccaggctggagtgcagtggcgcgatctcagctcactgcaacgtctgcctcctgggttcaagcgattctcctgcctcagcctcccaagtagctgggactacaggcgcatgccaccacgcccagctaattttgtatttttagtagagacagggtttcaccgtgctagccaggatgggtctgaatttcttgatgtcgtgatccacctgccttgacttcccaaagtgctgggattacaggcatgagccaccgtgcccggcccggaattcatcctttagaaagatttcttccagctgttcctcagttctctgcactcccttacactttccaccttatctgtctgggaactaatttagtctttatgttggctgctttcttttcacttttcaggctaagatttcctttctcttggaaatcagacgtttacttggtcctgcagctctctctctgtggaccagtcttttttgttgttgttgttgccagatactcaccgcctctactgtttatccacccatttcctttataactctgaaaagtagctcctgcctctgcttgattgctgttttcttgaaagtgattacttctggcaaaacatagtggtcattgcttagttgtaatgccactgtgatgttccactccccccggaaaccaatctcttccagttcccaagacacaatacttttctactgaattggagttccttagcgggggtcttagttttgttctgctattcagtgcctttgtccctatcctagccattagctttcctatagatccttgatttcctcatctgttgaaaaagaaatggctagaaaatcttttagattctttcaagtttaaatattcgatgattttaatattctaacagcatgtctctgtgacccagcagtctattgggagctgaccccacttgatttaccaaactctttcccattatgcctctgcatgcacctatgttccaggcaggtcacctcagtctcttctgtgtgtatcatgcttcttcccacttcttggcctttatttctgccagtctctgcctgaatgctttaattcctcctttgtgcttttctaattcctgtccatccttcaatgttcagctcagatttcattttttttttttccccatgaggttgtttcagactaaactctgctatctcacttcttggtatccttgttacctggagttttacagaaccacacagtaagttttcttcctttaggaggattgtttgaacacagcttggctttgttttctttttttcttgtctttttatcaaatggagtgcatactttctgaaaagcaaagaacgctatttgaattctcttctagtcaccccagtgcccagcacagtcttaaacacacagaacattgatggaatgtttttcatatgattcctggttgaagggtagactggctaaataaaaaaagtggtacttttggctttgttttactgaattttacttccatgtttgcaatagcctaggtctgataagtgatattttaactaggaatgagtaagaaaattagcataaagaaggaatttatacatatttatatttcctcccatagagcaaacatgttttttgaatcaggtttcagatctgatcaactacttttgtaattttggatttgtcacttactgttaggatattttgcaatggtgtgatagaatatgaatgtgaagcactttgaaaagtctaaaatttttctaatataagatttatatgttttctttatagcttattattattattattttttgtgtgtgtgacagagtcttgctctgtcactcaggctagagtgcagtgtagcttattactgattattgtgttttcattaaataagggagagtaggccaggtgcggtagctgatgcttgtaatcccagcactttgggaggcccatgtgggaggactgcttgaggccttgaattcaagaccaggctgtgcaacatagtgagatgctgtctctaaaaaaaattagttgggtgtggtggcatgtgcctgtagtcgcagctactcaggaggctgaggcaggaagatcacttgaacccaggagttcaagcatacagtgagccatgattgtgccactgtactccagcttcggtgacagagtgagaccctgtcttccaaaaaaaaaaaaagagagcgtgactagtctctggatattcctttgtatgtaccttggccaatatataccttactttagtatccattgacaagttctcttttttcttcttcttcatttttttttttttgagatagagtctcgctctattgcccaggttggagtgcagtggcacgatctcagctcactgcaagctccaccttctgggttcaagcgattctcctgcctcagcctcccaagtagctggcattacaggcacgtactaccacacctggctaatttttgtatttttaaaagagacaagggttcgccatgttagctggtctcaaactactgacctcaaacaatccacctgcctcagcctcccaaagtgctgggattataggcataagctgtggtgctggtctaatattgttacattttattttaaatgttcctgttttttgccctactctttttatttgactttttaaccattaggaaattagattcttttctcaaatctgctttattattattattattttgagacaagttctcgctttctcgcctaggctggagtgtagtggtacaattttggctcactgcaacctctgcctcccgggttcaagtgattctcctgcctcagcctcccaagtagctgggattacaggcgtgtgccaccacacccagctaatttttttgtatttttagtagaggcagggttttaccatgttggctaggctggtcttgaactcctgacctgaggtgatccgcccgcttcagcctcccaaagtgctgggatcacaggcttgaaccaccgtgcctggccctatttttgtatttttactatagacggggttttgccatgttggccaggctggcctcaaacacctgcctcagcctcccaaagtgctgggattacagatgcaagccactgcacctggccttaagtctgcttttaaaaaatgttttggctgggtgcggtggctcatgcctataattcaagctttttggggggctgaggtgggaggatcacttgggcctcagagtttgagaccagcctgggcaacagagtgagaccccatctctacaaaaagtaaaaaaaacaaataaaaaaaaaatcagccagtgtgcattggttgaaagtaaagaaaagaaaaaaaacagacaaattagccaagtgtggtagtatatgctacttgggaggctgagtcaggattgcttgagcccaggaaattaaggctgcagtgaggcatgattgcaccactgcactctggcctgggtgagaccctgtctcaaaaaaaatttttttttttaatatggagaaagtatttttgtttttcgttttttatttgggtaccggccactgcacccaaccaaacattttgtccttaaacaaaagtttaagtcatataatacagtagtaagaatgccttattttttacatctttgttctttaaattactcagattgctatggggcatttttgttgtagctttcaaatttggtattctggggttctatgtagactctatattgttgcattctaacgacatacttttaaggataagcagcgtattaattaaaaatgtgttttccacttgtgttccttaggtctgcgtatattttggaggtgtgtgtgtatataagtcaagggacaggaggtatcggaaggctctaaaggaagtttaaggaggagaatattctatagaagtggaaggggagatttgtggtcagcttaaactgttaaaaggcttgggatcaataccgaagcagaatatgagcatcttaatctgtttctttgcaaaggattgacttgtatttataaaagcattggcttgtttcatctgacatcttttaaagtaccccattttcttgggggcgggaagggagagatgagaccatttgttttgatcttgaaggacagaaaagtggttttacgttgtagtgactgtgaattaagtttaaggtctcagcaagttgtaaatttctgtatcatactatgtggtagagccttcagtaaacagagtactctcaggtgtttaatgctataggatataaactataactgctgtttatagtaccctcgctaaattctcttaaaggcaatccatttgaccacttcaaatgttatatgcctgtgatatatagttatattctctgcatataactggtttttaaaaattgtttattattcatttattttagaagtgaggtctctctttgttcctcaggctggagtgcagtggtgtgatcatagctcaccatagcctcgaactcctgggctcaagtgatctcccacctcccgaatatctaggactatgggcgtgcgccaccatacctggctattattttaatttttttcgtagagacagtgtcttgttatgttgcccaggctggtctcaaactcttggcctcaagcagtcttcccacctggcttcccaaagcactggaattacaggcgtgaactactgtgctgggtcctgagtggcttttgagccactgactatatcatcaaaaagcttctgttgagacaaagcctcaagctagtgtggagttcatcctactaaaatgaagaattggcattatgttctaaaactttacatattcttaccataaatggtactaattactttgcagtagcagtaacttgaggtgcaaacttccagattgcatattttctttaaaccatagtctggcactcacggtttggcttagggttgccactgcagtccacaagctgtcgcctgcccttattcatattttatagctttgaatgtcttattccattgaacttcagataactttttttttttgagatggagttttgctcttgttgcccaggctggagtgcaatgttgtgatctgggctcactgcaacctctgcctcccaggctcaagcgattttcctgcctcagcctcccaagtagctgggatgacaggcatgcgccaccatgcccagctgattttgtttttttagtagagacagggtttcaccatgttggtcaggctagtcttgaactcccaacctcaggtgatcctcctgccttggcctcccaaagtgctgggattacaggcatgagccaccgtgcccggctgagaacttaactttttctgatgaaattctttcctgctccacctaactcccgtgtcccacccccaccagcagagtggtatatctagcacaagaggcatgaaattaatttagtaaatagcaggactactagaaacttttaaggattatttaacttatttttaatcaaaattttatactcagataatgaccttttgggaagttatgtctcttaatgatctcaagtggtgacacttttctgttgacacggtttctcttgggtagttctcatagtagtttgggcatgagaaaacaacttttaccactttagacttgtgagggcagcctactatgtagtaaaagaaaaagcttttgattgtgcaacttgcagtgtggtcttggggaagtctcttaacctctctgaacatcagttttctatattttcatgtgtaaaatgggcatgatacttacccttctcacatcatgggcttgtttaatgacttaggtatgaatcttatatgaaaggaagctgtaaacagtcataaaaatgtattagcatctgtgcagtattttttttctatccattctttataatttggtggttattatttctactctacatgagaaaaaagttacagaggcaaaacatgttcacaatcatatgattatataattaactgagttaaactagagtatggatgtcttgacccttagatcactatctttccaataaatagttttaaaagtctaaattttactaacaggtagtacaaatatgcaaaatgagggatgtatgattgcttcttcactcgaagatggtatattatgtttttccttttaagttcatgttagagtatctgaatcttttcaagttggttagatgttagaaatagatgtaaattttaagcattatatatccttgatttcattatgtattattctcctggtcactttatcaaaacttcttcagctgttagaagttgtaacattgtttcccttttatttagttatataatacacttattgtacattcttaagtgggagaatagaatttgtgagaataccaacagaaatacacatacagctataaatatgagattatgattctttcatgttggcattgcacagtctatttttgtaaagttggtttttatattctaagaacattttacttagagtttgattacatttgaggcaaacttttcaactttggtagtatttgaatgaagattcctggatgtggtttttttaattgttacatctactttttcagtttttctttttccctataacaaccctcaaatccttcatcttgtcttttggagtatttttttctatcctcctgtctttatcggtgccttctattcctgtcccaccttgggtctgggaaaatgtgcctttatgctccatgtgagtcttcttccttttgggtaatgagtgcggagggaaaaaaagcacagtatttctttccctgttatgtttcagtttttggcctctgataagtgaatctggagtagggaatgacagtgatagtaggttttgttttagtcatatattggcgacaaagatcaacgaagacctgaagctcttgttcctctcatgacacaaactacccacaggtgcatgccaccatgccgggctagtttttaaattttttgtagagacgaggtttcgccatcttgcccaggctggtcttgaattcctggactcaagcgatcttcccacttcggcctcccagagtgctgggattacaggcatgagccaccgtgcccaaccgagattctgtctctgaaaaaataaataaataaataaaataaatacataaaaataaaataaaaacatttgaagacatcttaagtacaccctagattcccacccccaccaaaaaatttcattcattcttcaaccatttctcaaagaacatgttttcaagacacctcactatcctaattgttttccttttggtgcaatggtggtcagtactcaggcataccattttttatctttcctcccaatgttgtatgagggcattatatgaaacttaaatggatttaaaaatgctgagcttgctggacatggtggctcacacctgtaatcccagcactttgggaggtgggggagggaggattgcttgagcccaggagtttgagatcaacctggacaacacagctagtatgcacaaaaaaataaaaaaagtagctaggcgtggtggtgcatgcctgtagtcccaggtacttgggaggctgaggtgggaggatggcttgagcccaggaggttgagcctgcagtgagtggtgtttgtgctactacactccagcatgggtgacagagtgaaactctgttaaaaaaaaaaaaatgctgagcttcaggtacagtatatttttggtatgcatttgattaccagtacagtatacctatcaaaaatgttaattcacatgttttaaaataaaaagtttccaacataaaagtagagagttttttttttttttttttttttttttttctgagacagagtctcactctattacccaggctggagtgtaatggcacgatcttggctcactgcaacctctgcctcccaggctcaagccatcctctctctcagcctcccgagtagctgagatcacaggtgcacaccaccacgcctggctaaattttttgtattttttgtagagacagggttttgtcatattgtgcaggttggtctcgaactcctgacctcaagtgatccacccgcctcagtctcccaaagtgctgggattacaggcgtgagccactgcacatggcctagagagatgttataaattaatccttttgtatccattactcaatttctccctagtcttatttcatccgtattcctacccatttcctgctcactacctctttattattttaaagcaatcctatatatcatttcagcgtgatttattcttatactgactttaagagctgtgtaatataaaaacaactcaattaggaatcagaagacttgactttaagtcttaactttctactggaatgagttaacaggggggcaagccaagctgtatgagccctgaattcctaatatgttgaagagagtaacacgtggtggaggggacataatgttacctgcactttttcacagggatctatgagaatcaaagataggaggtaatatgcatgaaagtattttgtctactctaaactcaaaagcaaaagtgctttacaaaggtaagattttattagtaaatgctgcttccctgtataagtgctaacaactcatgcctaatcagtcttagaattatctggatgctgacattaaattaagtccatagtattaaaatcaccctttcacctttacccactcttggattttgacaattgcaacaacattttctcattcccaatctggctcctgttacttttcatgacttctgcaagttcactgaccacatttctcttaccatatttctaaattttcatctgtatcttggattcatgtacacttgagctcaggtaaaacagggaggtgggctcttcatgctttatgtatctaagttctgatgactctcagcaatgctttttttcagatttgaagatcattttcttttttttctttttcttttttttttcttttttgagtcactgtcacccaggctggagtgcaatggcgcgatctcggctcactgcaacctccgcctcccaggttcaaacgattcttgtgtctcagtctttcgagtagctgggattacaggcacctgtcacgatgcccggctaatttttgtatttttaatagagaaggtgtttcactgtgttgtccaggctggtctcgagctcgtaacctcaggtgatcctcttgcctcggcctcccaaagtgctaggattacaggcgtgagccaccatgccttggcctcattttattttcaactagaacaattagaaataaaaattgagttgaatagttctgcttttaatgacctattggtgctggaatcatggactctagtgattcttgttcttctttcctcatctttttgatcctaatgtattttaaaagcctttacatatttttgtctttaacatttctagttattctgaacttttgttttaactcttctgttaatttatccattgtgtgtagtgtgtattttttcttaaatgtccttataaatactgagctgtgggggaggggagaggaggagcaactggtgcaggcacgctagtttctttagaaatgtcagctctgccagatcacttaagacttgttaaaagtacagatttcctggctctactaaacatcgtgtgatttctagaggtcccaggtcatttttgacataaagctgggtttgtaaaccactgctgtgtgatatacagggagaatttaatttctgggtggtatttaataggtcacagtacagtcatatatatcactgcaacaagttagaaaaccacaattggatgaactttaaaaatcaatactaaaaaaaatattggagagctatggatgtaatgaggactagatgaattagaattccagaaatagaagagatctttataggtgagcagaggattgctgacatttgctgattctggacacacactgaaggaaaaggaaactagagaggaagtgcattttactaaaactgcaacatatccctggcccagttcaattcctgattggactgaggtgatcagcctatcttatcccttttgcctaatagaggaaatagacagctcttactgaggagatatattctggggtttctatggttctttcgtttataatactatcatactattaactattctagagatgtgaaagggtggaaaaattcaagagaaaaataaaacttatagaagcagactcagaaaattgaagttcatcagacaaagacttattttaaaataactataatatacttaagaaaataaaggaaaatacggagaaaatggatgaaaattttcatagagaattggaatccacagaaagaaaccaaatgaacattctaggaatcaaaaacacaacgttggttgcttaaggtctttatttgtagtttaattagaaactttggcgcaggactctaggacactccacctccccctcattctttactgttcttaaaaaacaaaaacaaaaacaaaaaaaacccaggtaaatttaatgtatactatttaagttccacgagagcagggcctatgtctgttttgttcgttgttgtactcccagggcttagtatagtgcatgccacattaaaaaacaaaacaagacagaacaaaatcttccttaacaccaccatcacaaacccccccattaataattaattgacattaatctgaaattaattattcattgtaccggttcagtagcagactatacacagcagaaggcaagactagagagcttgtggacagatcaatagaaaatatctagataaaagcacagaaaaaaaaaaaagaatggaaagagtagaacagagcctctgagacatgtggaacattagtaaaaagtctaatgtgtaattggagacccaaaagtagagagattagcatggaagcaaatacttgaagaggtaatgataaaatattttcccaaactgatgaaaggcatcaacctataaattcaagtagtttagcaaaccccaagcaggatgaacacaaagaaaactacacttagcatatcttaatggaactgttgaaaaccagaaacaaagagaaacgcttaaaagcagccagaagaggggaaaaaaggcactgtgttcaaaggaacgatataatacaactgatggctgactttttaatacaactgtggaaactgggaaataacagacattttttaaatgttggcaaaaaaacctgccaagctagaattctaccttcagcagaaatatccttcagacaagaaggcgaaataaagacatttttagacaatcaaaagctgacaatttatgaccagcagacctgcactgtaagattactgaaggaagttttttaggcagaatgaaaatatctcaaatggaagtacaaaactgtaggaaataatgaagagcacacactcgggtaagtgtgtgagtaaatagacaagacctattgcctcttgtttttattgctgtttttaggaactttattgctttttgctattctagaataatagaatttccacagcttttaggttaaggtaaaattgccatccaatcaataaactgcacatatttaaaatgtataatttgatgagttttgatatacatataagcctttgataccatcaccacaatcaagatgaagaacatatattaccggcaaaagttttctccagcctccttataatccattcctacctccatcccatccctagggaacccttgagctgtttttgtctcagtggatatatcataagttgtttatccattcacttgttgatggataactgaagacaactcaaattttcaccattacaaataaagttgtcttgaagattcatatacatgactgtcatttctcttgagtaaatacaaaggagtagaaatgggtggatcatatggtggatgtatataataatgttacaggatattatattctgtaatattttaagaggccaccaagctgttcctaaagtgattgtatcatcttacagcagtatatgagagtttcagttgttccacatctttgccaacacttatttaaccttttcttttaaattacagccatcctagtgggtatgaagtggtgtctcattgtggttttgatttgcatttccctaatgactcatgatattgagcatcttttcatgtgcttatttaccatctgaatattttctttggtgagctgtttatctcttttgcccatttttaaaaaattgggttttactggagttttcagaattcataatatatgctgaatacaagttcatcagataaatgatttgcaagtcttctagtttttccttgtttttttgttctcaaagtctttcaaaagcagatgttcttaatttttctgaagtccaccttatcaattaaaaaatagatcatgttattggtatatctaaggtatctttttctaatataaggtcacaaatttttctcctctgttttctgtagaaatttaggatttatactaacgtttgtggctcatttttagttaatttttgtatttgtgctatgtgcctgttatgccaataccacatagtcttaactataaaagagcttaactatataaactataataaaatatcaagtcaggtagtataagtcctccagctttcttgtttctcagaattgttttgactagtctaggtcttttgttatccttgtatggtttcggattggcttgtcaatttctattaaaaagccagttttgatagagattctgctgagtccatggatcaactttgggaagattgccatcttaacaggtattgttttttagtttcaatttttgattgttgctaatatatagaaatacatggatgtttattgatcttgtttgtttttatttaggccatagatttttttctttttctttttaaagacagggtcttgctctgtcccctaggcttcatagctcacttcagccttgaactcctgagctgaagtgattctcccaagaagctaggactacaggtacatgccaccacgctcggctcattttcttattttatagagacaggatcttgctgtgtttcccaggctggtctcgagcacctggcctcaagctgtcctctcgcctcggcttcccaaagtgcatgagtcactgaacttggccaggccgtaaattgttttgagacagggtcttgctctgttgcacaggctagagtgcagtggtgcaatcatggcttactgcagccttgacctcctgggctcaagtgatccttccacctcagcttcctcagtagctgggactgtaaacactcaccacgatgcctggctaatttttgtagagacagggtttcaccatgttggccaggctggtctcaaactcctgaccttaggtgatccatctgcctcggcctcccaaagtgtttgaccactcagcctttatacagatatttcatcttctttacaagaagaaaaacactctaagctcttgcctaaaaagatgaaaatgttctttgtaaaaatgaggatgtccttaccctcttcccaaaatgaggagcagagtctcataattgtattgatttctgggggacattcacactatctatttctaggctgtgttaattatgcctcaaattcatagttccttctgaatatcctgttacctagggactaaattgtaaagttaacctttaataaagtttgaataacatagagaagaagagggaaggaattgatttataaacttgcccgtttccctgtaataaggaagaaaatatgtatagctgctgtagaccttgcttctgtaactggttgagagattgtagttcatatttataactacttctgctgtacattccatgtttcctttgttctcattcaagatctcagctggtggggtaacctaaatcttcattaataaagaatatggctttgggaggctgaggcgggtggatcacgaggtcaggagatcgagaccatcctggctagcacagtgaaaccccgtttctactaaaaatataaaaaattagctgggcgtggtggcgggtacctgtagtcccagctactcaggaggctgaggcaggagaatcgcttcaacccaggaggcagacgtggcagtgagctgagatcacaccactgcactccagcctgggtgacagagtgagactgtctcacaaaaaagaataaaaaaaaaaaagaaaaaaagaccatgggccggacatggtggctcacgcctgtaatcccagcactctggaagctgaggtgggcaggtcacaaggtcaggagtttgagaccagcctggccaacatagtaaaaccctgtctctactaagaatacaaatattagctgggcgtggtggcaggcgcctgtaatcccagctacttgggaggctgaggcacaagaatcacttgaacccgggaggtggaagttgcagtgagccaagatcacaccactgcactccagcctgggcgacagagcaagactctgtctcaaaaaaagaaaaaaaagaatacaaatctttggtggtcctgcttcatgtgtgtgcatgcctgtggctgtggttttccattaagttttgctcttatatatataggtttagaaaaacatttcagggaatcctcagggttccagacatagtcctctttgtccccattatgtagcaacagtacagtatcacctagtaataggactgaattacatcagctaatagaataacccccttctttgactgttgatgtagtgcggtggttcttaggacagttttacctcccaggggacatttggcaatgcctggagacatttttaattgttatgactttcgtgggggtgggggaatgctactggcatctagtgggtagagttcagggatgctgtcaggcatcctgaaatgcacaggacagcccccaagagtagagactgatccagtccaaactgtcagtagtgctaagattgagaaattctgatttagtggtatggaggcagtggtcatgaggtagttgttacttccagttcagtggaactgtgtggaatcattccctgcttgggaaccaaggcctccaatccagcagatatcaaagtcgtaggtacttgaaacaaaacttctgctaatggaatttttaggaataatagaggaactacttctacttgtgccccttgattctcaggcctttgtattctagctatggggaaaacaatattgtatattgctcattgatccactgtaactgagtgagtcttcagtagtccattctgttagaccagctgcttctgggtgatggagtatgtggtaagaccagtgatttccaagttccataacccattcctgcataaccctttttctgtgaaatgagtaccttgatcaaagtcttgttgagtagtataccttgatgatgaacaaggtgtcgcccatgtccttgatggtgatgctggcagaagcactgtaggcagggaatgcatattcatattcagaatatgttggtgccagtgaggacaaattcttgtcccctccatgtatgtagagtttttgttttgttttctttttttaaggtatggtattatccactgtcattaatattttggagcattttacttccacattaaaaaagatcaaaataggtaataattatctgaccaagaaatgttttaaataaattgtagacttatgacagctatatcatctatctaaaaaccttggagtaactgtaaaatagtgacttttgaactgtagactttactcatgcagatatctcactaattttgttgaaatctaccagatagaaatccattgttatgggttgtatggttgaaaactttttaggctgtcatttgtttcaagatacagattgactcggtatactttaacatttctcatagttggccaaatttaggtaaaactatttaatttcattgaacgttttagggaaaatgcctgaatattaatagagataggatgaattaaattaaagaacttaccctttgaaaaattgccagggttagcaatttttatgctaaccctgcataaaaattgtgcgtggtggtgtgtggagtggtgtatatgtttcagagaaataatataaatgttcagataagagtatctgcgtaatctaactaggacctgtctaacctacctgcttaaggatagaggaaatcttgagagacttgaaattgaagaacttaaaattttaagtcttccctttcaaggccctatcaaaacatcatgaccacatctttgaaatagttacttttatcactcaatatagttagaaaattttatttttagaactccaaaatcattttattttattttatttatttatttttttcgagacggagtcttgccctgtcgcccaggctggagtgcagtggcgccatctccgctcactgcaagctccgcatcttggtttcacaccattctcctgcctcagcctcccgagtagctgggactacaggtgcccgcccccatgcccagctaatttttttgtattttttttttttttagtagagacagggtttcgctgtgttagccaggatggtctcgatctcctgacctcgtgattcaccttcctcggcctcccaaagtgctagggttacaggcatgagccactgtgcctggctcattttatttttattattattttttgagatggagtctcactattgcccaggctggagtgcagtggtgctattttggctcactgcaacctctgcctcctgagttcaagcaattctcctgcctcagcctttggagtagctggtactacaggcgtgccgccacgcctggctaaatttttgtatttttagtagggatggggtttcaccatattggccaggctggtcttgaactcctgacctcagttgatcctcctgcctcagcctcccagagtgctgggattataggtgtgagctaccgtgcctgacctccaaaaccgtttttattaattatattctttattaagtatatgtttgataaagacaagcatttttccttttttcactgttacattctttctgtttagaatagtgatttgcggccaggcgcggtggctcatgcctgtaatcccagcactttgggaggctgaggcaggtggatcatgaggtcaggagatcaagaccatcctggctaacaggtgaaaccctgtctctactaaaaatacaaaaaaaattagctgggcgtggtggcgggctcctgtagtcctagctactcgggaggctgagacaggagaatgacgtgaacacgggaggcggagcttgcagtgagccaagactgcgcctctgcactccagcctgggtgacagagcaaaactccatctcaaaaaaaaaaaaaaaaaaaaaaaaaaaaaaaggaatagtgatttgcacatagaagggactcaataaatatttgttgaatgaatgaatatatgaaataaaatcttccatgctcttgaagagaagtatttgtcatgtgactggtcttatatggcagaatgtcccttgtttaccattcctattcccttctaaccaaatcatgatatgtatttttaggtattctttggcatttctttttgaacacctggaaaaatgctaaaatatggtttaaaactcaatgtttgtgaattaggctgttaggtgcagcctgacttaagggataagggctgaattatagagaaattgaattatgctttcaaatatggtacgcatatgaaagtaatacatggttgttttttaaactaggttaaatgtggtaaatgcactcttttaatttagtgttttattaaattttggtatatgttgtgttataagcataaaagtttctgaaagaatttttgtgcctagaaattgtgggaattgttgctttctttaacttttgatttgaaacaatcacaaattacactggattcttaaaaatgttgtaggatctttagggagctcaactgcagtccagatgctgattttttttttttttaatactttaagttctgggatacacgtgcagaatgtgcaggtttgttacatagctatactcgtgccatggtggtttgctgcacccatcaacctgtcgtctaccttaggtatttctcctaatgctatccctcccctaaacccccaccccgcaacaggcccagtgtgtgatgttcccctctgtgtgtccatgtgttttcattgctcaactcgtacttatgaatgagaacatgcagtgtttgattttctgttcctgtgttagtttgctgagaatgatggtttccagcttcatccatgtccctgcaaaggacatgaactcatccttttttatagttgcatggtattccatggtgtgtatataccacattttctttatccagtctataattgatgggcatttgggttggttgcaagtctttgctattgtgaacagtgccgcaataaacataggtgtacatgtgtatttatagtagaatgatttataatcctttgggtatatacccagtaattggatggctgagtcaaatggtatttctagttgtagatccttgaggaatcgccacactgtcttccacaatggttgaactaatttacactcccaccaacagtgtaaaggcatttctatgtctctctctcttttttttttttcttgagatggagtctcactgtgttgccaggctggagtgtggagtgtggtggcatgatcttggctcactgcaacctccgcctgccaggttcaagtaattctcctgcctcagcctctccactagctgggattacaggtgtgtgccaccacacccagctaattttttgtatctttagtagagacagcgtttcaccatgttgggcaggatggtcttgatctcttgaccttgtaatctgcccgcctcggcctcccaaagtgctgggattacaggtgtgagccaccgcgcctggccttaagagttcctgtttctccacctcctctccagcatctgttgtttcctgactttttaatgatcgccattctgactggtgtgagatggtatctcattgtggttttgatttgcatttctctaatgaccagtgatgatgagctttttttcctgtgttttttggctgcataaatatcttcttttgagaagtgtctgtttatatccttcgtccactttttgatgggttttttttttttcttgtaaatttaagttctttgtagattctggatattagcccttggtcagatggagagattgcaaaaattttctcccattctgtaggttgcctattcactcatgatagtttcttttgctgtgcagaagctctttaatttaattagatcccatttgtcaattttggcttttgttgtcattgcttttggtgttttagtcatgaagtctttccccatgcctgtgtcctgaatggtattgcctaggttttcttctagggtttttatggttttaggtcttatgtttaagtctttaatcaatcttgagttaatttttgtataaggtataacaaaagggcccagtttcagttttctgcatatggctagccagttttgccaacatcatttattaaatagggaatcctttccccattgcttgtttttgtcaggtttgtcaaagatcagatggttatagatgtgtggtgttatttctgaggtatctgttctgttccattggtctatgtatctgttttggtttcagtaccatgctattttgtttactgtagccttgtagtatggtttgaagtcaggtagtgtgatgcctccagctttgttcttgttgcttaggattgtcttggctctacgggctcttttttggttccctatgaaatttaaagtagttttttctaattctgcaagaaagtcaatggtagcttgatggggatagtattgaatctataaattactttgtgtagtacagccattttcatgatatcgattcttcctattcatgagcatggaatgttttttcatttgtttgtatcctcttttatttccttgagcagtgatttgtagttctccttgaagaggtccttcacatcccttgtaaggtgtattcctaagtattttattctctttgtagcaattgtgaatgggaattcactcatgatttggctgtttgtctgttattggtgtataggaatgcttgtgatttttgcacattgattttgtatcctgaaactttgctgaagttgcttctcagctaaaggagattttgggctgagacgatagggttttctaaatatacagtcatgtcatctgcagacagagacagtttgacttcatcttttcctattcaaataccctttatttttttctcttgcctgattgccctggccagaacttccaatactatgttgtataggagtggtgagagaaggcatccttgtcttgtgccggttttcaaagggaatgcttccagtttttgcccattcagtatgagtatacctatgtaacaaacctgcacattctgcacatgtatcccagaacttaaagtatttaaaaaaaaaaaaaatcagcatctggactgcagttgagctccctaaagatcctacaacatttttaagaatccagtgtaatttgtgattgtttcaaatcaaaagttaaagaaagcaacaattcccacaacttctaggcccaaaaattctttcagaaacttttatgcttataacacaacatataccaaaatttaataaaacactaaattaaaagagtgcatttaccacatttaacctagttaaaaaaaaacacaacaaccatgtattagtttcatatgcataccatatttgaaagcgtaattcaatttctctataattcagcccttatcccttaagtcaggctgcacctaacagcctaattcacaaacattgagttttaaaccatattttagcatttttccaggtgttcaaaaagaaatgccaaagaatacctaaaaatacataccatgatttggttagaagggaataggaatggtaaacaagggacattctgccatataagaccagttacgtgacaaatacttctcttcaagatcatggaagattttatttcatatattcattcattcaacaaatatttattgagtcccttctatgtgcaaatcactattctttttttttttttttttttttttgagatggagtttcgctctgtcacccaggctggagtgcagaggcacaatcttggctcactgcaagctccgcctcccgtgttcacgccattctcctgtctcagcctcccgagtagctgggactataggcacccagctgtgggtttgttataaatagctcttattattttgagatgctctccatcagtacctagtttattgagagtttttatcatgaaggggtgttgaattttatcaaaggccttttcttcatctattgagataatcgtgtggtttttgtcattggttctgtttatgtgatggattacatttattgatttacatatgttgagccagccttgcatcccagtgatgaagctgacttgatcatgggggataagctttttggtgtactgctggattcggtttgccacaattttattgaggattttcacagatgctgaatttttttctgggaagaatttactttgactttttcatcctacaaaaattattctggttctgaaggatgcaggtgtttcaatggtgtcccattaatatccccaggcttagcacagttcttgcttggttataataggcaattaagtgttgaatgaatgaaagaattttaactttattctgtgggttcagggagctgttgaagagtattaagcaagtgagtggcatgctcacatgttctgaagagtgtttcctggtagtgatatagaagatggatttgaagggacagtaaaggcaagaataataattaagaaattgttataatagggatgatctgagccagggtactcattataggaaattaggggcaaccttgtcatgagatttgtttaggagatgaaattggaaggcttcagatggatgataggggtaaggaggaaaggaggagatttaagtgaataagagttgaggagagggaggagttgtaaatgacaagtttcttgtttattgttttgaataaaggggaaaattgttttcagttattcataaaggacttaaaaatgggctttgatcccaaaagttgttttgaagttatttcctgctttatctttggagacccttcttcccacccccacatcaaagcaaatgccctcaactgctttagatgcagtcttgcattgaaataggtatcacattgttttattttgcttgaatgggtgctgttggcttaaacatctaattgcatctgctttgtcttctttagttgtgtctacttatgggccaaaagagcatttctacctctgtaatttcatttgcatattggttttcagataaattgaagattaattatatgaagtatatggtttgtaatctcaattgaaggtgaattttttattttcctggttgaatataatggaatcattttggtatggagaagaaatggttaaaaatagaccagtgggtcatctcagtgtgaaagtcaagaggacttctaggcttaagcctggtagctaaatttctgttggctctaccctcttcatgatgagtccaagtttattttgatctgcatctttcttttttttaatgaatgaaattctccttcattcagcctggtaagtaacctggccattagtacgtgactaaatagctgaagcttctggcttgaattaagttataaacttagcacagtggcaggtgcttgaactgccatgttaaaactagcgcatagaatctttgccattcaaaaactgttttctcaatcccatgaaggagatgaagcctacatgggaatcttcactgattgtgctgacttttcttctacaatttttagtttataacatgtatagtttgtcaattgtgctaggatattttgttaatatgttcttaaaaattcaaatcccaggggtaaacatcaaataatttaattgtgcctatttgactttatgggagagttaacaaccatatttatatatatggttaaatgtgtataatcttcattctcaatctttcagaatccttattttccattttcatttttagcattagctgcattatttctttatacaactaggaaaagggattattcagaaatttggttgatggctttttattttgtagagacagggtctgtctctgttacccagcctagtctctaacttctagtctcaagtggtctttccacctcagccttcctagtgttgggattacaggcatgagccaccgcactggccagatggcattttaaagaataatgttaggaaaataattaatttttgcaagtgaagatagttgaaatgttagctaaaatgatgacctagaggcagcttgttttggtaaatatcttagtcagtttaggctgctataacaaaataccatagatttggtagtttataaacaacagaaacttacttctcacaattctaaagtctgggaaatccaagaataacattcctttaagcaaggttgaatgtaccagcttgggcgatagtggcaagtagcctcctattccattttgttctagaaagcattttttctcttttctattatttttgtctctttatatgtttatgtgttagggggagaaggagagagaatatttttatatttttcttttggggggatatttttatttttaaattataaatacttctaatttgcaaaggatcccagaaatagttgaagctgtctttaaacccctctctgatcccattctatcctttctgttaactactattctgaagttaatttgtactctgtccatttttatccttttattacatatgtttgtgttcataaaaaaattacagtttaacatttttacataaaaaatgttcttgtaaatattctgcaatttgcttttttaaattttattttttatttttaatttttttttgcagagccagggccttgccttgttgcctaggctgatctcaaactcctggccccaaggaatcctcttaccttggcctcccaaagtgctgggattataagtgtgaaccaccactcctggccttgcagcttgctttttaaacctattctaagacttgctccctatttatacatgagtattaagttaactcattttaactgcacgtataatattctattatcagtatgtcagtttatccatttctggtatagaggaacacttaatttgttttcagggttttttttttttttgcttgtgtttttgttttattataaacaatgcttcaggaagcatatatttgtattcttgaattttttttttttttttttttttttgagacagggtctcactcttgtcgcccaggctggagtgcagtggtgcgaactcggctcactgcaagctccgcctcccaggtttatgccattctcctgccttagcctcctgagtagctgggactacaggtgcctgccaccatgcgggctaatttttttttgtatttttagtacaggcggtgtttcactgtgttagccaggatggtctcgatctcctggcctcatgatctgtccgccttggcctcccaaagtgctgggattatatgcgtgagccaccgtgcctggccttgaatttttatttgacttaaaacatactgtgaaacttgtaagattatgtgaatcatgtttgtacagtttatacttaaaaaaaaaaaaacatggtgaactcttatcaattcacagagtaaaaaacaacattcccaatgctgtggaaacacctctatggcccaaatcacagttcttttcttaccattccccctaccactatcttgaattgtattttaaaatttcctttcttttctttatgtctccatgaacaatgtattgctttgtttacttattttgattttcatgtaatggaataatactgtaagtattctgatttcttttgtaagcatcatttttcttttgagcgttaatctatggtattgtatgcagttcattcagttttactgctatacattagttcattatttgtatatattgtatatatatatatatctgggctattgatgcacatttggattgtttctagttttttgctattactaagaatgctgcttacgaacattgttattcatgtcttttgtgcacatgcaggaatttgaagtatatgtctgggagcagaatttttcattttatggggtatgggtttgtttagctttactaagtaatgccaaatttttctaatttttaaaaatttttaattaattttttttttgagatggagtttctctcttctcccccaggctggagtgtaatggcacgatctggactcactgcaacctctgcctcctgggttcaagcgattctcctgcctcagcctcctgagtagctgggattacaggagcgagcaccatgcccagctaatttttgtatttttattagagacggggtttcgccatgttagccaggctggtctcgaactcctgacctcaagtgatctgtccacctccgtctcctgaagtgctaggattacaggcgtgagccactgcgcctggccaccaaattattttttaaagtgattgaatcagttgacactcccaactgcaatatagaagtattcctattgctctgtgtccttgccaaagcttagaattgtttctttaaaaaattttatggggccgggtgcagtggcttacacctgttcaaggccagcctggccaacgtggtaaaacccggtctctactaaaaaatacaaaaaaattagctggacgttgtggcatgcacctgtagtgctagctactcgggaggctaaggcaggggaattgcttgaacctgggaggcggaggttgcagtgagctgacatcttgccattgcactccagcctgggcaacaagagcgacacttcgtctaaaaaaaaagaaaaaaaaattatgtatctggtgggtaagaaatgttgtttcattgtaatttgaatctgtatttccttgactaccaatgaggtttagtttcttttcggatattcatagagcatttgtgttatttattctgtgaaatgtatttgtgtttcttattctgtgaagtgtctgtatatactttttgcccatttttctgtttggattgtttaatttttcctgattgattcatagcaattttttatggttttagatctaattctcttgttttttgagacagggtctggctctgtcacccaggctaaagtgcaatggtgcaatcttggctcattgcaacctttgctaggctcaagctatcctcccacctcagcctcttgagtagctgggactacaggtacgcgccactgtgcctggctaatttttgtattttttgtggagatggggttttgccatgttccccaggctggtcttgaattcgtgagctccagtgatctacccacctcagcctcccaaagtgttgagattgtagatttgagccacagtgcctagcctagatctaattctagatttgtgttgcaaatatcttttccaatttatgattggattaaaaaaaacttcggtgattgaaattcttgatcttactgcagctgaatttatcagtcttctatgatttatgttttaaaatttttttgtgtcctatcattaagataattctctattttctaaaagttgtttgcttttcacttttacattgaagtctctaatccacatggaaagactttttttgtaaggatccacttttatttttttgccatatgataacagataactgattgttccagcctatttattgagtagtgcattttttctcctgtgatctcagtgcttgcttgggtgaatattaagtgtcagtatatgcacaggctcagtttctagactctcagttcggctctctcctctagtgccagtaatccacttgattatttgtcctgattgtggttgctttataataattcttagtataaagtatggcaggtccccaaaagacttataataatgcctttccatattggttttacagtcagtttattgatttccgcaaaaaatgatactgggattttgaatggtattgcattgagtctttggatcaagttgggaagaattgattgacattgttatgatattgaggcttcctatttaagaacataatatgactttctatttattttatgttttaaaaaatcattccagttaagttttataattttctccttatataaagaacttctacataaaatgtcagtttttcctagaatatttttattatttatacatgatatttaaaaagttatattttctgattgtatatagaaatgaaattaacttatattttgtctttatactttttttttttttttatttaaagaaacggggttttgctatgttgcccaggctggtcttaaactcttggcctcaggtgatcctctagtctcagcctcccaaagtgctaggattacaggtgtgagccaccacatctggcctgtttttgtgctattactgacttatatctagattctttggggttatctatgtagacagtggatgatctacaaatagttgtagctttgtttctttatcttcaatctttttttttctctgtgcatctgttgagggcttttaatgttgaataggggagatgacattgggaagctatgtgttgtttttaattaatattttttttgtacattgacctcttctgtaccttgcacttctgttttgttttgtttggttttgtttttggaatgcagtggcgcaatcacagttcactgcagccttgatcacctgggctcaagccatcatcccacctcagcctcccgagtagctgggaccacaggcgtgtgccaccatgcctggctgatttttgtattttttttttttttttttagagatggggtttcatcctgttggccaggctggtctcaaattcctgagctcaagtgatccacctgcctcgacctcccaaagtgttaggattataggtgtgagccactgcacccagccccagggttgttgcttctttattgagcttgtcactcagtgccttttaactggggcatttagcccgtttacattcaaggttagtattgatatgtgtggatctaattgtgtcatcatgttgttagctggttattatgctgacttgttggcatggttgctttgtagtgtcactggttatgtacttaagtgtgttttttttagtgtctgataatgttctttcctttccatatttagtgctgctttcaggagctctcgtaaggtaggtctggtactaacgaattccctcagcatttgcttgcctgaaaaggatcttatttttcctttgcttatgtagcttagtttggcccaatatgaaattctgggttggaatttcttatctttaagaatgttgtggctgggtgctgtggctcacacctgtaatcccagcactttgggaggccgaggcgggcagatcatgaggtcaggagatcgagaccatcctggctaacaccgtgaaaccctgtctctactaaatatacaaaaaattagccaagcatggtagcaggcgcctgtagtcccagctactcgggagcctgaggcaggagaatggcgtaagtaaacccgggaggcggagcttgcagtgagcctagatcgcgccactgcactccagcctgggtgacaagagtgagactccgtctcaaaaaaaaaaaaaggaatgttgaatatagacctccaatctcttctgacttgtatagtttctactgagaggtccattgttagtctgatgggctttcctttataggtgacatgtcctttctctctagccacctttaacatttttttctttcatttctgccttgaagaatctgatgattctgttttttggagattatctttttgtgaaatattttgtgggagttctctttatttcctgaatttgaatgttgacttctctagctaggttggggaagttctcatgaatgatatcctgaaatatgttttccaagttgctgcctttctccccatatctttcagggataccagtgaatcatatatttagtctctttatataatttcatatttcttgggggttttgtttgttccttttcattcttttgtctttattcttgtctgtcttcttatttcagaaagccaatcttcaagcgctgagattcttttctcagcttggtctgttctactgttaatacttgcgattgcattatgaaattttttttttttttttttttgagacagagtagtgacacgatctcagctcactgcaacctctgcttcctgggttcaagcgattctcctgcctcagcctcctgagttgctgggattgcaggtgcctgccactacacccatctgattttttgtatttttcgtagagacggggtttcaccatgttgaccaggctggtcttgaacccctgacctcatgattcgcctgtcttggcctcccaaaatgttgagattacaggtgtgagccactgcgcccggccatgaaattcttatagagtgttttttagctgtatgaggtcgtttatattcttttctatactggctattttgtctgtcagctctgtatcgttttattgtgggtagcttccttacattgggtttcaacattctcctgaatctcaatgattttcattcctatccatattctgaattctgtttctgtcatttcaaccatctcagtccagttcagaacccttgccggagagctagtgcagtcgtttgttttagaggaaagaagatgctctggctttttgagtcatcagagttcttgtgttggtgctttgtcatctttgtgggctgatgttccttcagtctttgaagtcgctgtttttttttgtttttttttttttatcctatatgatgaccttggatgtttgtggtacaaggtaggttcagttaactggcttcattactggaggggccagggctcatctcaggactcccggagtacatgggtcctccaactctgggggactggcattgggccccagctttgttctctggttctttaaggttaggaacctgctgcactggaggggccgaggtgctcctggacctctggtcacaatactcccgtgggttgtgccagccaaagtgtagggggtggcagtggaatcaattcttgttcgcatgtgccagtagcagtggcagcaaggccacagggtgctggcctccatgtgggcattggcagcaacagtggcagtaaggccagggcggggggctgctggtacacatgcactggtggtggtgttagcacaggggcagggtgctggtgggtgcaggactgggtgtgccctctgtgcacgttcatgctggcttcagtggccggtaaggggtgggggtgggtcctctgttttctctgcctagtttcatgttggtgcaggggctcagtgctggtggggatggcactggtgggctctgtacctgccagtgctcccttgacaatggccatggagggataggcagggtgtactcacgctggctgcagtggcatgggagggtgcttgcacgcatgtgtgctggcggggaagggaaaacaaggtacacctgtgcacacgtgtgggcaaagcatttggagggtggccatgggcgagtgcctgcaggcaaagcagcatggagcagccttcggtgggaggagggtattggcaggctcgtgcttttccacagggatcactgtggttggagcactctgcctgtcagcaccttgtcagtgcaggagctggtatgtggccccccccggcagtactgcaagcatcctggccaggctggagccccatgagagaccagcagactgagggtactcaggtcacaccacccccaccttatgggcaagactgccctgcagagttcaggtctggcagttcctctagggctaaagtctcctatgggagcaagtcgagccttgggggatgggcactcctggccctgttgcactacagatgctccagcaccaaaacctctgagctctgccctggctggagttctgcccctaccacttctctaagcagctttccctgccagctcaagtgtccttggtggttgaggggtctccttgtggtggaggagtctccttctgcagggattccagagtcccctggtgagagtgggttgctgcttccctgttcaactcaactgcctcttcaggagtcactgggggccaggaaaaagtcccggtgcgtggtagccctgtgcagggttccttacttcttccctcgtcagttcagcatctgtgtcttccctctgtcagcactcagtgctttccctctgaagatctgctaagagtgtgccagtcatcctgatcctctgggagatgttcctactggctgcagctagttggccatcttggagccccctccctgtggcttttcatgatttctaataattacattgatgttacattctgtgggctgttcttattgaaatgtataaatttaacaaatcagttgttggtgtaaacttgctgatattttgtttaggatgtttgtatctatgagtaagattggtttgtaattttcttatatagctgttgtctggatttcatatcaaggtgattctagccttataaaatcaattggggagtttatataatctatttaatctctgtgttaactgaagttgtgtctaatatttcacccctaatgtttatttctttattttttcatgtttttttttctgtttgtgtatttcgtttttatttttttgagacagggtcttactctgtcatccagactggagtgcagtggtgtgatcactgttcactgcagccttaacctcctgggctcaagcagtcctcccaccttagcctctcaagtagctgggactacaggcacatgtcaccatccctagctaatttttaaattttttttgtagagacggggtctcaccttgttgcccaggctggtcttgaactcatgggctcaaatgatcttctttcttggcttccaaaagtgctaggattacaggcgtgagccactgtggctggcctcagtgtatttttaaagactcatttctaggccagacttggtgggtcatgcctgtaatcccagcactttgcgaggctgaggtagatggatcacttgaagtcgagagtttgagaccatcctgaccaacatagtgacaccgtttctactaaaaatacaaaaactagctgggtgtggtggcagacgcctgtaatcccagctactcaggaggccgaggcaggagaatcgcttgaacccaggaggaggaggttgcagtgagtggagatcatgccgctgcattccagcctgggccacagagcaagacttcatctcaaaaaaataaaaagactcatttcttagctttttaaactttgttttctgttttgttaattttgttgttacattttctttccttgggtttattctgctatgcatttttcccctaactttttaatgttacttatttatttattttttgagacggagtttcactgttgttgcccaggctggagtacagtggcgtgatctcagctcactgcaacatttgcctcccgagttcaagtgagtctcctgcctcagccacccaagtagctgggattacaggcgctcgccaccatgcccggctaatttttgtatttttagtagagatgggatttcaccattttggccaggctggtctcgaactcctgacctcaggtgatccacctgcttcggcctcccaaagtgctgggattacaggcatgaaccaccgtgcctggccttaatcttatgtttaaatgtggaaaaatgcacataacataaacgttaccatcttaactgttcctaagtgtatagttcagtagtattaagtacattcaccttgttgtgtaaccaatctacagaactcccttcatctcaaaaaactgaaaccctttactcattaaactagaacttcccattcctccatgttcccagccactggaaaccaccattctactttctgtttctatgaatttgactaccctggatacctcaaataagtggcgtcatacagtatttgtctttttataactggcttgtttccgttagtgtaatgtcttcaaggttaatccacattgcagcatatgtcagaatttcctaccttttaaaggctgaataatattctgttatttgtgtaaaccacattttctttatccattcaggacatttgggttactttcaccttttggttattgtaaataatgctgccatgaacatgggtgtgcagataccacttcaagaccctgctttcagttcttttgcatatgtacctagaagtagggttgctggatcatatggtaattctatttgtaatatgttgaggaactgttttactgttttccataggtatatgcactattttactttcccatcagtagtgcacaagggttccaatttctccatatcctcatttacgtttgttattttgtgtctttttttttatttttttgagacagagtctcactctgttgcccaggcttgaatgcagtagtgtgatctgggctcaccgcaacctccgcctcccgggttcaagcgattctgctgccttggcctccctagtagctgggactactggcacctgccaccatgtctggctaatttttgtatttttagtagagatggggtttcgccatgttggccaggctggtcttgaactcctgacctcaagtgatctgcctgcctcggcctcccaaaatgttgggattacaggcatgagccactgcgtctggccttatttcatgtctctttttgatagtagccatcctaatgagtgttaggtggttttatgactttttggtttttttttaatagaggtttttgctctgtcatgcagactagagtacagtatcatgagcatagctcactgcatcttcgaactcttggactcaagcaatcttcctgccttagcctccccaaagtgctgggattataagtggaagccactgtacctagcacgttttctgacttttagagttatatttaagctcatcagttttgaatatttcatttgattgtaagtattcaaagttataaatttattaaatgctgctttaattgtatcctacaagtttcaataattggctttttatttttcaatttcatatttccatataatgttttcaattatgatttctcctttcacctagagtgtttcatatgaatatgaaacatgttatggtttatatgttaccagtaatttcaaatttgaacttagctttatgaccttgaacatatttattagttatttattgttatgttataaattattcccaaatgtagccgttttgtacaacaaacatttattatcacataaagtttctgtccatctgaaatccattagtggctgaactgagtgtttctggctcagagtctttcatgaagctgcagtgacagtcttggctgggtctgtagtaatctgaaggcttgactgggggtagagcatttgcttccaagtaaattcacttacatagcttttggcaggaggcctcagttctttgctggccatttgtaagaggtctcagttcctttctacttgggcttctccatctggctgcttgtaatgtggcagctgacgtctcccagagtgagtgatctgagagaatcaaaagccacattctttcatgatccttagaagttacataccttcctgcttgccgtataatattggttatgcagaacaacccgaataccagatgagagaggatgacacacgggtgtggatatcagaatgtaggaatacttgcagaccatcttggagtctggctaccataagcatacagtccatttttataaagttttcatgtcttcttgaaaatgatatgtagtcccaagttcttgagtgtgatttttacataggagtttgatcaagtttattaagcagttcaactcttctaaattctgattcttttttgtctgctagatcttactactgagaaaggtaagttaggaaatctttcactgaattagtatgtttatgcttttttcttgcagatgtgtcagttttgtgtgtgtgttattaggtgcatagaggcttacaatatcttacagttgatttgagtcctgtatcatcatgtagtgcccctcttgatctctagtcctttttatcttagtccactccagttttctcttgtttctatttgcctgatagatctttttccatttcttaactatcaatatttctgtgcctgtatgctttatgtttgtctcttataaacagttcatgggaaaccagtctgatggtttttttttcttctgcctggagagtttagttcatttacattcattgtgatgactgacatctttggattcctttctgccattttctttttaaaatttaatctaattattattacttttttgaaacaggggtctttctctgttgccctaacttgagtccagtggtgtgatcatggctcactgcaacctctgtctcctgggctcaagtgatcctcccagctcagcctcctaagtagctggaactataggcatgtgccatcttgtctagataattaaaaaacattttttttttttgtagggacagcatcttactgtgtttcccaggggctagtcttgaactcctgagctcaagcgatccacctgcctcagcttcccaaagtgttgtgattacaggtgtgaaccaccacccccagctctgccattttcttatgtgccttttattcaactgtttcatttttttaccccttgagtctcagaatttacctctgggttcattttacttctgcttgaagcatattctttagaatttcttttgatgagggtctgttgcagtaattgctcttactttcctttctttgaaaatacagggccagcgcggtggctcacgcctgtaatccgaacactttgggaggccgaggcgggcggatcacaaggtcaggagatcaagaccatcctggctaacgcggtgaaacccccatctctactaaaaatacaaaaaatagccaggtgtggtggtgggcgtctgtagtcccagctactcagtaggttgaggcaggagaatgacgtgaacctgggaggcggaggttgcagtgagctgagattgtgccactgcactccagcctgggtgaaagagcaagactctgtctcaaaaaaaaaaaaaaaaaaaaaggaaagaaaatacagtagtctccccgctccccccacaaccacttatcagcagttttgctttctatggtttgttgcccacagtcaactgcagtctgaaaatgttaaatggaaaattccagaaataaacaattcataagtttaaaattgcatgctgttttgagtagtgtgatgaaatctcacacagtcctgcttcgtcttacttgggatgcaaatcatccctttgtccagtgtatccacactgtgtatggtacctgcctgttagtcacttagtagccatctcatttatcagattgactgtcatgatattgtagtgctgtgttcagttaacccttattttatatagtaatggccccaaggaggaggagcagtgacgctggaatattgttataattgttctttttttaaaattagttattattgtcgatctcttactgtgtcttataaattaaacttttttataggcatgtatgtgtaggaaaaaaacatagtatatatatagggttcagtactatccctggattcaggcatccactggggctcttggaacttatgccccatggataaggggagactactgtatctttatttctcccttattcttgaatgatagttttgctggatatatagaattctggacagttatgtttccctcagtatgttaaagatactatttcactatctgtctgctatcatagccattgagaattcagttgacataattgcctttattttataggtgacattttctctccagttgtttttttaggtctcctttttgttgtttgttctgtagtttcaccaaaatgtttgtaggtatatggatctctattctgctttgagtttttggacttcttgggagtgacatttgttgttgtctaacagttctaaaaagccattaccttctcaaatattgtttcttttctgtatttctattagttttcttctggaactacaattagatgtatgtaatattgtttgaggctgagccaagtagtgtactgtgattaagtttactttctggtacaactttttgtgtctcctaaatgtaatgtctcatttagcctcatttttttcatttgcttcagtttttatgtagctattgttatttctttccatcattaacacgttctcagtacagtttttcacatagggtcaaacctgttaatctgttcagtgtgaccattttccttgaggatttcctcccatgctagtgtttagaattggctgcttgctataccaggtgtgcagctatcatcctgtgttctcccttcagcatcattttggaaattcctattgcttgtctcctgtgttgattcccttgttttgtggatctcattcatttacaacacaccttccactagcttgctggaaaaaaaaaaaagtacaaaggagataaattttgagaccttgaatgtttgagaatgtctttattctaccttttttgaaaaaaaaattgataatttgtctaggtcttaagttctaatatgaaataattttttttctcagaatttggaaagaatttctccattgccttttagtttatcactgagattattgctaaccccaatgccattctggtttctgttacgttgtcatcaatctgtttattttttcttttctagaatccttggaatttttttttatttgtccttgctattctgcagttcaataataacatgttgggataccaaatgggtcttacttagtttagagactcttcaagtctggaaaacttcttgtgttattctctggcaacgtcttcctatcttatttattaatttttttctttttttcacatgttggaattgattactcatgtaatgttttacatttttttctttcatggtctttcttttgttctttttttgtagaaaatatcttgactttatcttccaactctttaatgttttctttctttctttcttttttcttgagacagggtctggctctgtcgcccaggctggagtgcaatggcacgatctcagcactctgcaacctccacctcccgggttcaagtgattctcctgcctcagcctcctgagtagctaggattacaggtgcctactaccacacctggctaatttttgtatttttagtggagacaaagtttcactatgttggccaggctggtctcgaactcctgacctcaggtgatccacccgcctgggcttctcaaagtgctgagattataggtgtgagccactgcacctggcctgctctctctattttaaaaatagcattctttagtttttttttttttttgagtcagcgtctcgctctgttgcccaggctggagtgcagtggtgcaatctcggctcactgcaagctccgcctcccaggttcacgcaattcttctgcctcagcctcctgagtagctgggactacaggctaattttttttttttttgtatttttagtagagacggggtttcaccgtgttagccaggatggtctcaatctcctgatgtcgtgatatgcccaccttggcctcccaaagtgctgggatcagaggcagcattctttaaatttttaagtattttttaagatactaataatttaccgtattttgaagttttcttctcattcttcattatcttttttctcaaaattaattgtgtgtacttggttctttttctttcatgttaataaggtttccttatacctggtgattctgagctgttttcactttaaatatctaagttttgtttgtttgttttttgagacagtctcattctctcgcccaagctagagtgcggtggcatgatctcagctcactgcaacctccacttcccaggttcaagaaattcttgtgcctcagcctctcaagtagctgggattacaggcatgtgccaccatgcgtggctaaattttgtatttttagtagagatgaggtttcaccatattggccaggctggtctgaaactcctgtcctcaagtgatcggcctgcctcggcctctcaaagtgctgggattacagcatgagtcattgcgcctggcctactcttagatcttaaatgttttacacagacacacacacacacacacacacacacacacacacacacggtaactgtgatgatggatgtgtcagttgatcgtggtaatcatttcagaatgtatacatctattaaattatcatgtagaccttaaattattatttttgtcaattatacctcaagctggaaaaaaatgcagatctactcttaaatgtgagataattggaagctcatgtgcatgggctagggtaagttggtggagaactaactttattgttggaggctttctaaatgtatgtcttttctttgaacattagtttgttccagaaaatattgcgtggttggttgcctgggaagatgtatgtctgattttcggacttggaagcaagataaaggaaagaggctgctggtttatggtatagagattttcactcgttaagaaagtaacaaagtaaggaagtaggattattgtagaaatattattttacagttcaagtttgtaaaacacaggtgaaggtaatcgttggtgggtctcttcctctgagatcaccaaattatctgtagactggttggtagacttggagagaccacttgttcttggacaacagttagaagcatactgccctaagcagtaaaaaggtgattgttgagggcagcaagaggcggtgtaacataccagttcatttttcttttcttagcaagcatgtactaattgccttttaaaactcctgaccataggggataaaacgattacaagaaagataccttccctgctcccatggaatttacattctagcacaacagtggatattaaacaacgtatcatctggttatgtaattacagtaataagaatcatgtaggagaggtcaaggaagcttactgctgtggggttcaggatggcatctccgaaagtatgaataaggaaagtggtgggagaataaaaggagagtggcagagactcagactgagagattaattgagataatgacaattgtgggattcaatgaggtgtataatgtgtttagtgcctggtacttgtgctcagtaagtgctaattagtagttgtttatagcaatactgttatcttggatgatcaaatagaagatccctagcaagtaattttataaagacaaaaatttcgtgtcaactctgtaataaaacaatatatccttagaatcagttatcacttaaaatccttattttatagaaatttttgtgtttcaaaagtatagctagggcaagtcccccttcagggtggatacttaaaggagatgaaatcacttcataaaggtgtctgcactcccatgttcattgcagtgttatttacaaggtagccaagatatggaaacaacctaaatgtctgttgatggcaaattgataaagaaaatgtgtgtgtatgtgtgtgtttatacaatggaacgttattcagcctttaaaaagaaggatattctgtcatttgccacaacttggttggaccttatgctaagtgaaatagaccacgcacaaaaagaaaaatactatataatctcacttatatgtggaatgtttttaaaaagtcaagtatacggagacagagaataaaacagtggttaccttgggcaggaggaggaaggaaatggggttatatagataataaaatagcagatatatagaatgaagaagtctggagagcttatgtataacatgaagactatagttaataaaacaaaactgtattaaggatttttattaagtaatttagctgcttgtaacacttacacacacacacatagtaactatgatagatgttttcactgtagtaaccattttgctgtctatacacatcccaagatatcagcttataaatctcatatacacagatttttttttttaaaggtattgttggggcagggatcaggcttaactttgtggttgtatctgtagtacccagcacagtgcctgacacatagaaggtgttaatcttgttttttttttttttaggtatctgaaatacttaccagaaattctattctttcagatgagagacatctatgtgattttaggtattaataaaagaaatattcttccttttttcttactacggtgttggtagtggtgctctttcttcagggacatcattgatggccttttagttagaatttaaatgttatcctttctgtagccagcagggatctgttgggataaagtcttatttttcttttcttgggagtaattggtgctttctaacttttcagcacttagactcacaatgtattagttatctattgctgcaaaacacattacttcaaaacttagcagtttaaaacaacagacatttattatcccacagtttctatgggtcaggaagataggggtaccttagctggatgcctctggagcacggtctcttgaggttgcagtcaagctgttggctggggctatatcatctgaaagctttactggggcaggggatgatgtacttccaagttcactcccatgattgttgggaggaggacttaattccgtttcttgtgggcttcttcctggtttatgtttgttacctggtgtctagagctgatgtattgggtacttcccctctagcatggttattttctttgttttttctctcatttaggtgaaaacttaggtgaattttaatgtaaaccctacccccattatggtctaaggggccttttagaaaatgagtagaatgtacacagaggcaaaaattttagcctgtgaccttttgaagaattttctaagtgaaactagaaacaaattaaccattgttcacagagtgctttgcttaatgttatgccttcttttgctaaatcctcttgtttgttgaaatcttacatcttaagttgctgatagtttgttaatagagatcataattaaaaggtgattatatttcttcatgcagtttagctttacatttcttccattatacccaaagatttctataatatagcaagaaatgtttttaaaaagtgtttttcctcaattgtgtgaaagtaatgtatctaactgaaaagaagagaaactcataaaagtaaaaattttaaaaaatcaccttattcttacctctcaaatacaatgacctcatattttaaattttgctcaaggttttttcctcctcattctaggcataattattttcttatatgtgtttcagtattactttttttgtgaaaaatatggttacaaatgtggtctaatttcattttgcactttaaaaattattaatgaggccggaaatgaggccgggcactgtggctcatgcctgtaatcccagcactttgggaggccaaggtgggcagatcacgaggtcaggagttcgagaccatcctgggtaacacagtgaaaccctgtctctactaaaaatacaaaaaattaaccgggtgtggtggcaggcgcctgtagtcccagctactcgggaggctgaggcaggagaatggcatgaacccgggaggcggagcttgcagtgaaccgagatcgcgccactgtactccagcctgggcgatagagcgagactctgtctcaaaaaaaaaaaaaaattattaatgagatggtcatatttttatgttatttactgatcacttacctttgaattgccccttgtttcttgaagtttttccaataaatattcttattaataggcaagacaacctgatctgttagttatgtaaactttttggtagctaattgtatgtgcattcttttacctcccgtttgtttctttattagcagtgtctttttgttatagaatttatacattttcttgtaagcaaatatcagtgtttttattataggtgctgtatgtttgtcttgcttaggaaaatctttattactccaatattattaaattattctttagtatttgtcctaatagctttatggctttgttttttttaaatcacacacacacactcacacacacacacggacacacacactctttgagacgggtcttgttctatcacccaagctggagtgctgtggcgcaattatggctcactgcagcctcaacctcctgggctcaagatatcctcccacctcagcctcccaagtagctgggactacaggtgcataccaccacccccagctaatttttaaatgttttttttgtagaaacagggtctcactttgttgcccaggctggtctgaaactcctgggctcaagtggtcatccttcctcagcctccccaaagtgctggttttacaggcatgagccaccacacctggcagcacccatatattttaaaatttagtatgaattagtcttttctttttgatgtggcataattgtattgactaatccattctttaccattgatttgaaataccacctttattatattaaatttgtgtgtgaatatgaatatcttttctgtgattgcaattaatttgtacttgtacagattgtgctgtaagagcttaacagtatatttcagtacttggtcatgtctcttgttcttgtttttcttttcttttcttttttttgttttgttttttgagacagagactcgctctgttgcccaggctggagtgcagtggcgcagtctcggctcactgcaagctctgcctcctgggttcatgccattctcccgcctcagcctcccaagtagctgggactacaggcgcctgccacgacgcccagctaatttttgttgtatttttagtagagacagggtttcaccgtattagtcaggatgatcttgatctcctgacctcgtgatccgcccgcctcggcctcccaaagtgctgggattacaggcttgagccactgcgcctggccttgttcttgtttttcaaaaatttctttggtattctcacaagtttattcttccaaattaacttcagaatcagcttaccattttaaataagcaccccccttctaaatctattataacatctcactactttctcttctattcatattagcttaacttaagctaccatcctctcttgagtaagactgttttctaacatacagcaacaagagggttctttttaaaacataaatcagattatgtcattcctttgcttaaattcgttcagtgcctttttcccctgtcttttggttatctattgctgtataataagctactccaaagccttgtagcctaaaaacaaccattttattgtgctcacaatttttgggggtcaggaattcatgacaggttcagctgggcagttcttctgttccatattgtgttgctgacactggagaatcccttccattatggcttcttcagtcacatgtctggctcctcagtgtttcttggcctctctctccacaatggcgtcccattcttcagaatctctgcatgtggcctcggcttctcacagcatgctgatctcagagtagtcccattttttacatgacaactggcttctaggaagagggaaataaaaactgtcagaccaattaaggactatggcctggaactacacagtgtgcctttaagccgtattttattggtcagaatagtcactggacctgctagatgaaaggaggtagaaaaataaatttcttttcctaatgagggagtggcaaaatcttattgcgggaaagcatgtgggatgagagatacttgacagttggaaaatataatccgtgacatcgtcaaattcaaaataaattcagagttcttaaaatggcctataaggcttttcatgatctgactcctgcttcttgaatctctgaccgcatcccctagattttcctcttcgttccctttgggttaaccacattggccctcttgctaggctttgaacatgccacacccaacatcagatccattttacttgcaactactgccgtgaatgctcttctttagatctttgcatgggtcttcccgttctcattcattcattcattttgagacagggtctcactctgttgcccagactggagtgcagtggcacgatctgggctcaatgcaacctccgcctcccgggttcaagcaattctcccacctcagcctcctgagtagctgggactgcacgcatgtaccaccatgcctggctaatttttgtatttttgggtttcacgaggtttccccatttggccaggctggtctcaaattcctgacctcatgtgatccgcccgcctcagcctcccaaagtgctgggattagaggtgtgaaccactaatcccatggctggtcttcccatttttttacttcatttaggtctctgctcaaatgtcacatcttcagagagcttcccctgaacaccttatctgataaattcttggttacttagaactccttaatcttgatttttttttccttttcatagaatttggtgctgttagtaggagcctggggggcctaagtaccacttttcttccttccctgcctggcttctgagcaagttgagaaatgagtaaaggtggaggccaaaatatattttaaaaattcttctgactaaagggagatgaagtaaagggaacaaaagaagtatcatgaagattctcagatgtccgacatgggaaactgggtagattgtggtactatttaccaagacaggaaacatggtaggaagattatgaattaagctttggaaatgttgagtttgaagtgcctacaagttatccatgtggagaaaccaaatggacatttggataacacatctgaagctcaggagagaagtttccattacagattcaggtttggtagttgttctagttttctattgctgtgtaacaaactaccacaaacagtagcctaaaacacacaaaattactatcttacaatttctgtgggtcggagtcaaggcattgcttagctgtgttctctgctcaggttctcatcagcctgaaatcaaggttttggttggggcctcagtcttatctgaggcttggggttctcttccaggctcattggttgttggcagacggttcaggaatctggggagacaagatttttgggagcgccaacccagatgtttccattccatgtgtcagagtcttgttctttcctagccaggcccctgatctggacgtaggagacctgctgcctttgggagttcaacctttgaagcccaacacatacagatttagatatctaatctgtctgtccatccatccatccatccatccatccatccatccatccatccatccatccaatctgtatatctctgagatatataagtgtaataaatgggcgataatcaagtgctggttttggtccttaggtttctctgccctcctgctgcaggagaggagaatctctgtgttttcagagaggttctctggctttcaaacttagttttcaattggaagttaatcagcttttttgtttttatcttttttctttgaaatcaacatctgggagtgaggagcactgggcaaatgcagtgcaggcccagcaccagctttggccaacccccacggggagcctggagcgagaatgggagcctgggacaagaatggctcttctgagttgcccagaattgcggtggctgatgtgtccaggccttcatattgccatatcaattagtcatttgatgtgggttatcttgggaaggatatgaccttgaacagggttgttccttgtaggtgaggcaatccctgaaggggctgactgacagcactcccagcatttaaggtaagtccttttttgaaggaggaactgggtagcacctcagtgtctaccacgatttctctgtatccaccaaatggccaatttgtttttgttttttattatcattattcattcatggatttaaacatatatttagcaaactttctgttaaattatgtgtatagaaaagggcacaaattgtaaatatacagctcagttaaatgttcacaaagtaaacacaccagtgtaaccagtatccagatcaagaaataaaacaatactgtgaatctaggagtcctcctcgtgtttcctttcagtcactgttttccagggatctatcctgacttctaaaatcatgggttgaatttagcatggttttgaaatttatgtaacatcatacaatatgtcttgttctgacttctgtctgtcagtattgtatttgtgaaattaagctcacaattgtaagtcattctcttgctgtatattttttcatggtatgactataccagtttttaaaaaccatttctgctattaacatttggattgttccagttgttgggaattataaaacatgctgctgtaaaacattgttgtgcatgtcttttggtgaacatatatacatttctgttgggtatatatctagtgaaattgctgaatgtgtgtgtgtgtgttcagttttagcagataatgccagtttccaaggtaagtactgagttacatgcctactagtagctcctaagatttccagttgctgtaatttgctcctgtttgtagaagacacagccttcgagggcttatcactgagaactgtatttactaaggtctccactagcagattctgaactcttttgtcctctcgaagctgcaaggctttcaaattctgctttgcttttcagaagtttttagtttagcctttttaccctcttccactcactgaggcatttgagattccctcacgtcttcagttttgccaatctagccctcagtgaacaccagaatctctgatggtttcttcttccattagaggtacattgcctgggaaaaaagccttatttctcaatctgttttcctgaccagaatctgcaaatgccccaggggaaaagcagctgcagaagatccccttacctcattatagctcactctttttggaatcttagtgttgctaatccctattccttcagtagctctctgaattcttcaaacaggtgatttttatatttcatcttttgttagaaattaagtttgtggtgggagctattgttttgcagtaaattattctatcctacatggaaacagtagtatggatttaaatatatttaatatgtttcaataaattgccatccttaagtgttcaaattattacacttttggccagtgggggcctctttaaaattcattcctaaccatttttggcttgaccgttattagtcagtgctgctatctggtatgacaagatgttccggggtcattatgtcttttttttttttttttcctccagacatagaagcagccatttcctaaaggagtccagattccttttactgggaaatggtcgttcaagattacaactgagtgaggattactatgggattggtcattagtcattactatgggattggtcattgtttctaggcattttcattggacagaaatagaaatatgttttttaaagtacaaaataaaatatcttgacttcatatagatacttctatttcaaattcaagactacatttctttactttaccattacttttatttcccatgctgaaagtcttgggtttttagaggcactaggagtcatagaattaaaataccacagaattatttagttcctctctttataccattaaataattagatacatttataccattaaagaattagatacagttttcagttgatttgtttatttttgatttctagacttcttaaaattttaattttatgtttatgtaagttacgtagttctaaaatgaaatctacaaaaacaatatgtattccatatagaatatggattctatccttttcacttctactttcttttcatttcctaaaggcaaccactaatttttttgagcatttcattcttctactgttttgttttgtttcttaatataagaaacatatatttctatctcctccctcttcttagatgaatggaacatactgtgtatattttctccatcttgttttttttttaacttaagatgtgtcctggagattattctatcatttaatgaatttggattcattttttggttttacgttacattttatacatgtcttttatttaagtgtcactgtgttcatgttatttgctctttcagcatatataaatatatacacttatatacatgtacacacacacacatacacacacacacacacacacacattttttgagacagagtcttgctctgttgcccaggctggagtgcagtggggcttagctcactgcagcctctgccccctgggttgaagcaattatcatgcctcagcctcccaagtagctgggattataggcacgcgccaccatggtcaactaatttttttgtattttagtagagatggagtttcagcatgttggccaggctggtctcgattgcctgccttggcctcagcatatatttttgtatttagaaagatttattcagaccagcgttcatactgtgtaatgataaggaatttattgtagaaattagattgtatacagttttgaggggactaagtgaggtgagtatctggaatggggaattggaggatcagaggagtccactaaccagatcgtccaaatcaatgacaatgggtagataagttggagctgttggggaaatctgagaagtcaaatatatccagccactgaagtgagattatgaaggaggagcttgaggagggcactgtgggaagctcttgccatgtaaggtttgtcttacaaagccctgtaggtttgcacccaagcatctggtggtaggtttgggctagtattggtcagcaaagtgaccactggtccaaagaaagagctggacatggagtgaaagagagagagagtaaaagctggaactttctgggtgcctctgtatctgtctctcattgtatgttactgtgaaaccttcagaataatagctgctgcttcgcttccacatttcaaacaaattttatacaggtcgagtatcccgtatctgaaatgcttgggaccagaagtgttttggatttcacatatttttgggttctagaatatttgccttttactcaccgtgatcatccctaatctgaaatgagcatttcctttgagagtcatgttgttgatcaacaagtttggattttagagtgttgtaggtttcagatttttcaattagggatagacagcctgtacaaattaccctttagaccaactctaaccagaaccatatagtgagtgggatctgggaaagtagttcccagcttaacagttaacacaccacgcaccaccagtacaatttgtgtttttgttctggtggttaccattatattaatacctttatatggtattctaatttccttctcttttggggtggaggggtattatgtgttggttttttactctgagcaatattgaaatgaactagaaacctcctttcctcatctcctttttccctagcattttactctcagttaataacaagacaatcaagaaacatattctactatttatatgctctcaccaccctccctctcctcattttgataattgtattgtatctatattatcaagtacataaagcagtcacctaatatactttctcccttattgccaccattctcagttcttttagaaaacacagtgatgctccggctgggcacggtggctcacgcctgtaatcccagcactttgggaggccgaggtgggtggattacctgaggtcaggagttcaagaccagcctgaccaacatggtgaaaccccgtctctactaaaaatacaaaaaaattagccaggcaatggtggtgcatgcctttaatcccagctactagggaggctgaggcaggggaatcgcttcaaccttggaagcagaggttatggtgagctgagattacgccactgcactccagcctgggtgacagagcaaggctctgtctcaaaaaaaaaataaataaataaataaaaatacagtgatgctccacataatgacattttggtcagtgatggactgcatatgtaatgggagtccctcagtattataatatggtatcattaccttttctatgtttagatacacaaacaccatgtgttcaagttgccaagagtattcagtacaataacatgctgtacagttttgtaccctgtataccatatagcctagaggtgtggcaggctatactatctaggattgtataagtacactctgtgatgttcacatgacagtggaatcatgtaaggacacatttctcagaacataccccatcactaaatatatttaatgattcctattaatgtggatgtctttccaattattctggtcatctgaagcatattctctagtatatcctccaggaaaaggaaaagggaacaaaatttccagggttcttgccgtttagcacagtttgtcattgctataaaattgtctctcagtatctgggacattggttccaggaacctccatggacggtgaaatctgtagatgctcaagtccctgatatgaaatggtgtggtatttgcatatagcctacacacatcctcctgtgtactttaaatcatcccttgattactgataatacttaatacaatgtaatactatataaatagttgttatacactattatttagggaataatgacgaaaagtctgtacctgttcagtacagacatactaaaatttattttttgatctgcagtttgttgaatgcatagatggagaactcatggattcagagggctgactgtatttgaattcagtttggctagatataaaatccttggtttatgttttcttctttttttaattatactttaagttctagggtacatgtgcacaatgtgcaggtttgttacatatgtatacatgtgccatgttggtgtgctgcacccattaactcgtcatttacattaggtatatctcctaatgctattcctcccccctccccctaccccacgacaggccccggtgtgtgatgttccccttcctgtgtggtttatgttttctttaaatatcttaaatttattttactttattgttttctgacataaaattttgtcaaagtctgatgagagtctaatttttgggttttttttgtataaataatgtcctctttctgcctgtaagttcaaaagattttttttttcttgttcacggaagttcaaaatatgttaaggtattggtcattctgggtcacttttccaggtgtgtggtatgcacattaaagatacagtttcaagtttttaaaaatttcaataataatttcagcaaagttttcttgaattctagtttctaatatccactttattccattggtttggtttctttctttggtgactcctgttatatgtatgttgaatcttctttttctatctttttttgtcactttattgtaaatttttattatctcgtatgtaatttcttttttatattacaactttcctccttagtccccccttttttttcaacatttgtttactcttaaagcattatcttctgtgttaatttactcttatgtatcttctggttagttttcatttctgaaatgatttatcttctaattctttcttgagttctgtcaacttatttctatctgtaattcttatttgtgttattccacatcttttgtcattttcttaatttctcttggctcactttgaaataataatttacagttttcatctgttggtggatatgtctttttggaaactttgattttctgttgtttagacccttatttttatgtttttctgtttcttactcctttttcttaataataactttacatattatttgaccatagaacttttctgttggcttatttttatgtgaaattaatttttctgaattggtaggagggatttgtaggccaggatagctttgtagctttatgtctctagagcttattctttttttactttcatgaaataaaaaaaaaatggtctcattctttcagagatctcttgttcatctctctctttttcatttttatttggacctttttccttttctccctttacccctgttttcagtttggagttcattctcagcagtttcttctcagtgtgggctagaactgtgctgtccagtcagatctaataattacatgtgtggctacttaaagctaaatttaaataaactttatttaataataacttaaataaactttaaacttttgatttcttgtctataccagctatgttacaagtggttaatagctacatgtgacgactagtggctgttgtattgggcattgcccatgtagagcactatcattaccacagcaaatcctattagacagtgatgcttttgagtgtgctccattctcttgagacttttatcataggcctttttcattcatctgcaaattgcaatgagcataactaccctctgttttggctaatattcctaaattgggctgctgtgctttttattaaggatgcagtacattgggaatctcctcttgtcagatccattagacattctccttccacctgctttctcttgcatagatgcttataccacattagtatttttgttttttgttttccagacacaggatctcgctctgttgcccaggctggagtgcagtggctagatcacagcaactttctgggctcaagcagtcctcctgcctcagcctcttgagtagctggattacaggcacacactaccaagcctagattttttttttttttttttaaagtaaagatgaggtctcactctgttgcccaggctggtcttgaactcctggactcaagcagtcctcctgcctcagcctctcaaagtgctgggattacaggcatgagccattgcgcatgtccccaaccagttttgtaactataaatggtttgtttctatttgttcacttctctgggtttgggaatgagggaccttgtcccttcattttcatgtagatattcatcagtttgtgtttttactagagaagttctagtttctttgattttttttttttttttttttttttttgagacagagtctctgttgcctaggctggagtgcagtggtgcgatctcagctcactgcagcctccacctgctgttcaagccattctcgtgcctcagcctccctagtagctgggattacaggcatgtgccaccacgctcggctaactttttgtatttttagtagagacagggtttcaccatgttggccaggctggtcttgaacttttgacctcaagtgatccacctgccttggtctcccaaagttctgggattacaaatgtgagccaccgcacctggccatttctctgatttttatgggatacttagggagattcaccagctgcattttatgaaaccctagttcaagaaacatactggaaaaggagatatggtcacaaagaataggagatgtttctaagggaaataataaattaaaatgaaagttacagtgacttgtgctcactgaatctaaaacccagctgattaaaaatttggcaaaataaaattaaaaaggttatctgtgctcgtaaacaaaagtcccatttttggcctttcaggtttttttcctccataatctttataattaacattacgaagttctgtagtttctgttctgccccctcctttacactctaaaaatgctgccccaccccgccaatttcatttagtatttccttttttttttttttttttttttatttgagatggagtctcgcccgatcgccaggctggagtgcagtggcgtaatctcggctcactgcaatctctgcctcctgggttcatgccattctcctgcctcagcctcccgagtagcttggattacaggcacgtggcactacacccagctaatttttgtatttttagtagagtctgggttcaccatgttggccaggttggtctcaatctcctgacctcgtggtctgcctgacttggcctccgaaagtgctgggatgagccaccgtgcccagcctatttagtatttctttactatcaaaataatcgtccattattaactgatttagcaaacttgggcatgcccctcggtctctttccacctttagttgtactatgttaaaaatgagaaagttatattcaggtttgtttttttcacagaggaacattgctaggtttctctgttagcattagcagggtttaatattaacagtaagtatgtccatgatgctttaaatacagaatgctatttttgagcagagtagagatgaacttctagacagtggaacttaactcattcacagagaaatgtaaatgtggtcttctcatagaatattttttctcatgggatttgtctgcttgtgttctgttatcccttcaattgtgtagctgagggtgcttatcttactgagtgagtcttactgttttttccccaggttttatagtttgttcttgcttctgaacaatcagcagttgtttgccattattgacaagaagtctagggcatagattttcttgatctgtttttcttttaatgtttgagttcaatggataagggaaacggttgtatgcattttattgcagacattctctgaaataatttttagccacaagcaaatagctctgtttctgtgagtcatcatttcttcttatatagtgctggataaagaattctattttgtagatagagatttatgacttccagaaagaaagctgcaaaaatggaagtttccaaagaatttaagatttgctataataaatgctatcatatattggtgtttgagatgcaaatgtacatatctgtgtatcatatattggaggttgattgaaaatcggagtttgagatgcaagtataggtatctgtggttgatgcagttttcctaaaacgtcatgattttcaatggcaagtaagttatttatggtcgtttttaaggataagctgttaacgtgttttttttttctttttttttcagcttccaataaaaacaggacagcagaacacacataccaaagtcagtactgagcacaacaaggaatgtctaatcaatatttccaaatacaagttttctttggttataagcggcctcactactattttaaagaatgttaacaatatggtgagtatttgggttactgtgttttggggaatttgctttcttttctttttgattaaaaagtttagaacagcatattttgaagtatggaaagtgattttctgtggactttggatataaccattaatcttattttgtttacgagcacagataaccttttaattttattttgtcaaatttttaatcagctgggttttagattcagtgagcacaagtaactgtaactttcattttaatttattatttcccttagaaacatctcctatcttttgtgaccatgtctccttttccagtatgtttcttgaattaggatttcatagagcttttgtggcctacacgaattgaccacagtaatccattacacatatttttctttagcatcttgtttgaatttacttacggttgtcccagccctaagtagatgataaaatatgatctcatagtcctaaaatgtggattgatttttttatgaagatatgtgttttttcttccttctgtaacctgtgacagattctgtagtagttaccctgttgttgaaacagtttttctcaaataccagtttcatcaaataattccactgttaaaagctcataatttctttcttcttcccattttctaaaatcgattgacgtttcctagacttcagagtactccagctgtcctccctctgtacctttgaacatataacatcttttgtctttctcaagtgatcccttcctctctctaaattcctatttaacatctccattctaagctgtttcaaactaacatactcagttcatggcaactgatctggatttttcttgattaactctgaactctctgctggtgtttagcatttatttatttatttatgaatgaataaatgaatgaatgaatgaatgacagggtctcattctgtcacccaggctggagtgcagtggcgcaatctcggcttactgtaacctcccccttcccagttcaagtgattttgctgcctcaggctccccagtagctggaattacaggcatgtgccaccatgctcggctaatttttttgtatttttagtagagacgaggtttcactattttggccaggctggtctcaaactcctgacattaggtgatccgcctgcctcggcctcccaaagtgctgagattacaggtgtgagccaccgcgcccagcctgcatttataatcccagtttgtatttgtttgtattgagttgtgaaacaacttctggttatagattgtgaagattgttcccccttccttttttttgagatggtccttaggtttattagataatattctagtatgacattgaaaagacatgaagttacctttttgccttattcccatattttagataatttttctcttgttctattttatttttaactggcatacaataattgtacatgtttatgggtacatattgatgtttcaatacatataatacatagtgatcccactagggtaattagcatatccatcatctcaatatttatcatttctttgtgttgggaatattgaatattctcttgttatttgaaactatataatgttaactgtaggccaggcatggtggctcacgcctgtaatcccagcactttgggaggccaagacgggcggatcacgaggtcaggagatcaagaccatcctgtctaacatggtgaaaccccgtctctactaaaaaaaaaaaaaaaaaaaacttagcggggtgtggcggcatgtgcctgtagtcccagctactcaggaggctgagacaggagaatggcgtgaacccgggaggcggagcttgtagtgagccaggatgcgccactgcactccagcctgggtgacagagtgagactccgtctcaaaaaaaaaaagttaactatataatgttaacatagtcattctacagtagtacagaacactaagtcttattcttcctataaagctatatttctgtatcctttaacaaatctctacccaccccgattctccctacccgacccttcttacctctagtgtcctctcttctactttttactctttttagcttccacatatgagtgagagcatgtggtgtttaactttttgttcgcatcatccttggtgtgtttccttttaagaaagttgcttacacaataccctaaacttacaaaactaataaactggaggtgtagaaaatcatttaccttctttatggaaaaaattagtattttccccccaaaagcaggaccatttataaataggtaaagagatttacggaaagacatttaacattttttgtagctcctctgttgcagtgtgtggggcacagtttagtatttgcacatatgaatatgtggctgtgttcccagttatattgaaatattttaatatttgggaccctcttttcaaaacaaaacagcattgttatattggcgttcatttagtgcttattaaataagttttcaaaaccatagtctcttgttaataaatacatatgtagtattcattttgaggatagtgagtacttaaaattcactgtggtgctatagcatgtttttgctataaaaattaagactttgatcatttcgtggcataaaagtatagttaaatccccaattcaagattctggtacaggtctatatgtgtgtctaaatcctacatatttttaaagcatgaagcaaaacagcatcttttactgttacaaggttaatggcagactctaataaatgccatttctgtttgccttagactttagtttttatgaggattaggataaaatcagaaataatatatttaagtatagtataatctgggaggtaaaatggaagactattgttgatcttttagtctttcacttttcagatgtgtgttgattggtagcagaaagtgaaactaacttttatgttctgaatatcttttctgttagagaatatttggagaagctgctgaaaaaaatttatatctctctcagttgattatattggatacactggaaaaatgtcttgctggggtaagtaaattgatcttaagtaggcaggctttgtgaatttgatcttgagaatgatcttatgtcccaaagtacagatgtggaccaagaggacagtcctatggacttttgtctgagacatataaatatgagttttgttaatatagctgacctggtgacagacaatttttcatgagaaaattttctcatcttttgtaaattaaacagatattaagtttacttataaaatgttatgtttcagccacgtatctgtctctcaggtttttaggaaaatattttatgaagagatcactatttgatttaacggatctctcagagagttgtgggagagtgcgattcagaagtccaagagtaatcttgtatttcctcctatatgaatatgattttaatattctacttttgaaatttatgtaaatgagaacttaaaaattaaacctattaaggatagatgttaccttgagaacacttgttttatgtagacacacaaatatgcgataggtatgtggaggaggagagtaccaaacaattatttctctggtttcctgtaagttgttaccacagtgtatttcaaccatgacttaatttgaactttttcaagagtatttctattgtgtaaagaaagtatttctatacatcattatccttaattcttcctggaacatggtaagagtttatataaatatataaattaaatacctctgttttaatgatctgcctaatccatgtgtattgaaattaactcatttcttatgttctctcttcctttggctcagaattcagaattttgttttgattcagaattgcttccctcttcacatatgttgcagttctctatagtgaaactagttgaaagagaccttaatatatgaggactgatagtgtggttgagaagtgttggtggaagcattggggtagggcattgaaaaaaaaattatattgacacaactgtgtatccctagggaaggctgtaagcgaaaaaatgtaagcataatatgtatatatatttttcttttgagacagagtctcactctgcggcacaggctgaagtgcagtggcaccctctcggctcattgcaacctccacttcccgggttcaagctattctcatgcctcagcctcccaagtagctgggattacaggcatgtaccaccatgctcagctattttttttgtattttcataagccatgggggttcactatgttggtcaggctagttttgaactcctatcctcaagtgatccgcccattttagcctcccaaactcctgggattacagatgtgaaccactgtgcctgccctaagcataatattttaaattttcttattgaccgttgaccatattccaaaattgtggagacagtgtttataagttttctacttaaaatcgaaggtgagctagttgttttagcatggtattttccgttaacttgtgatatgctattgttcatgtgtaaaatggagtgaaagagcaaaagagctgttacataggatgatggaactgggaagatgggcaaattttaaacttttcttgaatcagttttttccagtggtcttattactttgactgcaaattaccagtatatcagccacacccatgactgaatggtggggcgtggggtcatatattgccttgttcagtttcacagcttttctccattaacatttgtaattgagaggtaataatgaatgtattttggagaatgattaccgatattattggcctctgtttgatttaatactctttgaagatagcctaattgaaatgctaataagtgggcctagtataacttatgtaatgcataaaatgtatattatcttgccgtgctctactgttgaaaaatgtgtatgctttttcattaaatttactatttaaaaagtaatgctatttatattattgaacaattgttttatttccttcagtgattttacagatgtttcttgattcttacttttaaatcaaagtaaattgaggcagtttaagaagaacggagctcacaagtatacgtttgttatacatagttggaatatttaagtgaaagaaaaatacttaccaatatgttatgagtgcaattttgtagaatttgaggaatcttaagtatttttgttcctgtgaatatgactattatttaaaagatttaatacttcttagatttttatttgttagagttaacatctgtattgtttggttagcctataaacaagaaataggcattgtaatgtgaattcacaggtttttgtgaagtctgtttatgtactgtccctatgtttcagtgtatttgcatctgagagtgcttggattgcagttacagaattgagcgtagcatacaattgtacacatttttgttctttgccatcttgctcagtgttattaaaattcttatccgcatgtagttatcaagactgttaggtgaaatagtaatgtggaacagcatacctacaggatagcttatccattgattgtgtgttaattgtaaagtatatatttacaaagtagagatttcactgttaacaccgaagttatcaaacttggtgtcaataacaggaccacctggccttatgttctcatggtgtgatgtaatataacctatagtgaatcccctaaactgtttaacctcaatctaatcagaccattaggtttaaattttagcttacagaaaatatacaggccgggcaccatggctcacgcctggaatcccagcactttgggagatcgagacaggcggagagcttgaggtcaggaatccaagaccagcctggccaacatggcaaaaccccatatctgctaaaaatacaaaaattagccagatgtggtggcacatgtctgtagtcccagctacttgggaggctgaggcaggagaaccacttgaaaccaggaggcagaggttggagtgagccaagattgcgccactgcactccagcctgggccacagagcgagactccatctcaaaaaaaaaaaaaaaaaaaaaagaacgaaaatatacaatacagtaactagaagagcaaatcaacctatgtcactggaaaataattaaatcaaggatatggaacattctgtaaggcagctggcccacttaaagtcatgggaaataagagtggtgaatatgggccaggcgtagtggctcacgcctgtaatcccagcactttgggaggccgaggagggcggatcacttgaggtcaggagttcgagaccagcctagccaacatggcaaaaccccgtctctactaaaaatacaaaaattagctgggcatggtggcgggcgcctgtaatcccagctattagggaggctgaggcaggagaattgctttaaccctggaggtggaagttgcagtgagctgagattgcgcccttgcatagaatagtgaaactaaggaaacatcatgttgtaatcggtgaacttttttggatccttattgaataaaaatgcctatgaaagacattttgggggcagtggtgaaatttgaattcagacttggtattagatgatacaagggaattgtttatttttccttggtgtgttaattgtattgaagttacattagagaaaattcttttaagagatgccaaggcacatggggtgaagtattctatttataatttactttgaaaagatttcaaccaaaataaaattactttgagtaggtagtgtctgttttggtcagtctgcacaaaagcaagtgtgatggctcacccaggaatttacttaaatgtcaagacagatgacacaatgcactcatcaatcaatatgaattaagtcgattctgtaattgtagaactcacagcaaactggggattcccagggaagggctcgtttggtgaacaagagagcaagcaggaatgggaggactggtaaggatggcagggggattgaactttaattgtgattatggggtcagagatggaaccatcctctttattaaactatctatagacagatgtagcaaatatgatgaaacgttaacagttgttaaatctaggtggtgtgtatgtaaggtgttcattatttttgttctgtgtgtgtgtttgaaaattttcataatagaaaatgtttacaggtaaaattaaagtttagaataatgtgattatttctattttagcaaccaaaggacacaatgagattagatgaaacgatgctggtcaaacagttgctgccagaaatctgccattttcttcacacctgtcgtgaaggaaaccagcatgcagctgaacttcggaattctgcctctggggttttattttctctcagctgcaacaacttcaatgcagtctttagtcgcatttctaccaggttagtgtgtaaatccacatgggactactgaagtaatatgaatattagaagttttgttttttgtctacataaaaataaaaagttaatggaaatgaggtttttttgtttttgagacaagttcttttgcccctcacagcagctttgacctcccaggcttaggtgatcctcctacctcagcctccagagaaatgagtttgtctgggcttgcgtagaaattttatgcattaatatctttgacattttaattgcgtaatattgtgatattgatatgtgcaattaaataagagcactgttatgaatgtgaaagtctaaatttcagataaaaatatctgccgtgagcaggctttaaaaaacaatactaggtatgaacttttggtttggctttttaaacatattatccctttaaatgaaactacccaattagatggaataattaatgagagtagtcagaattcaaatactttcacaactctaccctttatcacaagattttaggttaccaaaaaacaaaacaaaaacaaaaacaaaaaaacctaagtgatgtgaaaacacaaggaggtgaataattgcaaagtagaattctccagaaagtggactacattttaaatgtatgtaaaatactgccatttattgagtatttatagcatttcctttgctgtctcatcctcacagtaaccttgatgatacttccctcattttacaggtgagcaaactaatactcaaaaaagttcaggtgatgtgccaaataatggaggacccaaaatttctaagtcaggctggcttcagaatttatattagtttcactataccagattgcttccctatctattttagccacattttgatgaaatctgttttataaaatatacttctgtttttaaagatgtatcaaaaatataatttaagcttttattgatgactcaaaatcatcctgagcattagttgtgatatgctacctacaggtggagaaattagtataggtagtgctctatgggatagaattataagtgacagtagcaagtagctgcaaattgttgttatgcacatgatttgcctttctaaggcaagtaaagtcagatgggttattaacttaattagaaactatagcacaaattatttagtgattcgtgaatcgaagactaataccgaatagagaaaaacaatcctctttgttggtgcctgcatctttggctcgtcagtgttgtacgaacagtggactttgattattcagatttactgattcctttgttgttttccagcaggtgtgaaagacaacatacatcaccatttgagaatttgtgttacggttttttgggggaattgattaacttcagagtcctgcaatctttttaatcaacaatgacatttctataattaagatcctaggcagcaatatttttcaacctcaatgcaattcttgatccaaagaaaattaaagttttatttaatggtatattattgataatcttgggtaatatttacatgatagaaaaatgttttcatgaaatcttttgagcagtaacgttttatattatgaataataatacagtggttgagtcagcaaggtaacaaacacctagagagtaggagggtggaaaattgtatttaataaaaaacgcaaacccttttcatttaggtgactgctaggccggccttactatttgaaacacctgttaaattaaaggtagaaagtggtacaaaaaaacccaaatgtcttgtagtctatcaatgcatgaactgccttatagaacacaacaaatgtgccaccttggaaaattctagaaaatttctagtcaccaaaggttttactttatgggattttgcagcattagcacatgtaaaaataagcaacttttgtttatttcctgaatctagttcactgttgccagaatagaaaccaagtgtctaaaattttattagctttcagaggacagaccactcagaaatggcatctgtgaaataacattgtttcagacaactgcattttcagttccatttagcttgtgtcagaaataggagctgatcttactgaaggatcactcacctaaaagaccattatgatggtttagtttaggttggaacatcttatgctgtcatcgtcatagtattaggtgacttaaaatatgtgtgtggcttgaatggtagttctttctaaagattgatcttatgttttatatataatagatgaatcagtatcatgaagatgtttcgtgtttgtccattctccccgtcaatgtttctcctttaagattaagatttggtttttatatttctgacctttacttttctttaggggaagataggctatagatttatttattttatgtttttgagacacagtctctctctgtcacctagtctggagtgcagtgatgtgaacatgtctcactgcagcctcgacctcctgggctcaagagatcctcccacctcagcctcttgagtagctgggactacaggcacgtgccaccatgcccggctagtttctttaatttttttgtagagacggggtcttgccatgttgcccaggcttgtcttgaacccctgggctcaagggatcctcctgccttggcctcccaaagtgttgggattacaggatgtgagctaccatgcctggctggctataaatcttaagatagctttatttttctctgggagtataccattttctgtggcttatagtatttatgtagcggagtaactgctttctccacagaattactccacaaatgcagttgatctagttgttttgtagtgagaaggtgcttcagaatatctcatttgatataccaccagaagcagaaaactcaatgactttaaaagtcatttggttctttacagtttactatttggttccatacaaatctgttcgttatggtttcttactctttttttaaaaatagttttcagtttttttatatgtctctgatcatttaaaacgtattttacgttctctttagtattgtttaatattgatttgtttgtgctgattcattcatagtgaattgtttcatctcagttttggaatccttgattgcaaagttatctttagtgtggcctgtattttctttgagaatccttgtagccttgggctgagggagtgttctagtgatggttttgcatttgcatttgccaggtgcccagttctggagctatttttttcttaatttctcagtcccagcctgtatgggcagtataaatttgaaccctaaactcttagaaggtaaacagctctaggtgacttttttcactttatccaaagtttaggcagagcagttaagcttctttgtgctggtaggtttttttctttttttctttttgtggggagtgggggcggcagggggagtgcattgttctttctagttcatgttttatgcagggcccaagttagaatcctgaattattagggtacaaggcgtttatatccagtctccatgtggatgttaagccccaagctcctaggttaaggagatcaaaaacctcactcatctttcctttgttgcagggctgggtcatgtacttgtgcacttaactctctggttttcagttttcttcttcttttctggacctatacatttaaaatatctttcagtatgcctagactttctagctgttttagtgataggttttctactgttcatttcttttgctcagactacgctttatttgatttctctgcttcggaaatgatgtttaaccttcacaaaatacctgctctctataagggtaccagactataaaagggacaaaatttttctcccatttttcacaaacaaccacaagagtcaacttttcagaagttggtattgctgatctatgatgttgtgttttctgaggagccgtactccatatttctacgctctttgcagcagctgtggaatttttagcattgaggacaacctcattcccagcttgaaatgctgagcttttcttaccctgatgataggaagagagttcatgtaagtgcttagaatagttgtactgttagctgtagtctaattaaagctaaagtgagtgaaacgagaatttgagaaggaagaataggattgattacattcttatcaactgaaggtttagtgtgatgattaataactcctttgcaaattgcactaaatgattgaaattcaagttaatacatataaattataagaccatatagtatttgtgccttttcaccatatctctattgctgcatttataaaagtttacaatttaattgtgctgcttatattttttatgtctattaatatgaataatgagtatgcctcattaggtagcatgatttaatagattagcaataccaacttttgaaaatctgagtgctgtggttgttggtgtaaaatggaagaaaagtttaatgccttttattaacatttaggctaagtgaatttcttttatcagtttaaaaatatctacatatttgttaagtgttaaatgtttctacgtttgtgataacttcatattcaacataggagaagctggggtttaaacagatattcctgtccttataagcttatgttctgtgaagtagggatattaagcaaataattacataaatacatgtacaaactgtgaaaagtgcaatgaaaaaaggcttactcggttttcaaatacaaagtaaatgtaccctgtgaatataaagtttcattcgtgtttcaaaaatctagttgataaaagtagaagttagtaaaatcaagtttacttattatagttttagtcttaattcaaattatacttttacttgtaattggaaatatgaatttttaaaactattcattgtggaaaaatggaaaaatacacatagaatagtacttcaaatccccatgcatctcttactctgctttaactgtttctggcatgctatggtttctcttcttcccttttcagtaatttaaagcaaaccccagacatcatttcacctgtaaatatttcagtatatatctctaataaatagatttttaagcatttaactataatattgtcatacctatcaagaatcataattccttaatatcatgcattgccaaatttgtgggttttttcattatctcagaaatggcttttttgttttgttcaaattaagatacaaataggatgcgtactttggaattggttgatatttctcctgagcctctgttaatcagtatcatttcttcatttcttcaccttgctctccattttttcccatgctgtttatttgttggactgcgttatttgcctttctacattctgtatttgggtttcattggattcacgttcatttggctggggggggacaagaatactttactgatgatgctatgtggttcctaatgaatcacatcaggaaacatgtcctattattgacttttaatgttatgatcagtgattggatttcgatgttatcagcattatgtattcattatacagtttcccataaatttttcctaatgtttttagtaatcactgatgatcactgcctggattccacttcattgggggctgcaaaatgaaacgttttctattctgtcattcattctttattttaaaattgtgacttctatgaaagatttttgcttcattgtgtgtttagttatcttgcaatacagtccatgtagggaatgcaggatacagacttgacttccattattcgttatcagaatgagttggtaccctaacagttgcgaaaggttacccatgaagttttttctttcaatattataacaggcttgtgtgttttaatttattgtatgtgtttccattgtagacataattcttttgatcctcagattatcccatttttgacagttgagatgcctaaagtgcatacctgtgtgatatttgacatggttctgatagttgttgatagtttcctgttttcaagcccaaggtgacctgccctcaccttgtatatctcttgcccccatcctggaattaactaattttcccaaagaaccctggccgaaagtcggcaatatttagacacctcaatcttaaggataaggatgctacgatgctacgtttactgaattatcatggtttcttttatcatatcccttgtttgttatgttcctttaggtttttataagaaatatttattgccttatttttatatatgtctttactcttatgaactcatctttgggggaagaatctgttgaattcagaatttagggatacccgaagactttttttgtttttgttttttttaagagatagggcccactctgttactcaggctgaagtacagtggtgtgatcacagctcattgcagcttcaaacttctaggctcaagagatcctcctcccttagcctcctgagtagctgggcctataggtgtgtgccatcatgcccagctaatttttgtattttttttagagatgatgtcttgctatgttgcccaggctggtcttgaactcctggcctcaagtggtcctcctgccttggcctcctgaagtgctgggattacaggtgtgagataccacacctgtcccctaatacttaatttgataagttaattttggtttttactttttaggttacaggaattaactgtttgttcagaagacaatgttgatgttcatgatatagaattgttacagtatatcaatgtggattgtgcaaaattaaaacgactcctgaagggtaagtttaaatgtataatatatctgaaaaaaatcactgggtcaaaaactagtatcatgaatgtactaattatattaattgtgctgaactagaacaccaaactggattttataatgacatttccttgtgaaataaccagtaatacaaatgggtaattatttttcaatctttgaaaataatgcagtagagaaaatgagcattttaaatcttggcaatggaaagttttgcttaactacaatttttgttttcaatacagagaatgcaagggtgctattatttcatttttctggaatttgatctctcaagggtggctataggttatagaagctatctgtttagctattgtagcactttacaaagattgtctgtagtaggatatcaaagttttattgcagaatggaacgaggagattgtgatgttatggtgagaggatgaattgagccagagatttcatttctgacatttctgttttcagctctctactgactgactttatagcattacaaagtcccttaaccttccattgccggttttgtctccttgtagaacatgtcagtagtagttccacatggggatattataacacctaatatgtgactttaaagcttgggaagtactttacatgattatgtggattgaaataaacgatcagaaggaattgagatatgttctgtagtaagcagtgatgtgttaatgtaaatcagataccaatgagtattcataaactgagtatgatctgaaggaattgagataaattctgtggtaagcagtgatgtattcatgtaaatcagatatcaatgaatattcataaactgagtatgaatatctaaatttcattttacaaaaaaatgttttttagtttttggcattattagaccctggctaatttagatatgaaaccgtatacagttcacacatatttttatttgtaacttaaggaattgtcaaacaataatatttttaatatctgacctaaaacagattgaattatattagcttcagaaacatcagttctgcaatgtagttttcaaaatacgtgtttttgttttcttaatatttcctttaaactcaataactatctcaccagagatgtaaaaaggcaatacctatataaaggaataatataaagctgtgttctattcatattacccttgttcataatttatgattttaggtcattaccattgtgaaaccaagcaacaattaattcagtaactttaataaaggaaaatataggggtgattttagctgttatgccaagatacaaacatgtggacagcaattattttagattataataaaccaccattgaattaatagttgagatttgcaagattttgatatctattattaagcgttgagcagttgagaaactgaatggtaaaatttagagatctctatgaattaaagttaagaagtattagtgggattttatgatttttcataactattcagtgatgttttggaaacaagtctagtccaggttgcctgtgaatagctgtttaaaacaatagaaatgttcaatccgtaataattaactgaaatgtctcttctgtccaaataagagaaactaattgaatgtgtggataaatgactttcttttatactgaagtaactttcccatcgaatgcggctccctcatgaacataaatttagagtatatgctgataaatatataaagtataaaaccgatattaaataggccagcaaaatatggctcttggtgacagtggtaaaaggaatgcaccctttcagtaatgagtagtaaaggtagtaatgtgttttaaatacaactcaacaagcctttgttgagaaactatgtataagaagccatgctaagtgctgggattacaaaaattaataaaatatggaatctgtccctaaggagctcatggcatggtttatgagacaagtgatgtcattatcaagttatttgcagaaaaaaactatgataaactcaaatagggtgagtgtaaagtgagagaggaagtatatatttgtttgaggggatgagagatgagcaagatgtgaaggtacaagaataggtcagatcattttaataaaaatatggccaggcctggtggctcacacatgtaatccccacactttggggaagccgaggcaggaggattgcttgagccagggcaacatagagagacccccatatatacaaaaaaaaattagctgggtgtgctgacacgcacctgtagtcccagctacttgggaggctgaggtgggaggatcacttgagcccaggaagaggttgaggttgcagtaagctgtgattgtgccactgcattccagcctgggtaacagagtgagatcctgtctctgtctgtctctctgtctctctgtctctctctctctctctctctttctctctttctctcgatatacctatctgtatatagatatatcaatcgatatgtgtatatccagatctgtctatagatatatctgtatcttgatagatatatcgagagagagagagaaacatttgttatattttcagtctgcaccgggccttgcgctatgcagtttgcatgccttttctcatcaattcttacaataaccctgtgacgcaatactagtattaatattatcatctcttgtgtagatgaggaaactgaggcctcagtaaattttcaaagtcacagagctagtaattgttcagtaaagattgagttcacatctgctcgtctctagaacctagatacttgactgctgcactgttgtgcttatgagttacgaagctttattttagtggccctgggaagtgatagaaaggctttgaggtagagaataccttaatcagtattttattttagatatacccctttgcttgaaatttgcaggatggcttggtagagggttacctgaacttctgggacttggttatgcagtaatataagtgaaaaataatgagagttgtggagatccagatgatggattggggtagggtaaggatggggaccagtttgataggtatttaaagaagtggaggctgggcgcagtggctcacacctgtaatcccagcactttgttaggctaaggtgggcggatcactgaggttaggagttcgagaccagcctggccaacatggggaaactccgtctccattaaaaatacaaaaaatgggctgggcgcggtggctcacgcctgtaatcccagcactttgggaggctgaggcaggtggatcacgaggtcaggagaccatcctggctaacacggtgaaacactgtctctactagaaatacaaaaaattagccagtcgtagtggtgggcgcctgtagtcccagcttcttgggaggctgaggcaggagaatggcatgaacccgggaggcagagcttgcagtgagccgagattgtgccactgcactccagcctgggcaacagagtgatactccgtctctaaataaataaataaaataaaataaaaatacaaaaaattagccgggtgtggtggcacgtgcccataatcccagctactcgggtggccgaggcacagcagaatcgcttgagcctgggagatggaggttgtagtgagccgagatcacgccattgcactccagcttggacaacaagaccgaaactccatctaaaaaaaaaaaaaaagaaatggaatacatagcatttgatagtcaatttagatatatgaggttagagagatatcaccaaatattacagaataagctggttagagcagaaaagggaaggaaaggttgatggcagaagagagggtttgaccaggaaaatgataaattcagttttagatcttctgagtttgaggtatcagtaggatgtccaacaagaaacttgtagaactgaaagatactttggctttgagagtagattatggtatataacacatttaagatgtcataaaggtaaagttgttgctaaagagcactgtgaagagtaatgtcattatttggaaatcagtggagggtgagagcaaagagaattcaaaggggtacttttaaaaactgatttggagagttacttatttgcaagtccagaaaaaagactcatctctctcttagacacttacatagatgtaataaaaacctttatcccttcattaaaagtcaacaggagaagttctttgccgagggaccattgccagtaaaatcgcttatagacaggtcattttttccaaacataaatctttttctagatgtggacaataaacttaaagaagaagaaattaaaatacccaatatatttatatggagaaatgtttactgttacttgcgttaaaatgcagtctactattttgaacactccaattagcaaaataaagaaaatgaacatacttttatgatgacaaagataggatgaaggcactttcgtatgctgcttggtgatagcagcatttggcccaaccctagtgaaaggcagcttggtaatctttatcaagggccctaaaaatattcatctctttgactggacacttctagagattccttatcttaaataagcagtgatgtgggaaaagatgttgatatgaaaatatttgttaatgttatttataatagtgaaataacagaaataacctcagtgttaaaactggaaaacattaaataaccagtcacttaatacagtgacttaaatattatgaggggcatcaaagcatactgaaaagaccttggttttaaagcccaattcaatcatttattagatctgtaaccttagacacacagtttgttcatctgtaatactctgaaaacattaagattcaaaaagaattaagtgtatcatactaaaaatacatgatatgttttaatagtttgtgtaatagttactattgcatatagagccatcaaaaataggccaggcacagtggctcacacctgtaatcccagcactttgggaggcctacgtgggcggatcatgaggtcaggagttcgagaccagcctgacgaacatggtgaaaccccatctctactaaaaatacaaaaattagctgggtgtagtggcgcacgcctgtaatcccagctactggggaggctgaagcaggagaatcgcttgaacctgggagacggaggttgcgtgagccaaaattgtgccattgcactccagcctgagcgacagagcaagactccatctcaaaaaaaaaaaaaaaaaaaaaaaaagagtttttactgatacagaaataattagggatactatggaaaagaacaggtttgatacagcttatatgatctcagttatgttaaatatatttgttttctacatgcataggaaaagtggtagaagtaaaaccaccagatgttaactgtgattgtctctgaatgatagaatcattgatggttttaaaaatttcccataaacacctgtgcttttgctttttttttttttttttttttttggacagagtcttgctctgtcgctcaggctggcatgcagtgacatgattatagtacactgtagccttgaaatcctgggctcaagctatcttcccactcctgctttcgaaagtgctgagattataggcgtgagccatcgggcctggccctgtatatgttttccaaattttttaattatactttaagttctggggtacatgtgtagaacatgcaggtttgttacataggtgtccatgtgccatggtggtttgctgcacccatcaacgcatcatctaccttaggtatttttcctaatgctatcccttacctcagcccccaccccccgacaggcaccgatgcgtgatggtcctctccctgtgtacatgtgttcttatggttcatctcccacttatgagtgagaacatgtggtgtttggttttctgttcttgtgtttgctgaaaatgatggtttccagcttcatccatgtccctgcaaaggacgggaacttatccttttctatgtcagcatagtattctgtggtgtatatgtgccacattttctttatccagtctatcattgatgggcatttggattggttccaagtctttgctgttgtgaacagtgctgcagtaaacatacgtgtgcatgtgtctttatagcagaatgatttgtaatcctttgggtatatacccagtaatgggatggctgggtcaaatggtatttctagttctagatccttgaggaatcgccacactgtcttccacaatggttgaactaatttacactcccaccaacagtgtaaaagtgttcctatttctccacattctctccagcatcttttctttcctgactttttaatgatcgccattcttactggcgtgagatggtatctcattgtggttttgatttgcatttctgtaatgaccagtgataatgagcttttctttatatgtttgttgtcttcttttgagaagtgtctgttcatatccttcatctactttttaatggggttgtttgtgtttttcttgtaaatttaagttctttgtaggttctggttattagccctttgtcagatgggtagattgcaaaaattttctcccattctgtaggttgcctgttcactccgatggtagtttcttttgctatgcagaagctctttagtttaattagatcccatttgtcaattttggcatttgttgtcattgcttttggtgtttcagtcatgaagtctttccccatgcctatgtcctgaatggtattgcctaggtttctttctagggtttttatggttttaggtcttatgtttaagtctttaatctatcttgagttaattattgtataaggtgtaaggaaagggtccagtttcagttttctgcatatggctagccagttttgccagtaccatttattaaatagggaatcctttccccattgcttgtttttgtcaggtttgtcaaagatcagatggttgtagatgtgtggtgttatttctgaggcctctgttctgttccattggtctatgtatctgttttggtaccagtaccatgctgttttggttactgtagccttgtatagtttgaagtcaggtagtgtgattcctccagctttgttctttttgcttaggattgtcgtggttatgcgggctcttttctggtttcatatgaaatttaaagtagttttttctaattctgtgaagaaagtcagtggtagtttgatggggatagcattgaatctataaattgctttgggcagtacggccattttcacgatattgattcttcctatcgatgagcatggaatgtttttccgtttgtttgtgtcctctctggctggcatctggcaggtgcccctctgggacaaagcttccagaggtaggaacacgcagcaatctttgttgttccgcagcctctgctggtgatactctggcaaacagggtctggagtggacctccagcaaactccagcagacctgcagcagagggttctgcctgttagaaggaaaactaagaaaggaatagtatcatcatcaacatcaaagaccaaaggtagataaatccacaaaaatgggaagaaaccagtgcaaaaaggctgaaaaaaaaacgagcacgcctcttctcctccaaaggatcacaactccttaccagcaaaggaacgaaactggacaaagaatgagtttgacaaattgacagaagtaggcttcagaagatgggtaataacaaactcctccaagctaaaagagcatgttctaacccaatgcaaggaagctaagaacctggaaaaaaggttagacgaattgctgactagaataaccatcttagagaagaacataaatgacctgatggagctgaaaaatacagcatgagaacttcgtgaagcatacacaagtatcaatagccaaatcaatcaagcagaagaaaggatatcagagattgaagatcaactcaatgaaataaagcgagaagacaagattagagaaaaaagagtgaaaagaaatgaacaaagcctccaagaaatatgggactatgtgaaaagaccaaatctacatttggttagtgtacctgaaagtgatggggaggatggaaaaagttggaaaacactcttcaggatattagcaggagaacttccccaacctagcaaggcaggccaacattcaaattcaggaaatacagagaacactacaaagataatcctcgagaagagcaaccccaagacatataatcgtcagattcaccaaggttgaaatgaaggaaaaaatattaagggcagccagagagaaaggtcgggttacccacaaagggaagcccatcagactgacagcagatctctaggcagaaaccctacaagccagaatagagtgggggccaatattcaacattcttaaagaaaagaattttcatcacagaatttcatatccaggcaaactaagcttcataagcgaaggagaaataaaatactttacagacaagcaaatgctgagagattttgtcaccaccaggcctgccttacaagagctcctgaaggaagcactaagcatggaaaggaacaactggtaccaaccactgcaaaaacataacaaattgtaaagaccatctatgctgtgaagaaactgcatcaactaatgggctaaataaccagctagcatcataataacaaattcacacataacactattaaccttaaatgtaaacgggctaaatgccccaattaaaagacacagactggcaaattggataaagagtcaagacccatcactgtgctgtattcaggagacccatctcacatgcaaagttacacataggctcaaaataaagggttggaggaagatttaccaagcaaatggaaagcaaaaaaaagtagggttgcaatcctagtctctgataaaacagactttaaaccaacaaaaaagatcaaaagagtcaaagaagggtattacataatggtaaagagatcagtgcaacaacaagagctaactaccctaaatatatatgcacccaatacaggaacacccagattcataaagcaagtccttagagacctacaaagagacttagactcccacacaataataatgggagactttaacaccccactgtcaacattagacagatcaacgagacagaaagttaacaaggatatccaggagttgaactcagccctgcaccaagtggacctaatagacatctgcagaactctccaccccaaatcaacagaatgtatattcttctcagcaccacattgcacttattccaaaattgaccacataattggaatacaacactcctcagcaaatgccaaagaatggaaatcataacaaagactctcagaccacagtgcaatcaaactagaactcaggattaaggaactcactctaaaccacacaactacatggaaactgaacaacctgctcctgaatgactactgggaagataacaaaatgaaggcagaaataaagatgttctttgaaaccaatgagaaaaatacacaacgtaccaaaacctctgggatacatttatagcagtgtgtagagggaaatttatagcactaaatgcccacaagataaagcaggaaagatctaaaattgacaccctaacatcacaattaaaagaactagagaagcaagagcaaacaaattcaaaagctagcagaggacaagaaataactaagatcagagcagaactgaaggagatagagacacgaaaaacctttcaaaaaatcaatgagtctcctgacctcgtgatccgccgccttggcctcagtgaaaccccatctctactaaaaatacaaaaaaattagccgggcatggtggcaggcacctgtagtcccagctactcgggagcctgaggcaggagaatggcgtgcacccgggaggcagagcttgcagtgagccaggatcgtgcaactgcactccaacctgggcgacagagcaagactctgtttaaaaaaaaaaaaaaatcaatgaatccaggagctggttttttgaaaagatcaacaaaataaatagaccactagccagactcataaagaagaaagagaggagaatcaaatagacgcaataaaaaatgataaaagggatatcaccaccgatcccacagaaatacaaactaccatcagagaatactataaacacctctgtgcaaataaactagaaaatctagcagtaatggataaattcctggacacatacaccctcccaagactaaaccaggaagaagtcgaatccctgaatagaccaataacaagttctgaaattgaggcaataattaatagcctaccaaccaaaaaaagtccaggaccagatggattcacagccagattcagctagaggaggagctggtaccattccttctgaaactatttcaaacaatagaaaaagagtgaatcctccctaactcattttatgaggccagcatcatggtcataccaaaacctggcagagacacaacaacaagagaaaattttaggctgatatccctgatgaacatcgatgcaaaaatcctcaataaaataatggcaaactgaatccaacaagcacatcaaaaagcttgtccaccatgatcaagttggcttcatccctgggatgcaaggctggtttcaacatatgcaaatcaatgaaagtaatccatcacgtaaacagaaccaatgacaaaaaccacatgattatctcaatagatacagaaaaggcctttgatgaaattcaacagcccttcatgccaaagactctgaataaactagggattgatcaaacatatctcaaaataataagagctatttatgacaaacccacagccaatatcatactgaatgggcaaaaactggaaggattccctttgaaaactggcacaagacaaggatgccctctctcaccactcctattcaaactaatattggaagttctggccagggcaatcaggcaagagaaagaaataaagggtattcggttaggaaaagagaaagtcaaattgcctctgtttgcagatgacatggttgtatgtttagaaaaccccatcgtctcagcccaaaatctccttaagctgataagcaacttcagcaaagtctcaggatacaaaatcaatgtgcaaaaatcacaagcattcctatacaccaataacagacaaacagagagccaaatcatgagtgaactcccattcacaactgctacaaagagaataaaatacctaggaatccaacttacaagggatgtgaaggacctcttcaaggagaactacaaaccactgctctaggaaataagagaggacacaaatggaaaacaattccatgctcatggataggaggaaccaatatcctgtatgtgttttatacttttttttgaaaaagcaagttattaaaagaaaaagctcacaatcattgatgtccaaggcatatttgctgtttatggaatttttctttcctagcagacaactatcgagttttgggtttatgttaggtgtctttacctttcattgcttacagataatattggagcaaaagtaatacgtaaatggaaagttattttgctctgagttgtatttgtgttaacttattctagagttaatttttaaaaattgtgttttttccagaaacagcatttaaatttaaagccctaaagaaggttgcgcagttagcagttataaatagcctggaaaaggtaagttacaacctctctggtattaaaattttgtttttgatgtaaaatttgctgttgttagcatcctgaatcaaaaagttatgacttgagtgatagtttcacattcattttcaggaagaatacattgtaatattattatgaaggaagttagaagtttgtgacattttatttactgtattacaaaaaatcactgtaaagacatgtggttctttatttataggcattttggaactgggtagaaaattatccagatgaatttacaaaactgtaccagatcccacagactgatatggctggtaaggatacgattgattttttttttttttttgtcttttaaatgcctacttgtgacataaaaacctatcatcgttttccaagttatttttgttataaaggtgcttttacatcttctattgtcaactggtgtcaaataggaaatactgtttttctcttacatttctaaattaggcccaaccctcttcctttccttggagcaaacaaagtagtttgaaatgaaggtcagatctttagagctgtgataggatggggtgtttggctctttgttgtagagaagcatgtgctctgaagctttattttgtatttagggagatgtgtataaagtagtaatattctcacctataatgtaagacacaactgcaaggcagagaatacagactcctggagaactttggtaattctttttgggaagctgttcagtctttgttgcttgggtacatcacactttgcataaggcccttcacagtgagactgaatacatgatcatccattctaaaatgtgagcttttccaggatagatcaagatagctcttctaacacatagacagtattacattgcttgtctacttaccagaatgcatttgtgtagttgcttaaatgaagttccatgtttatcttttaaaaatgttgcccttgggtttttacatagtgtcagcttttactttaatgccagggattttgttcctatctaataatgtcatttaatatatttttcatgcagaatgtgcagaaaagctatttgacttggtggatggttttgctgaaagcaccaaacgtaaagcagcagtttggccactacaaatcattctccttatcttgtgtccagaaataatccaggatatatccaaagacgtggttgatgaaaacaacatgaataaggtaaggagggcaaaattatttccattatatctagatgtgaagcagtttattttactcaaggtgtgtattactttaggcttattatttaagcaaagtatttcagggaaccatttaaatgatcattttaggtttctttgtttgatggacttagaagagacatactcatacataattttatttggcagagggaaaataataccaggcaatgaacaaagatttaaaataatcccttagtttcattcttttgtctgagaagactaaacgatacctctgttattattaaacgtagtttctctaatattcactacaaggattgccctacttgagttcatcacttttatagtgtgttatttgcatgtacttagggtatgtgtccatatagtgctactgaaattatctagtaactcattttaagtattttagaacagttttcaaagaattttgccaggaaggtaaggctctcgcatataccatctatagtgaaattggcaccatgacaactggtaattctaggaggctcttaaaatttttttaaatatcacctaggtgattgaaaaaaaaaagaactgagtattaatcctagggttttactgaaatttcaatatgcagtttgttttgcaaatattttttttttcattttttgctgcttttggagaaatactcttagctggctgaacatgagatggtttccttcatggtttgcctgtagatggagatgttcagaatcagctgaatgatttattactttgtagaagtattggaccgggaatttatacattaaagggtaaataaatgaaccaggtaatccttgagagtctgtgattgcgtgttactccacttaggtgtatatctcaacttttccattatgaggacaccatttttcatggtagattgttttggagcccttcaaaatagtaggtttgatgataaatactgagtgtcaacttgattggattgaaggatacaaagtattgatcctgggtgtatctgtgaagttgttgccaaaggagattaacatttgagtcagtgggctgggaaaggcagacccacccttaatctgggtggtgcaccatctaatcagctgccagcatggctggagtataagcaggcagaaaaatgtgaaaagagagacgggcctagcctcccagcctacatctttctcctgtgttggatgcttcctgccctcgaacatcagactccaagttctttagttttggaacttggactggctcttcttgcctcttagcctgcagacggcctattgtgggaccttgtgatcgtgctagttaatagttaatatcccctttatataaatattctattacttctgtccctctagagaaccctaatagagattttggtacaaggagtgtggttctagaggaacggagtattaaggatggagtttcttagtttgtttgggggtttctggagtttgctgcttaatatgattagaccctaaaatattaaggactctacttctaatattgtggagaacactgatagtcgttgctgtgaactgtttagagagtttgcaaaataaatgcatttgacactcctgattcaccgctaatgagaggcaaggagtttagtgaccctatacataataatacctttgaccatatatggagaaccaaggaacataatgaagctggttggttgctcctaaattcagtggacaaagtggtgaaagaaaatgatgggccgggcgcggtggctcacgcctgtaatcccagcactttgggaggccgaggcgggcggatcacgaggtcaggagatcgagaccatcctggctaacacggtgaaaccctgtctctactaaaaatacaaaaaattagccgggcgaggtggcgggcgcctgtagtcccagctactccggaggctgaggcaggagaatggcgtgaaccccagggggcggagcctgcagtgagccgagattgcgccactgcactccagcctgggcgacagcgagactccgtctcaaaaaaaaaaaataaaaaaaaaaaataaaaaaataaaatagaaaatgatgagctcagggattctgtctcctgtcttcagaagcagatactgagcctcaaatctgctaagattgacctgagtgagacccttatctcctgtagaaaaagagctgaaattgtgaaaaaacaaacacaaactcttatcatgcaagtggctgacctgcaacaaaaggtgcatgtacagcctaaccaggtgtctactgttaaagtgtgggcattgattggaaaagaatgggaccctgcaacttggaaagggcatgtgtgggaggaccctgatgaagctggggactctgagtttgtaaactctgatgaaccttttttgccagaagaaacagcttccccatccccagtagtggcaacatcccctccctgagccatgctgccatcagcctttccacttttgtctgaagagataaaccctgcgctgcctgaggcaacaggaatggcctcccctgaggcagttgccaggcaagataatgttgattctcctcagaagccacccccaacacccctgtttgcttctagacctataaccagactaaagtcctagcaggtccctagaggtgaggctgagagtgtgacccatgaggaggtgcgctacactcgtaaagaactgcttgagttttctaatttatataaacaaatcttacttggagagaccttggtcatgtttcacttccacaacatatgacactggtctattacattaatgatattatgctgattggattctgtgagcaagaagtagcaaacgcactggacttattggtgagacgtttgggtgccagaggatgggaaataaatccgagtaaaacttagggaccttctacctcagtaaaatttctagggcttcaggggtgtggggcctgtcaagatattctttctaaggtgaagaatattgctgcatttggcccctcctacaaaaaagaaagaggcacaatgcctagtgggcctacttggattttggaggcaccattcctcatttaggtgtgttactctggcccatttatccagtgacccaaagaactgccagttttgagtggggtccagaacaggagaaggctctgcaacaggtccaggctgctgtgcaagctgctctgccacttgggccatatgacccaacagatccaatggtgcttgaagtgtcagtggcagataaggatgctgtttcgagcctttggcaggcccccataggtaaatcacagcggaggcctctaggattttggagcaaggccctgccatcttctgcagataactactctccttttgagatacagctcttgacctgttactgggctttggtggaaacggaatgtttaactgtgggtcttcaagtcaccttgtgacctgaactgcctatctatgaactgggtgtgttctgacccatctagccgtaaagtgggtcgtgcacagcagcattccatcatcaagtggaagtggtacatacacgatcgggctcaagcaggtcctgaaggcacaagtaagttacatgaggaagtggctcaaatgcccatggtctccactcatgccaccgtaccttctctctccccacctatactgatagcctcatagggagttccctatgatcagttggcagaggaagagaagactagggcctggttcgcagatggttctgcacaatatgcaggcaccacctgaaagtggacagctgcagcactacagcccctttctaggacatccctgaagcatagtggtgaaggggaatcttcccagtgggcagaactttgagcagtgcacgtggttgtgtactttgcgtggaaggagaaatggccagatgtgcgattatatactgattcatgggctggagccagtggtttggctggatggtcagggacttggaagaagcatgattggaaaattggtgacaaagagatttgaggaagaggtatgtggatagacctctctgagtggttaaaaactgtgatgtttgtatctcatgtgagtgctcaccaacaggtgacctcagcagagaaggattttaataatcaagtggatagcgtgacctgttctgtggatgccacttagcctctttccccagctacccctctcctcgcccaatgggcccatgaacaaagtggccatggtggcagggatggaagttatgcatgggcttagcaacgtggacttcactcaccaaggctgacttggctatggccactgctgagtgtccaatttgccagcagcagagaccaacactgagcccttgatatgacatcattcctcagggtgatcagccagctaccttgttgattatattggacctcttccatcacggaaagggcagagatttgtcctcactggaatagacacttactcctgatatgggtttgcctatcctgtatgcaatgcttctgccaagattaccatgcatgggctcaccaaaggccttacccaccatcatggtattccacacagcattgcctctgaccaaggcactcactttacagctaaagaagtgtgccagtgggctcatgctcatggaattcactgtttttgtttgtttgttttttgagatggagtgttgctctgttgccaggctggagtgcagtggcgcgatctcggctcactgcaacctctgcctcccaggttcaagcgattctcctgcctcagccttccgagtacctgggactataggtgtgcgccaccacgcccagctaatttttgtatttttagtagtgatggggtttcaccatgttggccaggatggtctcaatctcttgaccttgtatctgcccccctcggcctcccaaagtctaggattacaggcatgagccaatgtgcctggccacactggtcttaaccatgttcccaaccatcctgaagcagctggattggtagaacagtggaatggccttttgaagtcacaattacaatgccaactagaagacagtactttgcagggctggagcaaagttttccagaaggctgtgtatgctctgaatcagtgtccaatatatggtactgtttctcccatagccaggattcccgggtccaggaatcactcaccatcacccctagtgatccactagaaaatttttcttcccgttcttgagacattatgttctgctggcctagaggtcttagttccagagggaggaacgctgccaccaggagacacaacaacgattccattaaactggaagttaagattgccacctggacacactttgggctcctcctacctttaagtcaacaggctaagaagggagttacagtgttggctggggtgattgaccctgactatcaagatgaaatcagtctactactccatagcggaggtaaagaagagtatgcatggagatccattagggcgtcttttagtattaccatgtattgccatgccctgtgattaaggtaaatgggaaactacaacagccccatccaggcaggactacaaatgacccagacccttcaggaatgaaggtttgggtcactctaccaggaaaaaaaccaccacctgctgaggtgcttgctgaaggcaaagggaatacagaatggctagtagaagaaggtagtcatcaataccagctacgactgcatgaccagctgcagaaacaactgtaattgtcatgagtatttcctcctccttttgttaaaaacatgtttgtgcatgtatacacctgtactaagaaaatatcttcattttatttcctttttcttttatcatatgacttaagatttattgacttcacatcagcattttaagtattgttaacttttagtatttgggttgggataggtgtgtttctggttgtacgaaggataattgtattatgttaggcataattatgactttattgtctttatttaaagattatgtatgatctcaggagatatgtatgggttcaagttgacaaggggtggacttgtgatggttaatactaagtgtcaacttgattggattgaaggatacaaagtattgatcctgggtgtgcctgtgagggtgttgccaaaggagattgacatttgagtcagtgggctgggaaaggcagacccacccttaatctggctggctaccatctaatcagctgccagtgtggctagaatataagcaggcagaaaaatgtgaaaaagagagatgggcctagcctcccagcctccatcttcctcctgtgctggttgcttcctgccctccagcgtcggtcttcaagttcttcagttttggaacttggactggctctccttgctcctcaccctgcagacagcctattgtgggacctcgtgatcgtgtaagttaatgcttaataaactcccctttgtataagtatctattcccttaattctgtccctctagagaaccctgactaatacagtagggtgttttttgttgttgttgtttattggaaaaatagaaataaataaataagctatagattcagtagtactcgagtgaatttacgttttaataatcacaactgtagctttctaagtgtttactggttatttgtgtatcttcagggaattgctgatttttccattgaattgtttgtcttttgttgatttgtaagggtatatgtgtacatttttacttggtttcatttttaaactttatgagttctttttactatatagatatttaaaatttgcatgtagtcacctcagccttgttcctttttgtctcctagcttttttggtcagatctctcttcccagaagatattattcattttattgagatataattcacatatcataaaatttacgtttttgaagtgtaaaattcagcgattttagtacattaacaaagttgtacaatcatcaccattgtttctgtgcagaacattttcatcttcccaaaaagaaacccgttagtaatcactccctgttcctctcgcctcactcgcagcccttggcaaccagtaatctagttttttgtctatagatttacttaattctaaactagacatttcatacaaatggaatcattcagcatgttatgtttttgtctggcaggtgccaagatttttgaagtatgctttttaatttttttctggtattttctagatttaaaagtttagatttttaaatctttctggattaaaaagaaaagtattttttttttttttttttttgagacggtgtttcactcttgttgcccaggctggagtgcaatggcacaatctccgcttagtgcaacccccgcctctcgggttcaagcgattctcctgcctcagcctcctgagtagctggaattacaggcatgcgccaccacgcccggctaattttgtagttttagtagagatggagtttctccatgctggtcaggctggtctcgaactcctgacctcaggtgatctgcctgcctcgggcctcccaaagtgctgggattacaggcatgagccattgcgcctggctaaaaaatgtatttttaaaaatgtattacaaaaaaaaaaaaaaaaaaaagctggccatggtggcaggctcctgtgatcccagctactctggaggctgagccggggagaattgcttgaacctgggaggtggaggttgccatgagctgagatcatgccactgcactccagcctgggcgacagagcgagattccatctcaaaaaacaaaaaaacaaaaaaaataaaatagtattctcacccttttctactcacattccttctgagctggttagtgttattggctggtatgtatccttccagtcacatctatttacccatatattcaaatgcaaaatatacatacgtagggtggtggtggttgtattttaaaatgaaattattttatgcacattactctgcatcgttgtttatctaagaaaatattttagctgttcctcaaaatagttgatagagatctgacacattcctttcagtattaggtaacattctgttacactaatgagcctcatttactcagccatttcactgaatgggtggatattcagatgttttcagttttttgacacttagctaagccttaagtaaatatcttgttcatatatccttgttaactgatgctcttaattctatagactagaatctaaaaactaggggttcctgtgtcaagaacatttgcatttaaaatttgtaatagttattactagatttacattccccaatagttgcagcaggtcagagtttcatccccactgaattgcctattttcctgcatttttgtcaggattagctgttgttaaatctttaaaattttgccacactaataaggtgagatagtatctcatctcaggtattcttaccttctctttcagaggtaaactgtgtgatgtgatggatatgttattaccttgattgtggtactcattttagaatgtataagtttatcagaacatcatgttgtacaccttaaatatatacaatttttatttttcaatcgtacctcaataaagctgaaaaaatgtcattcagaaaggaagcaaacagtagatactagcattaaaaatatgttgtaaattttcaagcatagaatgataacataaggttaggaacaagaatatgtgtatagatttaaatatttatctctgtgaatattaatccatagatacaaatgttgaaggcaagttacaatcttgaagaaaatgaaaattatgttgtgtacctataatatgaaaataaaaaatcacacaaaggcatataccttcactcaaggatgtatactcgagtatacatattatttataatagcgcaaatttgaaaacagcccaaatgtccctcagctggtgaatgaataaaccagtggtgatgccttggaactgtggaatactattcagcaataaaaaggaactactgactcggcaacatgtgtaaatctcaaaaatattatgctaagtgaaagaagccagggtcaagagatgacatactatatgatttcttaaaacttccagagaagacaaaattcaggacagaaagcagatcagtggatgccaggagtgagagttaggggaggaaatttattgcaaaggagcagtaggggattgattgtggtgatgtttgaaatgttctatgtcatgatcgtggttgtagttacatgactattctgaaagttcatatttaataagtgatataaaagaaaaaagtattaatggcttaaacattaattttccaaatgagagcactaattaaaattctcaagtgttgagaacaaagatagtatctcattgtaatttttattctttttaaggttagtgaggtttgaaaacagttcatatgtttctttgccatttgcatgttttcttttgcaggtgcctgttgacttcctttacctattattctgttatgttgcttccagttccttatgaattcgcggaactttttgtatattcagagcagtaatcctacatttttagtctgtaaatgtttttccagtcacctgtttcttttgactatagtatctttttttaaaaagaaatatttgaaatgtacaaagaatgtaacagtttcccatactgctattaacatttttatattttgctcatcttttgagaaatttatatatgtgtccacgaaaagagtcaaactctataaaatattttaagagatttattctgaaccaaatacgagtgaccatggcccgtgacacagccatcaggagttcctgagaacatgtgcccaaagtggttggggtacagcttggtttgatatattttaggaaggcatgaaacatcaatcagatacatttaagaaatacattggtttggtttagaaaggcgcgacaactcaaagtgggggcttccaggccataagtaaatttagacgttgtctggttgacggttgagtttgtctgaagacttgggattaatggaaaggaatgtccaggttaagataaaggattgtggagaccagattttgttgtgcagaggaatctctcagcagacttcagagagagagaaggttgtaaaatgtttcttattagacctaaaagagtgcctggctcttagtcgattaatctcctggatctggaaaggaaagaaggaaaacaaagggaaaaggggattctctatagaatgtggatgttttttccccacaggagactttgcacggcaaatttcaaggtatggcaaggaaatatattttggggctaaatattttttccttgtctcataatgttatgccagagtcagattgaaaagtaagtcacgatatatagcgtcaaataaaacccatctgatgagaatttatggtttgtagggcatgacttcctagaccccttaggtaggagtttgggcaagttaaaaaatcagagctaagtcctcacatggcttttaaaaattgtgaataagtaatacttccataaattctgatttaattacgaatcccactaatttcttttttttctttcccagggacagccactgcaaagggttaaatgtatattcttccagtctagcttttatatttttatgaggatggggagatagacagataggtatatagttcagtgtttctcaaagtgtggtctttagaccagcagcatcagcgtcacctggaaatttgtgagaaatgccagttcttagtttctaactaaatacttagtttctcactaaaaacagccatttttattaagtccttcaggtgattgtgatgcacattgaagtttgagaaccattgttcatctaggtcattgtctttaactgctgtatggtgttccctaaattgaatataccattttttaaaaaagagactaagtcttgctattatgttgcccaggctggtctcaaacttctgggcttatgcgatcttcttccacctcagccttcagatagctgcaactataagcatgcaccaccgcacccagcttgaatgtaccatattttaaattccatattgtcaagcatttaagttacttttctttaaaaaattaacgttattgcaaaggaaacaattggcagagtgaaaagacaacctacaggatgggagaaaatatttgcaaagtatgtatccagcagaggattaatatccagaatatacaaggaactctgatatctcaacagcaaaaaacaaaacaaaacaaaacaaaacaacaacaaaaaatttaaaaatgggcaaaggacctgaatagacatttcttaaaagaagacagacacatgaccaacagatatattttttaaaaaagctcaacatcactagtcatcagggaaatgcaaatcaaaaccacagtgagatatcatctcaccccggttagaatggctactatcaaaaagacaaaaaatagcaaatgctggcaaaggtgtggagataagtgaactcttaaatgtggctagtgggaatgtaaactagtacagccactatggagaacagtgtgaaggttcctcaaaaaactgcaaatagaactaccatgtgatccaacaattcattactggacgtttatccaaaggaagggaaatcagtatattgaagagacatctgtactcccatgtttattgcagcactattcacaatagccaagatatggaatcatcctaagtatctaacaacagatgaatgcgtaaagaaaatatggtatatatacacaatggaatagtattcagccataaaaaagaatgaaattctgtattttgaggcacgtggattgaattggaggacattatattaagtgaaataagccagggacagaacattaaacactgagtgttctcattcatatgtggaagctaaaaaaaagttgatctcagaagtaaaaagtagaacagaatactacaggctgggaaggatagggtgcggggagggtagggaacgatttgttaaaggattcaaaattacaactagataggaagagtaagttctagtgttgtataccactgtaagatggctgtaattaacaatatgttacaaagtttcaaagagctaggaggaggatgttgaatgttcccagcacaaagaaatgataagagatgatgggtatgctaattaccttgatttgatctctgtatagctatgaaaatgttactatgttcttcataaatattaatacatcaaaaaatttaaaattaataattaacaaaagataaagggccctgaactctagttttagagctgaattgtatccagtcagatagtttctatgttatttaaatgttcactttaaatttggagctgaaatatatttggaaatctttacttttagtatgttcatttgtgtgtgtgaggtaaacttggttggctattggcaaatgtattgggtagctgcttaataaaacatttccttccagtgcttcagctttctgatgcttagaaaatatgtataattaacataatatgcattatcacttttgaaagtaactaattattcgaacagttatttgtgccaaattagtaatgtgaatttgggaactatcagtcttttctatggcccggaataatttaaataatagaaattatctgattagatagaaatcattgtaaaatcatcaaggttaggatttcctttgacttttgcttatcattagttttaaagaaaaaaaataaattgacataatggaaattttcactgtacatcaggaagggaattcagtggaaaagtaagcttcctattcactcttgaccttcagtttatactttttttcctaagtcaagtactgctactggtttcttatgctctttctagaactagcctgtttattgtctatttaaaataactcattaatcaccttttatttgagctcccttatggatctgtgtagtttttctgtctctttaaaattttgtatgcggtaaaatgcacgtaacatcaaatttaccatcttagccatttttaagcatacagtttagtagcactatctttcacatcgttgtgcaatcaatctccaaaacctgttcatcttccaaaacaaattctgtatctattaaacagctctccgttcttccctaccctcaactcctggcaaccgtccttttactttctgtctctctgaatttgactacctcatataagtggactcatacagtatttgtctttttgacatgggcttattttacttagcataatgtcctccagttccattcatgttgccttgaaagacaggatttcattcttttttttttatggctgaaatagtattcatccatgttgtagcatgtcaggatttccttcctctttaaggctgagtgatatattccattgtatatatataccaacattttatttatctaaattcatctgccaatggatttttcagttgtttccaccttttggctattataaataatgctactgtgaacatgggtgtacaaataacttcaagaccctgcttttaattcttctgaatatatatccagaagtgtaatttctggatcatatggttattttatttttgattttttgaagaatttctgttgtttttaaagtcacttttgatggtttgttctttgctagaaaatatatatttcagttttatcagtgcagagttgtatataatacttacatattttgtacaattatataaaggttatattatatttccatattctcatataattatctttagtatccatgtttgtaactgtttactcatttctctttcctcattcacgtttactattttattggtctttaaaacctaggctttgattttgtttcctagcatttaaatttttctgtttcattaattttagctttcattttatttatactgttatttcttgaggcaatggcttggttcatctattttcagtttttaaaaaaactgtaaagtatttgtaaggctctaaattttattttattttttagttataggaatttttaatatattctggttattcaccccttatgagatacattatttgcaagtattttctcccactctgtggattgttgtttcatcttcttgatagtgtcgtttgatacacaaaagtttttattttgatgaaatccagtttatctgttttttcttttgttgcctgtgcttttttggtatcatatacaagaaatctttgccaaatccaatgttgaaaatatttttttttcctatattttcttataggagttttatagctttactgttaagttttggtctttgatctattttgagttaatttttgtatatgatgtaagaaaagggtccatcttcattcttttgcatgtggataatcagttttcctagcatcatttgttgaaaagaccatcctttctctattgaatggtcttagcatctttgtcaaaaattggtcatatgtgtgagggtttctttctaggctctctattccattggtctgtatgactgtgcttatgctagtaccacattgttttgattactgtagctttgtagtaagttttcaaataagaaagtgtgagttctccaactttattctttttcaagatagttttgactattatgcggctctttgagattccatatgaattttaggatgggtttttcctttttttttttgagatggagtctcgctctgttgcccaggctggagtacagtggcgcgatctcggctcactacaagctccgcctcccagggtcacgccattctactgcctcagcctcccaagtatctgggactacagggacccgccaccatgcccagctaattttttttgtatttttagtagaaacggggtttcaccatgttagccaggatggtctccatctcctgacctcgtgatctgcccgcctcgacctcccaaagtgctgggattacaggcgtgagccaccgcgcctggctttttttttttttttttttgcaaaaaataccattgggattttgatagggattgcattgaatctgtatattgctttgggtaatattgttaccttaacaatctaggaacgtgagatatctttccatttatttatgtttaatttctttcagcaatgttttgtagttttttattaagtttttcacctccctgattaattcctatgtattttattttggatgctatcgtaagtggaattgttttcttaatttcctttttgtatttttcattgctaatgtatagaaatccagctgatttttgtgtgctgattttgtattctgtgactttgaatttattagctctaacagcttgtttttggtgtgtatgtgtcatctttagggatttctacatatatatcatctgtgaatagacatagttttgcttctttctgtccaaattcaatgaattttccatctttttcttgcctacttgctctgtccggaatttctagtattatgccaaatagaagaagaaaaagtgggcatcctcatcctgttcctgatcttaggggaaaaacgttcaatctttcactattgagtatgttgttagctattggtttttaatacatggcttttacgatgttgaggaaatttccttctattcctagcttgagtgtttttttatcataacaggtgttgaactttgtcaagtggtttctctgtattgattcagatgatcatgtggagtttcttcttcattctattaatgtggtatattacattgattttttcattgttgaatcatcttgtgctcctggagtaagtttcacttggtcatggtgtgtcatccttttaataggctgctgattttgttgagtttttcatcagtattcctagggtgtattagtctgtagttttcctgtagtatttttgtctggctttggtatcggtaatgttggaccatagaactaatgaagagaagtgttcccttctctttaatattctggaagtgtttgagaagcattctttaaatgttgggtggaatcaaccagtgaaagctatctggtcctagccttttctttgggagctttgtgattactgattaatccctttactagttatagttctatttagattttctatttcctcatgagttagtttcggtagactgtgtgtttgtagaaatttgtccattttgtccaggttatccaaattgttggcatacagttttacatagtatcgtctcataattctttttatttttgcaaaatcagtagtgtcaccactttttttgttgttgttgagggggtgggggggatagagtcttgctctttcgcacaggctggagtgcagtgacaagatcttggctcactgcaacctctgcctcctgggttcaagtgattctcctgcttcagcttccctagtagctgggactacaggcatgcaccaccatgcctgtgtaatttttgtcttctttacagtagagatgggggttttaccatgttgatcaggctggtcttaaactcctgacctcaagtgattcgcctgctttggcttcccaaagtgctgggattacaggcatgagccactgcatctggccgtgtcaccactttcatatctgactttagtaatttggtgttctttctctctgtctctcttttatttatttatttttttgttaacctatctagctagagttttgttgactttttcaaagaatcagcttctggttttgtaatttttctccattgtttttctgttctctcttttcactctaatttttattattttctttcttctgctagctttggtgtagtttactctttttctagttccttgaggtatatggttaggttattgaatgagaactttcttattttttgatgtcagtgtttacaggtttacatttttcttttagctctgcattcactgcatcctataagttttagtatgttgtgttttcgttttcatttatctcacgttggtttctaatttcctttgtgattttttcctttgatctattagttaacattcacaaattttcacatatttgtgaattttttagtttttttatctgctgttggtttttcatttccattatgatcacaaaacatactttgtatgatttcagtttctttaaatgtattaagacttattttgtagcctaacataggtctgttttggagaatgttccatgtacacttgagaagaatatattgtgctggtgttgggtgagtttagtttttgacatgttacatttgagcattcatttaggagaaaagccaaaggaagacatttgttaatgaactgtaaagaggggttgacatcacaagaataggtaattttttttgagaaacaaatttagagcaacagaacagccttgaatatattcttatttagaaggctgaaggttgaatataacctggagtgttagaaaagggtggaacagtttatcatagaccagagccaagaaagtataatatttagactttaaatatcaaaaagaagatatggtcagctgaattcaaagttgaaggctaggtgtggtggctcatgcctgtaattctagcactttgggaggctgaggcagaaggatcacttgagcccaggggttcaagaccagcttggccaacatggtgaaatcctgtctctactaaaaatacaaaaattagccaggcatggtggcaggcgcctgtaaacccagctactctggaggctgaggcgggagaatcgcttgaccctgggaggcagaggttgcaatgagccaagatcgtgcctttgtactccagcctgggcaacagaggaagacaccatcttgggaaaaaaaaaaaaaagaagttcagaaaacagcttgtttgggaaggactgttttttgtattcctttaataattcaataaagaaaatagaaaaaggattttttttaaatttgagaaacatttaaatgatgaccactacttaaattatgaaattgaaaaccacaaatataaattatgcattctttatagtatgagttttagaggctgttaatttgctataatattagctacatctggaatagaagaaacttcatatattatcttatcgctatatttgaattctgtagaagttatttctggacagtctacgaaaagctcttgctggccatggaggaagtaggcagctgacagaaagtgctgcaattgcctgtgtcaaactgtgtaaagcaagtacttacatcaattgggaagataactctgtcattttcctacttgttcagtccatggtggttgatcttaaggtaacatgcttattctttctctactacaaactttaagaaaattaaatgaattttctagcataagtattatgtcaaagataattgctaacattaaagttctgactcttcgttgataagttcataggacttgcttttgttgttactgtgttcatcagcctaaatggactgagaatatgaagaaaacaccattttcttaaataagcataaatatacagacttgggtttaaaataatgtggcaattagggcctgaaatgaacctatatatggtataggaagaattgtatcagactgatgaaccacagtatgggtgctttgtgcttcttctggcagctggattttactgccatttgtgtgggtaatgtgttgatgttattacatgttagtaaagaaatactgcatgggtatttaaaggcttttgttttctgttggggtttttatagaacctgctttttaatccaagtaagccattctcaagaggcagtcagcctgcagatgtggatctaatgattgactgccttgtttcttgctttcgtataagccctcacaacaaccaacactttaaggtgagagcattggtttttatctaactatatttactgatgctgttatcctttataaacaaaaagactatagagattaataggttcacttttatcggtatttctcactattatgtattgatgttcgtttcaagaccttaaaaacttagtgttttttttttaaactttctatttgctgttctttttggcttcatttgtattactgagtatttttctcatagaaataatctgcttttttttttctttttctatagatctgcctggctcagaattcaccttctacatttcactatgtgctggtaaattcactccatcgaatcatcaccaatgtaagtccaaaaggtattgctaaattactaaaaaaatttttttctttcttttctttgcgtatttctttttaagaaatgcactcttggttttcaaaaaggttctgaatttagatgtatgaaataggaaaatttctccatggtgattctatttgataattgataaatatttgtatttttcatattaagtcttgaccgaagggaccatattaaggaagatggagttaataagatgctttggaaagattaaatctaaaacgttttattcagatcagaagcccttgagaaaaatgtcactgaaaatacagtttaaaattttcatcccgaagcttttcaaacatattatttcagcatttgatacattgacttgccaccttaccatttaagttaaaagtaatagtatttatgttgtagtctagtatagcacattgacaaaatgatgggactatatttgatggtacttttaaatcttttgatcctaaattcattcatagtgtaaaatttcatttttcttaaacaaaatgaaatattaacatactttaaagtaggtattaacaagatacaaaagcatatcagacaaagtaagtgaaatcattaaaaggtacttgcgaaaccttcaactctgtctgatgtggagacattaaatagacagcaaaactatcagatttggactgtggatttttaaaattctgttcttgtaataatgaacaaccctattttgaaagttttcaagtgttattttccattgttccacttttatcaaatgatactcacatttatgggtaaattggttgatgctttccttccttaaaggaggctgtaatcattgataacttagtatatttgacctgtttataatcaaattccattttaagactgtgcctctggtgagttgaaaataacccttcacctcatttgccctggatgttgtatttatttaaaataaatactgcccatattctatccattcctgcagtggaaaattaactattgataaagctatttggtgatacatttaatttttctcagcaggtgtttagtgagcattttgggaggacagtcctttgttgtgcaggatgccttgggcattgcaggacctttaagatcgtctggcctcatttcattaaatgccagttgtgctgcatctccccatccctagtcattatgaacaaataaacatgcctgagggaatgatacctcctcccttagttgagtatcactgagttaaattgtaggtaaaagtaacattgaatatgctttgttccaaaagggaaagtttaatgaagattgtaaataaggtatgtttgtattaaaaacttaaaaaaaatcactgtacttttgtcagcgtaatgagccagggcattgtaccttcaaggtttactttcaaggccattaaaacaaaaagatgatttctcccctcaagtttatgtgtaactcagaaataagtcattattgcttttttccgctgtggctcagaacactaaaaatattcaaagagtggatagctttgcataaatgcttaaaatttgtatacaataaacccaaatatatacttttttgatactttgtggctagttactttaattgtgaaatatttttgtctacaactgactacatagagcactttcaagcatggacttggcactgctgtaagtggctgagctgctcctttctgggttccaagcatgcctggagtggtgcttcatgcatgcctcagtgtacttggtgaaagtggctgtgcatcctcttctactctaatgagcactgcatgtgtggagggtggagtgtgtctgtatcagagatcaagttatatgaaaatctgtttttataaagaaaaaaactacattgaataatttttaaacattaagtatcagtaacttttcaatgaaatagcttgaaaaggaacataaatattagttcaaagtatctttttaaattatgctttgggtagtgatactttattattatagatagtgtgggaaattgtttctcgttaggatattttcccccttggtttgaggctaatcgctattgaatctgaagtactcttttggttgaaaaggactatttataaagtgaatatagaaatttatgagattgactattttagagtttcatttgaagacatttattatggcaatatttttgtcttgaaaaatcacatgaaattattcttagatatttggacttctgatcttaaattcattcgtagtgtaaattttttttctaatgattcttggttcaatgtacctcataagttctcttctcccatggttctttagccagtccacacattttttttaaagcatcacattctcaaataagataaaagttttagtgatgtgtattgagggtttgtgtagaagtagtaaggtgtttggagttctacttttgtgaaacatactcatactcagttcataagtactgagtttagatctaaaatattctagtgtttcttcttagaaaatctaaaatatatccactatttgattcttattataatgcaggttcctagcagttactaaaatagtagttgtactgtcatcttttttattatgatgtgccataagagatgaattaatagttgtaagatctatgttatatgcataatcttcatagacttcctttaggttaaattagatatgtaattgggaaatttaaaaagtaatatacacacttatgaaccaattatcttagccatcactggtacatgctatagctggtatattacttatttctgttttttccttacgacaatttatcgtaatttacatatggatagttcacatactgaaaatgagatgattgctttctactgagaggttgtagttgaaaggaattgtttccaaggcatttgaaaattatttaaatctcttaaggaattgccacataatttgttcatattatgtaagtgttgccatttggctataaacatggtattttcaaggaaaaaaagagtaagtctactttaattgactggtgttcaggaagggcacatttagtaactgctcaaaatactaaacttttttgccaaccacatgatgtctagtttttcatacttattttatttgaaaatgtgtattttactttaaaatgaatatattatgaaaaatgaaaactatgaaaattactaaatcttaagcctaaagttattttatgtggtgcacctggtaccacaatacggtttcaaaagctattaaaaaaagacacagtaatttgaataggatgttatatgggatgcctttcttagtttatcagtttctgacaagatcttacgagatgtgttgggtaaggaagacccttcactcaatgtactttgttattattcagctttttgttactttaggctgattaacacaagctgtataatttagtaagtataaggaaatcaagttgcattggttgctttgggcaagtcaaaattgctgagagttggaggaatccattatactatcagactaaaaattgatcatttgtagaaactagattaaataaagtaggagttgagggaaaaatgtaaacaaccatactgtcccaaaaaagcatttcttccctcccagttttgggattcctccctgaatggagttcagtattcaaaatgtgtatcataagttggttttatattttactatccggcgaacaggatttgtaatccacagtttgggttaaggtaatataactcgatgctattcaaaatattctgagaattccaagtgaagaaattaaaatgtcgagacttcaattagcttagttttgaataagaaaaaatctgggactgaaatgtgagagatgtgaggctattcaatccctcttatctacaatttgaatgtattattcttccagattttttaaataaacatctggagtattataaattagaagcctacattttaggtcatttaatgcatagtctacatatgtagtgaaaattcatccagtcagttttttattaaatgatagactttaaagatatagtgattttcacaattgtcattttttaataatatatcaagtaattcattttaaagttaaagatacacttccaaataaaataggcactaaaaactagacatcagagttaaacagggtaaattgaaatagaaaatacataaaataattgtttaaaaaatatttcactaggatcagtttgtctttgtttatggtaattgttagtctcccatatatcatgtcatcattgcatatcaatttataggtttacttaatagttttatttcatttactaatttcatgttgtaattatcattgttgtctgtaaacatataagtaatggttttccacatacacttttaatactgtgttgaaccactaatcacttttaaagctttgataatagcattcttacctgggaaaatatatgccatgtatgcacgtgtgccagaaattgtaaaacattaaacttaaaaaaaaaaaaagaagattggctacagattagctctctgaagactttatttttcaaattcactggctaatcatcgagaaaagatgtctcacatgcacatgctcataaagtgggcaatttgtctcatgctcactattatgttttataatataatatgtatgagttagtgtttgaattaaagacgttgtttgaagactttggaaatcatggtgtgtgtttgcatggtcttagaaagttcccgacaaaaggataaaacttaaaactacagtgataaacagagcatacaactcacgtaattttgtactttttcttcctattggtctttgtttttctctagtccgcattggattggtggcctaagattgatgctgtgtattgtcactcggttgaacttcgaaatatgtttggtgaaacacttcataaagcagtgcaaggttgtggagcacacccagcaatacgaatggcaccggtaagataaatcacgaattttgaatctcacctcctttctattgcattttttttagtgtctttatcctattcctgctgctttggttattttagagaattgaatgggtccttcatttcctctaaatgttgtggtatgttgtatctagaatattgttgaatactagattatgtttgttttccactgtttccatgagttgaacttaacttttcttagataaattttctcacaaaacactgaaagtcttaatgaatgtcaccttttttttctgtttttaaagttttttttctccttaaaacttttgaacaaaaatattttgattagcctctcacgttttggggatgagtaagggaagctgactcctgggttagagtgaatgttgctgccaatgcacattttagctaattgaatggtgactattaaacataggaaatgaataaaatttagagtttttgtatttaaaataaaaatattttgtatttcaacaaatatgccttgaggttttacaactgataggaactttgatactgacatttgactctaaacttaataaaaagcagacttaaaattgggtattctcacagattattactcttaatatggaattttaaaactcctatggaatcaatttaaaaagataattataagattgtggaagtcatttttttggtgtttatgtatagcaagagtattatacaagagcaactcttgacattgattggtggtgctttgtcttctgcttcttattttctattattggctgctgtcgctcacatgatcagatgccaaccagtcactgttttgcatggcagtgggcttctgtggctgtaagtatgacccattgtaactacatcagaaaagtccttggtttctttgacttttctgtgtatagttaccattatagtcacatcttgtcatttcaactgaaaatatagcatgtcttcacctgttggttttatctagtaagttagtcatttcacagttaggagataatttaaacagctttctccctggcatgcttctctttttccaagtccccttagtcagtgaaatattttggttttatacagttgtggttcactcttatccagttgtcagtaattatttctgaggattgtttatcttagatgttcaaatagagaagttttttatgtcatatattttgggattattgagcctaaaaaatatagccaaaagatcatggcaatgatgtttccttaagtaaactttaaaatgcaaggttaccttttagttgactttttgtaatgccaagtacttcacttttttttaagttgaagaaattttcagtacaggtataagttaattggaggtaagcataaataatagctgtttaaatgtcatttaataagatatttttaaaaaatcttttaaaactacttgaaataagttgtttaaaagttatttattgacctgtttattccagagatctgggaaatcagaagtttatttgacttttttgctttaagtttactaccttttctggtagaaagttaatgacctccaataataggacttgttggggggttaatattcacttcctatttaacttcaatatccactttaccagctgcccataattttctgtgaataaggactaaaaatgaaactaaatgattattttgaacagaggtaaaatttgattggtagtctaaatatgttctctacacttagaagttattttacttcttagccctagttataagctgattctcagagctacatattattttaccgaaaagccataactagagaggatttcctcttttggctcaaggacacctgtaataagaatttagtttttatttctaattattttctgaaaatatcaatatacatttaattttcaaaatcattcctaagctgtttatgtttttgaaatgttatatgtatgtatatttgtacataatgactaaaggacagcttttgggctgatattaccaggagagaaaataaatagcaaatgtaatatgaaacaatttttagaataagaaaattttaggttttgaatggctgttagggtaaaatctcacccttcataaacttggtgagttaacagtcagataaccagtatggaagtattgaccttctactctttgccaggcaaaggtgctaatgccagggaagcatggtgaactaaacatacacagcacttcccctcaccgagattccaagcaaaaggtttatagcttttgcttgaaaatgtctaatgaagaactcaacaccggacacggtggctaacgtctgtaatcccagcactttgggaggccaaggtgtgcggatcacctgaggtcaggaggtcgagaccagcctggccaacatggtgataccctatatctactaaaaatacaaaaattagccaggcgtggtggtgcatccctgtaattccagctactcaggaggctgaggcagaagaatcgcttgaacctgggaggcagaggttgcagtgaactgagatggcgccattgcaccccagtgtggacaacaagagcgagaatcggtctcaaaaaaaaaatcaaacaaaaaaactcactacaggtggcatggagtctggcaacacaggcaaatatatataataaatggtttacagataatacctaacatcagagtttcctactgttggcactattaacattttggactggataactctgttatagggggctgtactgcgcattgtgggatattcagcagcatctctggcctctacccactagatgccaatattccctttaccccccagccctccaagtcatgaaaaccaaacatgtctccaaacatttccagatgccccttgggggacaaaatcacccccagttgagaactactgtattacagagtatgttcagtgggttgtccctcatttgtattgcctcaaatgatttgggactgataaacctgagccattagcttgcttcagaagtagcaatctaggagttctgttgcaaaacagtaaaagtaaaataatatctgcttcaaggctttactaacactttgtattttggagagacaagttacttgttggaaggagctaattatttgaaaattttctcttcgaccaagatagaatcatgtctctgtcacttacagccatcactgatcctctttctgttggagctctatagaatacttctgattcttccacaaggtggccctgcagatatttgaataaggttattctgtactcctagaattcgttttatttttatatcgttttggcattggaagggattttattcttttagctctctctctttttttttcttcttgagacagagtcccactccgagtcccactctgtcacccaggctggagtgagtgcagtgatgcaatcttggctcactccaacctctaccttccaggttcaagtgatctcctgctttagcctcccgactagctggggttacaggtgcccaccatcatgccagctaattttgtgtttttagtagaccatttagcaccattttgggcaggctactcttgaactgtgacctcaggtgatccacctgcctcagtctcccaaaatgcagggcttataggcatgagccactgtgcctggcctcttttagctctctttaaaactgtatgtgtgtttgttgggtctgtttttatagctaaagaaactgaagcttaaataaagttatattaataacaaatgcatggttaatgaacagtcaaccagagttagttctgaggtttcttgacattcagttcagtgtctttatcaggttctttagttgtccttcttcactagcaagttagcttgatgaaagcagtagctttgtctggcttaatcaacactgaatccctaacgtttgaacaacatctgatacatattgggcatttagtacatgtttgcagaatgaatgaaggaatgaatttcttacttgatgtggtttcaaaatcctcgtacaggccgggcacagtggctcatgcctataataccagcacttagggaggccggggcgggcaggtcacttgagaccaggagtttgagaccaactgggccaacatggtgaaaccttgtctctactaaaaatgcaaaaaaattaggcaggcgtggtggcaggcacttgtagttatagctactcaggaggctgaggcaggagaattgcttgaacccgggaggcggaggttgcagtgagccaagattgtgtcactgcactgtcagcctgggcaacggagcgagactctgtctcaaagaaacaaaaacaaaaaacaaaaaaccctcctgtttctgatttgcttctcttctggaaagaccaacctgacaaaaatttttaaaattaaaatgccatattaagatctgatgttagtgatacagatataatactatgatgtaataattgataaaagctattaaactgctgtgtttgtataccctgtttctattaatacaatctaagatagtattattattttatgttgactttttagttatttaaactctttggccctttttatatgaatgttgagccataacttctcctttgtacctttgtagtatttttttaatatttgaaatgtttgtcttagcactgattttactatttgcaaactaacatctcctgctttcataaaattcaaaactgccaataacagatatatgaattttcacaagtatttgttatttctcaacattttttatcttaagtggcatgctggctcaccagatctttcttacatgcctgttattcagtcacatggtctaaattaacaagtggtttgggcctttaatagatatctgaagactctggttcatgaatttcttcccagacatgattgcctctcatctttggccagatcacatgtaccagcttctattcctactaatacctgcaatatagaagatcaactaatgaatgaatgaatttttttcttacatttctaattaagaaacacattgcttctttagcatgtttttcctcactttctgtaacccactaaaattaaaaggtatttgagatgaattaaatttattggaatttctgaagtcatacatttcatattaggcaaccatgttggaacagaatttacatgttgatatttgggattaagaggtgacataattaaactaatatagtcatacatcacttaatgacagggacatgtcttgagaaatgagtgcatccttagtgattcagtcattgtgcaaacatcatagagtctgcttacatgaacctagatggttatatagcctgctacatacctaggatatatggtctagcctactgctcctaggctgcaaacctagactaaacagcatgttactgtactgaataccttaggcagttgtagcacaatggtaagtatttgtttattcaaacagaaaaggtgcagtaacaatacagtataaaagaaaaaaatgtataggacacttaacacaaatggagtttgcaggactggaagttgctgtgggtgagtcattgagtgagtgttgagtgcatgtgaagcctaggacattacactactgtagacttaaaatttttttaaatttattttacttttaatacttttgcatttttctcatactcaggatctatactgtagactttataaacactacacttaagctatatcaaatttataaaaaatatttttatatgataactttacagtagcttttaaaatataaacttttaaattttttaattttttgacttgtaataacacttagcttaaaacactttgtatagctagctgtataaaatatttttctttatatcctgtaagttttttctatttgaaaatgttctattttaatttttattttgaaaactgttttaagatctgggacacaaacatacacgttagcctaggcctacatggggtcaagatcatcaatcagtgttactgtcttccacctccacatctgctcccattggaaggtttttaggggaaataacgtgtggagctgtcatctcttgtggtaacaatgccttcttctggaatacctactgaaggaccttctgaggctgtgtttcatagttaactttttatctttaagtaggagtataacaatacaaagtatactatagtaggctgggcctggtggctcacgcctgtagtcccagcactttgggaggccaaggcaagtggatcacctgagatcaggagtcgagaccagcctggccaacatggcaaaacctcttctctactaaaaatagaaaaaaattagctgggcgtggtggtgcatgcctgtagtcccagctacttgggaggctgaggcaggagaattgcctgaacccgggaggcagaggttgcagttagccgagatcgcgccactgcactccagcctgggcaacaaagtgagacttggtctcaaaatatatatattataataaatacataaaccagtaacagttatttattctcatcaagtattgtatactgtacataattgtatgtgctatactttttttttatatgactagaagtgaagatttgtttacaccagcatcactacaaacaataacgcattgtgcttggacatcacgatggctatgatactaagtgataggaatttttcagctatgttacatattgtctatcattgactgaaatgttgttttgtggcatatgactctatttacgttttttggaaatgattcttaaggaaaaattctgatacctgctcattgttctctgatcttgtgttcctgtgcaatggctgcatcagggaagagccatttgatagttacacttagttacatcaaagtaaataaattcgtttaatcaaagtttcagcttgatctgaggtgaaacacctcaacttagagtgaggaaaaaaatacagttgaaagagagcaaacagtaaaaccagaatttattaaatcatttagtaaaacatttgctttggggtcagggggcagttataaaaagcaaactatttggaagttttgctatttctcttctgtagtgacattcttgagtataaatgtgtgcattaaatagctattcttccccgcaaggactaaaacccttcggtgttcttgggtataataacaaatgcatatttcacttaaacattgaggatagttcatttgtgttgtagatatgcatgtctgcttcttaactttgaaagacagcctgtttacctggacatttgtattatgggtccacagttggtacacagtcttgttatttctgtattatatatatgtttacataaagacattcattcagaatcagatagttttgtgttcttttcaaggaaaaaaggaaggagatgttttataataataggtgatgttagctctggaatataattgttggatttttggttgaaaaacatttataattattttaattcatcatatgtctctataattgaaacatattttctgtaagtttacctttctgagttctttctgttttacaaatgttcttcaggcaaaatgcatgcattctgtaacttaaaagaggtggagtgccgtcgaaggaaaaagcaaattttacaattaaactagtaaatacaaagattgcctacatgtttcattaattctaagaagcacttatttttactcttctctaaaattgggaatgtatcttattttaaatggtgtcttacaattgacagcagtttttcattccttttgggacatcaaataatgatgcatcttacaattgataatgttgtagagtctatgaaatacttgtatgtatgtctggggaatgtttgttaaataaattacccagtgtgtatatttgtgagaactataggccaaatcttttttcccttatgtttttacattttagaaaatagttttttacatagatgttttacaacctgatactaagcttttagtattgtaatagattttcattgttttattagattgataaaaaaaaatataaatggtgcaaaaacgattttcattgttttgttaagcttaataatactgaccttatgcttactattgagtgtttctactaataccacacatttggtagtataaaaaatagcttttttcaaaggtttttaataataaatttcttttaaaaggttggatagctattatcctgagtcttatgtctgataccatgtttttgttttgtttttagagtcttacatttaaagaaaaagtaacaagccttaaatttaaagaaaaacctacagacctggagacaagaagctataagtatcttctcttgtccatggtgaaactaattcatgcagatccaaagctcttgctttgtgtaagtatttttttatgaaatgtctcaaaattatcacactaagttaattgggtttagctgaaacgccaagaccttgaggataatttttagctcaagagcacttactgatcctttctgatcatacctgaaaactaagacgtctctaagaaaactaatgtataatgaatactaatataattagatcagattcttaattgcccttatcatttcctaacatttctctttcttcttaatttccctatcattaaactaacatactttgatgagatctctgttctcatcctattactaagttatatattattcaggtataatcctggtatgggggatagaagtgaccatcgatcacagtgtctacatctatactgttggtttaaaaaatctccagattgcttttgccagtttagcttttctatccccctttctttgtgttatcagctttctgttatcattggctctgcctacaaatactgtattggaaaaagaatgaggtgaaaatgggtgtggttagtacttgagttagtgtgattatcattattattattattttgagacagggtcttgctctgcttcccaagctagagagcagtggagcagtgatggctcactgccttcgaactcctgacctcaagccatcctccagcctcggcctccccaagtgctgtgattacaggcatgagcccccatgcctggctagtagtcagttattgtcataactactcttactgcctcagatgatattaaatttctgagaacatcactctggtacacagagtaattaggaacaacgcaaataataaaaatgagtcataatgaagtgattaacagcatggacgctggagactacctactagctatgtgatttggatgactatttaatctttctatgccttagttttctcatctgatatattgggatcataatagttcctatctcagagatactgttaggaaaattgaaatagtacatacaatgctttaggaacaatgcctggtgcataataagcactaaataaatgttagctattattgctattaataagatacaatttaacactaattaatgcaccaaatgtaatagttctatattgtgtctttcataggatgacatgtttaacctttgttgagcttcttcagtccctggagagcagcatcaagcaaggtttcttatcgttttgctcagtaactggctttttaaaaagtgttaaggtgctttcgattttggtggcatattttttaaattactgtaatacagggagtttgtaactacatgcctatgattccaagagttctatgaaacttcgtgaattttttaaaaatgtgtatttatgagtaatttttcttggagagtggagaggagagaagaaggaacattcccaaaggatcagtgaccccaaaagaaggcctgtgatactttaagcctgaaaaacccattcaagtttgaaagtctaattagaataaacagatctttggcatgaaaaaattccataaaacctgtcagtgaaactctataaaaaaatgaagttccctttctcttcattcctttgttatgtgttacaagctatttgtggcattatttcatcatgaaggtcacataatactagcagtactctgtttacgtggtgataattcacattcaaagcaggcaccaaactcaccaatgccgtttctactaaatgttgcttcaagaagaatttaagcaaaacttgccattttccaaggatcatttaaaatggaaattatttgctttgctgccatctagtggttaataagttttctcaaggtaaccataagtacattaaaatagaagattcgttgtaaatatttgaccattttgtcttttacataaaaaatctgagtcttagtaatttaggaggaatgtaggaataattattaaatggtctcaatcatggtatttttaaagtaatatgattttgtcttccattttagtactctcaatttctcaagcctcctaattactcagcttgcatcgtttcttagatccccctgatcatttctccacactgaagttatggcagtctctttaaaaagcaaatcttattatgccccctctcagcttgaacccttttagttgaaattgctcttgcttatgaagaccaaactccaaatagatctacagggtcgtgcaaaatctttctcccatctaccatttcttccacatgtagcattacattttttgtcttcctttactctattcatgatggtcttcctttcagtctttctaaccacatgccttcatacctcccttgcagttgcttttccctctgcctagaatctgcttactcttaacatagtaattcctactcattctaagctattgtcactgcactaaggaagcctccctgagtcggacacttttccatgttataggctgtcatagcagcatgtaccttaataatagctcttatgtgatttgcatttttatacttgttgatctgattatttcattgatgatatcttcccccatgagactacatgctcatggaggatgggaaacacatcttctctttttcattgttgtgtctttggcattcaataaaaatgatttggttttggatgaatttatatgaatgtcagaaaataagctaacggttttgaattacagatatattgcagtgagggcttaccttagtcattataatggggaaaaatctatagttagcaaaataaaatatgggacacaagttgcattggcttcatatattcttcttttttttttttctgagacagagtctcactatattgcccaggctagagtgcagtggtgtgatctcagctctctgcaacctccgcctcctgggttgaagtgattctcctgcctcagcctcccaggtagctgagattacaagcacccgccaccaaaccggcttgtacttttaggagagatggggtttcttcatgttggccaggctagtctcgaactcctgacctcaagcactccgcctgccttggcctcccaaagtgctgggattacaggcatgagccaccatgcctggccaaaccatatattcttgaagtgcaaatatatgcttccaagttaagagaaacattttagtctctaaataggtaggcattcggcagggcgtggtcgctcacatctgtaatcccagcatgttgggaagccgaggcaggtggatcacctgaggtcaggagttcgagaccagcctggccaacatggtgaaaccccatctctaataataatgcaaaaattagctagacgtggtggcgcatgcctgtaatcccagctactcgggaggctgaggcaggagaatcggttgaacccaggaggcagaggttgcagtgagccgagatcacgccattgcactccgtttcaaaaaaaaaaaaaaaaaaggtaggcattcacatttttacataacgttaattttctttgcttagtacactatatttttccacgatgaaaaggaccgaagtatgggtatctgccgatgcaaattctagcctttgctttgttaccagctgtgtggatttgggcaggacctttgtatgggtcaagagggctgtacaggataatcatgcaatccttatccaacatgtatgtcctttacctttgatcacaatcatgtataagctcaaaaccagtaagttccaaaccagagatacgttctttagccagtttactattgttggaaaaaaaattattcctcatattgttgatgtaatttttaatgggaattcgtggtttttgttttcattaggattttccctggacattattcacattaatgaacaagtatagatgtggattaaaagaatccctaacaaaagaagttttgatttaataaaatttttattttattgagataaaaatactatacccacataccataaaattcaccatcttaaagtttacaattcagttgttttcagtatatttacaaggttctgcaaccattaccactatgtaattctagaacttttttttctttctttcttttttttcttttttctttttttcttttttccagatggagtctcgctctgccacccaggctggagtgcagcggtgcaatcttggctcactgcaaccaccgcctcccagcttcaagcgattctcctgcctcagcctcccaagtggctgggaccacaggcgcatgccaccacgcctggctaatttttatatttttagtagagatagaatttcaccatattggtcaggctggtctcaaactcctgacttcaggtgatccacccgccactacctcccaaagtcctgggcttacaggcgtgaaccaccgcgtccagcctagttctagaacattgttatcacccctaaaagaaacttggtaccctttagcagtcactgtctatttcttcctccttctaatctctctcgatttatttatttttttaattgaagtttcctttttttccttgcagaatccaagaaaacaggggcccgaaacccaaggcagtacagcagaattaattacagggctcgtccaactggtccctcagtcacacatgccagagattgctcaggaagcaatggaggtaaggggaaaatgaattccatgttcttgaaggaaagattgtaactatgtacattcatgatgttcctttggtgtgtggtttctgtgagtaacaggtagatgtcatttctggaaatggtatgtttatgtctatacattgttttataaaactccatggagaaagaaggggtttacttgctttgtatcacatagcaataacattgtacaaattctgatgcttaataaaatagttcgagattttctaattgcagttgactttaaaatttttaaaaatattattattaaatattaaaaatactaatttttaaattgagacataattcacataccctcaatttggccattttaagtagttcttttttttaaattttattattattgtacttttaagttttaggttacatgcgcacaatgtgcaggtttgttacatatgtatacatgtgccatgttggtgtgctgcacccattaacttgtcatttagcattaggtatatctcctaatggtatccctcccccctcccccctaagtagttcttattcacacagttgtgcaactatagctactctctaatccataacatttttatcaccccagaaagaaacttgactccccattccctcatccctaccaactactaatctattttctgtctctatggatttgcttgttttagatatttcatataaatagaatcatagaatatgtggccttttatgtctggctaccttgacttaatgctttcaaggttcatttatgttgtggtatgaatcactattttcttcctttttattgccaaatatttcattgtatggatctgttttgttcatctagttatcagttggtggacgtttggtgttgtttctactttttagctattacaaataatgctgctatgaacatttgtgtaaaagtctatatgtggacatatctcttaagtatataggagtggaactgctaagtcgtgtggtaactctgtcgaacttttgaggaactgtcaaactctttttctgaagcagctgtatcattttatattcccagtaacaacatatgaaggttttaatagttctgtatgcttgctaacacttcttataatgtgtctttttgattgtagccatcctaatgtacatactgtacaaatgtttatacatacccagtaaaaatgtttataaaaatattttagcacttactacgtaatcattgcttccatttgtgtacattgctattggtcccgtaaattgatacatttcttgtagtctttttggaaggctatttggcaggagctatacaaacatttcatttttttatgcaaataattcaatttctatcactttaaaaatcttatgaatataactcaaaaggaaaaagctgcacacataggtacttattgctcttaattataatagaatattaagagagctttatttactgggaggagaatgggttaatattcaatagtgagaatgctattttaacttggtgagctgttaaacatttattaaaacttatatagatcacacagcaatatggaaaaatatgaaatgtcaagtgagtatactgcatttatggctttgttaaaacatggaaaatacaaaaaaaagaaggcaatatgaaaagaaaattaaagcctggaaaaggctaacacattttctttcaatatgtatttttaaagttttatcaaacaaaaatatagagaatttgtcacttaaaaaaactagtgccagtaaattgtaccacgtttttgtacaatagtagcaaaattgaattttaatttgtgttgtttttccttgatatgagagctataaattatatagctttttaagattctcaacaattaattgcaattttcattaaatatctcaaagtaattacaataaaaatgtttgaaataagataatatgggtctggcctttaaatgttgatatgttgaccaaggactgaaagaaatgtccagagcttcacagtttctgctgggttgggggtggagggatggtgggaggaatgtgaattgggattgtagaattggagttgagataagatcagttcgaaggaagagtttgtgttttttttatatctttgatggttttaatttatataataatctatttatatgttatatattgtaaatgaattatttaattcccgttagtgttctctgagccagattccaacttcagttctgtggtcaattgaaatactttagaatggataatctgctatgaaatactgaatccattttgcttcctctctcttgattttgaaaaataattgctcttttctgttacaagagactttgtggcaagtgagacagtttaagtaaaaacttaaaagataagtaaatcttttgctgtgtgtattaattttggcaagccttcttacttggggattagctttttgtttcatagagttctttaatatctattgaaattattttgtttgtttcttaaagcagtttttacagttatatattgttccgaattcatcatttagctttatatgtacatgccagttagagtcagaatgatgggaataaaatgatttcattctgtctgtattattccctagaggtttgtgttcaccagagtttctctctttttaccttttactatatattgaaactacaaatgaaagagctcaatttcttagcatttataaaataagtactccagtgttatgtttaccaaaaatgtttgagtgagtcttctctttgtctttctcttttttaaaaaattcaggctctgctggttcttcatcagttagatagcattgatttgtggaatcctgatgctcctgtagaaacattttgggagattaggtatatgtacttttattttttaaattcaacttttaaattttattttgtatttttgtcttgaaatattaactctgtagtacttagtacattgtaaaacttacacttccaaaggttttatggttttgtattttatttgacttcaaattattagaatttcttgttttaactgtaagaaaagtatcacagcaatttagaaaataaattttaagaatagtgctaaattttgtcaccctaacataagtactgttgtttggtatattacttttttcagatttcaatgtggttactactgtatttttaatagattttcatagttataagcctagaatgataaaattttgtaacaatactgttttttcagttttttgaactatgatctttcataaactttctgtaataccaatgctttcgatgaatgaattaataatggacacctgcttagaagaaaaaaatgtatgcagaattttgtggtctgcttcctagattatacaaatcattacattttaatgagcatgaagtcaccacacggaggaaaatgtaaatgtgtaaacctcaagtttgccattatcttataagaatgggtgtgctaagttacttggcagctgaattaaaccttactctagagtagtgctgtccactagtaatataatgagaaccccatatgttaaaaacttttttacttactacattaaagagtaaaaagaagcaggtaaaattaattgtaattatgttttgtttaacccggtgtatattatctataatttcaacatgtaatcaatataaaagttattaatgacatttcattctcttttttttaataaagtcttcaaactttggtgtgtcttttatacttacagcacatctcaatttgaacaagccacacttaaagtgctcaatagccacgtgtggctggctagtggctaccatgttagacagtgcagctctggagtagggatcaggaaacttttctctaaaaggccagatagtaaatattttagggcttgtgggtcatatagtttctgtcataaccattcagttctgcctttggagcatgaaagtggccacagacatgtgaatgaacgggcatggctgtgtttaactaaaactgtatatttacaatagcaagtgataggctaggtttggcctgtggatggtagcttgcagacccccactgtggagcactgggtttataggcagtctctgctgtgcatgtggtttattgtttcttcttatgtctactacaaggatgagatacatggatagaaacactgggagtttaatgaaacatagggggcttatagataaatacttgctttttttctataacctgtagacttatttcctttgattataatgctattgacactttgataactgtttctctaaaaccttacaagaaaaactaagcttctctaaacttgtattcattatgggagaatgccattcttatgtctggttatatctgcattaggttattgatgatgctagtaacaatgaactttatgttactgcagctcacaaatgcttttttacatctgcaagaaattaactagtcatcaaatgcttagtagcacagaaattctcaagtggttgcgggaaatattgatctgcaggaataaatttcttcttaaaaataaggtaagcaaaatgacatatttaaaaaatggaagaatatttggaatggtaatggtgagagattactaaagtgttttatagccaaattaggttctatttcagcttctccttcctcccaatgttctcaaaaggaaatatgtatgcagaggacaatgactggcaaatcagcattttaaaaattattctgaggctttggccttagaaccacactgttgatgaattctagttctagttgagttaaataggtctctatggggcaggcctaggaaaagtgggggctgctataaccagagtagcttgaggagcatattgtatctttactcttaagttcatacataagacataattcatacataaaatttattttaacatatagcttctgtaatttaagaattctattatggcgtagatttgggagtacttgatttaatgggtttttgtccagttctagaatcatagctctgagaaatcgtaaagacctagatctcatggctagactagtccagagaattatctatcaagaagcaaaagggaaacagttgagggtcctcaatctagatttatttcgattcctccaataagggtttcacctcttgaaaatatcaggagactttttcattggggtggagtgaaatgttttgattctgaactattgaaacatggtgaggttgtggaagatagagaagagccttaaatttcttttaacatatagtttctgtaattaatcaatttaggaattctgttatggcctagttttcggagtacttgatttaatgagtttttatctggtactagaagcatagctgtgaaagaccttaaatgtatgaaactcatatccttttcagtatttacagcttgttattaataaattgtctctttagaaatagactaatggtgaagtgggtttattcacatgtgacttatttgatatgttaatgtagtggaatttggcattattccaaagatacagaaagagattagacttcagactttcatggcctcgcctatggtataatctccagaatgtgagtatgaggaatccagtaatgaattcatagtgccctggtaggcatagtcactcttgtgacatacttggtgtatatacataccagagttaattactggtccagaagaacttaatctcaagagccaatttctggttatcccaacatggcacagtataaaatcttatggaaaaaaaatctttgtcattgagatcaaattatagttttcatacagtagatttatattgttgatgttttactcatgtttatgtcagacttaatttatatttgtagaatctactgtttctgatgatttagagaatgggaaactgaaagaaattttaaagaattaagtaaaccttgtttgttctaatgggtttctagtgaatctccttcaagttggggcatagagattgagaggagaggttttttaggagagtctcaaacaggaagacaactcaaataagtgtttattcctcttggttgtcagtgcttcagtaaagcttatttatttatttttttctagcaggcagatagaagttcctgtcactttctccttttttacggggtaggatgtgatattccttctagtggaaataccagtcaaatgtccatggatcatgaagaattactacgtactcctggagcctctctccggaagggaaaagggaactcctctatggtcagcttcttctgtactttttctgtatcattttatgtgctctgtttgttttctgaatgaaatttggtaaatttcatctaggtaatatagtgtaatagtgaaaaactgcttagaatctagttctattactgctctttgtggaactttgggcaagttcttaacatccttgttcctcagttcctcaactttaaaatggggacagtaatagttcctgccccagagttgttaaagagggttaaataaaaggatgtgtaaatagcacttgacacttacaagctatatctgataattataattattataaacctccactccataaaaaacccattcataccacagaagtatagaattcgtaccggctaacaaaggtacagatttacagggataaaaacaaagtattttgcttcatgttaaagataagtgtttctgtgatttgtgtttgtgtgtataatttcttttaaatataaatcatatttcaagtgaaaatatcacatcattacagaagagtttattttccaaaccaaaacttttttcattcctaatttttaatgcaaccttgttaaggaagaaacacctaagcagtatgatatttactaatgtctgttttacttgtagaatttgcatttattttatcaattattttctccatttcgtgtttggagaataagtaattcagaatcaaatgtatcttctacagcaatatttagttcttgtttatgcccttgtttcaatgagtgctgcagtgtacttattttattacttccctatagcaagtagatagaatttcctgttacttcctctttttttgtcatttctaattgactgggaggtacattatattgttactgcagtagatttacgttatggtgtttacctgtccatgttagaatcagtttacatttctggaatctggaataggataatatctatttgatttgaaattgaacagatggtagcattatgttggtccagataatctcatttctcatttggacaagatattttggggtttgaaaaattcctataatgattaaaggaaaaagctcttgtgagttattgtatgcggagacacacacacacacacacacacacacacacacacacacacagtttattgcattgttagattttatacataaaattacccaagttgcaaatatatgtcttccacccttgactctcaggatagtgcagcaggatgcagcggaacccccccgatttgccgacaagcccagaccaaactagaagtggccctgtacatgtttctgtggaaccctgacactgaagctgttctggttgccatgtcctgtttccgccacctctgtgaggaagcagatatccggtgtggggtggatgaagtgtcagtgcataacctcttgcccaactataacacattcatggagtttgcctctgtcagcaatatgatgtcaacaggtaaatgtgaatagtggttttttttactcagtctgcctcaaagcacatggcatctgattttgagaatgtatttaaggtcactactttgtaagtttacaggggaaattcaagtagcttacttgaaatccttttctgaacaaagtaagatgaaaataaaaagcatttgaaataaattgttagtcttccactgagttgttaatatgctatacattttaaaaataactggcagtagatgttactatcagttatgattatgtaatttactctgcctaagttgtagatagtgaagttttacaaacattggcgtatgttttgagtaaattgtaggtgggaatagctattttattctgtggacattgtagagtccaagataagtacctttcctgtgaggttagtgaaaggaagtttttggctttatcatttgaagcatttgctctgctcttcctactccttttgggtggagcttatcaggttctccattggcaggcagggctctaagtgcagtaacttgatttgctgttgtatttgcttaggaagagcagcacttcagaaaagagtgatggcactgctgaggcgcattgagcatcccactgcaggaaacactgaggtatgcccttagcaacagaaacacccctcccaggcgcccaccctcaatttggaagcctcttgttacatatgtgtgatcaggaatagcttttgaagtaaatccaagatacgtgcatattacaagtataatatctgagtatttaatatacatcaagtttgaaacttggctgtagctgattgatgtttagctctagactaagttgctttcaagtgataattgccttcattttaggcttgggaagatacacatgcaaaatgggaacaagcaacaaagctaatccttaactatccaaaagccaaaatggaagatggccaggtaagtctgtaaagttgacttttgtctgttaactgatctgctaaatatatgtacttcactttgataatctttcaagagtcgctcagtaaagtaaacatatagctgtgtgaagactgatatttagttgtggtttatctagacctgtactttgtaatgtggtagctactagctatgtgtgactatttaacttaaattttaacataattaaaattaaataaaatttagttcctcaatcatatagtaaccacatcgcaagtaccagtagccacatatgacaattacttactctattggacagcagagagagaaaatgttcctgtcatcacagaaatactgggcagcactgctagagactgtttgttgcagagaccatttctttaccttttcttgctctttctcccttcatcagggtgtttcacagaattttcagaaaaggagcaacagaggtagagataaattaacatggaaacaattcattttgctattttgttaggtattctaattaaggaatgtcttaggcagtagattgatcccatagagtaaatgaaattttaaaatgtggacagttcattcaactattactattgactatattatctgttactttggaaattaatgatcagttagtgtttgtgtgtatttgatttgtaatgttcatattgctctcattattaggtgatttataaaaactggttgttcctccatggtgtttttgtcatgcttaattacaataggaaaaagttatatttttacgaagcaaatgtgtgtacctaatacctttatttggaggggacatgtagctttagaatgaaagcttttggggggataactgttttatataattacataccatacagttcacccatttaaagtgtccaattcagtgactgtttttaatgtattcacagagttgtgcaaccatcaccacaatcaagttttagaacaatttcatcaattgagaaaaaaaccccgtaccctttagctatctctgcctctaaccaccccccacccactttcttgcctctcttcccccaacgtctctagccctaggcaaccatgaatctactttctgtctttgtagatttgcctattccggatatattctgtaaatggaattatagaatatgtgggcttttgtgattagcttctttcacttagcatgatgtttccaaggttcatccatgtgaaatcaaaactttttaaaagaaatttgacactcggctgattatattagtgtatgataaaaatagatcagtggctctttaaaaatgtatatggtaattttatgggttgattttaatgtatattttacattttttgtacttttgtcatggaagaaatgttggataaagcataatttgtcaagtctcaactaattaaggtttaattcatgctttgcacaaaaattttgtgtttaggctgctgaaagccttcacaagaccattgttaagaggcgaatgtcccatgtgagtggaggaggatccatagatttgtctgacacagactccctacaggaatggatcaacatgactggcttcctttgtgcccttgggggagtgtgcctccagcagagaagcaattctggcctggcaacctatagcccacccatgggtccagtcagtgaacgtaagggttctatgatttcagtgatgtcttcagagggaaacgcagatacacctgtcagcaaatttatggatcggctgttgtccttaatggtgtgtaaccatgagaaagtgggacttcaaatacggaccaatgttaaggatctggtgggtctagaattgagtcctgctctgtatccaatgctatttaacaaattgaagaataccatcagcaagttttttgactcccaaggacaggtaaagtgttctcttatttttcacctttctctatgaatagagtgacttgtttgaaataagcctttttctttcagattatttaaattaggtactcacagtttttaaaaatttccaaaaaattgcagaaagaagagtcatctcaatgtaggggtcagcttgcctcttaggaactctggtgtgtatgtgtgcctaagggtatacgtgccctgtgtatgggtacgagtgtctgcgtatatctgtatgcttatttggctctatgcctgtgggtgcacttactctgtgtgtttagatcagtcagtttcatctctctagggggtctgtcttctgggcattgatggcaaatcattaatgtatttgttctttctttaggttttattgactgataccaatactcaatttgtagaacaaaccatagctataatgaagaacttgctagataatcatactgaaggcagctctgaacatctagggcaagctagcattgaaacaatgatgttaaatctggtcaggtaagcattctactgaaatgtagcagaaacattttaagagataagaaaaacctcttacacactgatactggtagtaattgataaaataactggccattctttactgcacacaaactagggtgtgacagtaaggtagccagaagttgtgtacgttcttttctaaataaatatcttattgttttcaaacttacatttaattcgttttacttgatgactaaagtatttagaatgccttctcttttgtctatatctgataatttttttattgtttctatgtctatataggtatgttcgtgtgcttgggaatatggtccatgcaattcaaataaaaacgaaactgtgtcaattagttgaagtaatgatggcaaggagagatgacctctcattttgccaagagatgaaatttaggtgagttctcaaaagagcaatgtagggtcttgtaaatcttaatatgtccaatgaagtacagaaaaagagtagatatgcggttattggtagaaaggaggacatgaaaagagagcaatttacatgtttgtttttctctacatctcttctcaaatttccctaagctttgtgcctgtgacaatgctccctttttctaaaactgtgctatacttgagctaagaatttgattctatttccaatctgataccataactaagggccatgatggaggataaatatccatgttgcttgttcccttctggcttttatgtctgtgatagcagtatctcttttataaagtcgtcatgtcacttaggttatctggcaaattatttgcactataagaaatcttacgtgactaaaggtgtgtgtgtggcttcaaaaacattgtttgctgtttctcttttctccaccattctataggaataagatggtagaatacctgacagactgggttatgggaacatcaaaccaagcagcagatgatgatgtaaaatgtcttacaaggtaaaaaaagaatgaccttcaagtattagtgggttttactgtgagagttataactacttaattacagctttatacttgtattttgtgtgtatttaaacttttgagatgtcaaacttttgtgtttgaaatatgtaaagatgctaatctttattactgcttttttttgactgatagactttcagtaaaattaaatgtgaaagagtgatatgtttgggaagttagtgttgtcagtttatgaagaatagtctacagttattgggaaataagatacataaagcctcagattgcatttgtgttatgattagatagataaaggtattatttgaggaactcattgtgttgaatctttttaagaaataattgatttcctgattcaagcaccagagacagaaaaaaaaggaagtaatcaagtctgctttaatgatacttattgacacatatcagaaaatgattaaacactatggactgtataataagcattcacatatgtttctttgaccaagcctagctttataatacagtcttctctgtcagggattggttccaagaaccactccccaaacccctgcccacatcttactcccatgaacactaaaatccacagatgctcaagtccctgacttaagatgtcatagtatttgcatataaactatacacatcctcccatatatttttaattatcttcagattacttataatatctaatacaatataaatgttgtataaatatttgttataccatattgtttagggaataacaacaacaaaaaatctgtacatgttgagtacagatgaaaccctccttttttttcccccaaatattttcaatccatgggtggttgaatccatggatatagaactcactgatacagagggcccattgtacatgcttctgatttaaggtagccattttgccaagattactttgtagaaagtaagtattaccttctccccatttgagatgattttgtattctgggatctgcatattaactcaaattatttgggttgtgctaataatttgtttaatgaaataggtagttcctaaggtttatatctgttagtaagaggtttatttgaggggaagtgaaagaacttgaaagattcatggtctctaaattttttttttttttttttttttttttcagagatttggaccaggcaagcatggaagcagtagtttcacttctagctggtctccctctgcagcctgaagaaggagatggtgtggaattgatggaagccaaatcacagttatttcttaagtaaatttcagtcaccaaaaaacataaagcaaaaagcaaataaagccccccaccacacaaaaaaagcaaagaaataatacccatgacaggactaggataggaaaataactgtgttttgtgatttttttaaagaaagtaatatgatcagtgaaattttgcttataataaaacccagattgcttcattaagtcatttacaaaagtgacattgtctaagctgtttggaccactaattttatatactaacattaaaagtgacacatttaccaggtaatattgcatctatttgatgctaatgttatgaaaggtatactaggctatatcaggtaaaatcatgtccaacatagcacacttcataataagccaccctggctgattatcgcgagagaggagagaaacagttaacccagggccattcacaccatgcacatatgattgttttggaatgtctggttagctttctagttgatacggccttcactatgtaaaggtcagtctttttatttctcagatacttcacattatttatgaaccttttgaatgactgcagtgaagttgaagatgaaagtgcgcaaacaggtggcaggaaacgtggcatgtctcggaggctggcatcactgaggcactgtacggtccttgcaatgtcaaacttactcaatgccaacgtagacagtggtctcatgcactccataggtgagatcaaatgaaagtttcatatagaaatacaaaacctagagaactggcatgtaagagaagcaaaaattacttcagcaaggccatgttagtaaatttgcatctgtttgtccacattaggcttaggttaccacaaggatctccagacaagagctacatttatggaagttctgacaaaaatccttcaacaaggcacagaatttgacacacttgcagaaacagtattggctgatcggtttgagagattggtggaactggtcacaatgatgggtgatcaaggagaactccctatagcgatggctctggccaatgtggttccttgttctcagtgggtaagtgattagagtaagcggggaagaaaagtgcctggcacatagcaaatccttcagaatatatttgttcaataaatgtttgttgaatgaattgataaaatttcagagccagaagaaagatgtttagttaggtgatttttcagctgtagggaagtggttggcaccactagacctgactagtgttctgtatcatttcatcctactaaaaaattccatttaaacgcattaaaaatcactgatctactctggtgtcttcatatatttgataaggtaattaggttaaacctaattttagttagttgttgcaatgctggaattggaatccacgatttgtgcctgtttactacctccagtttgctattcttttccccataatgtctcatacagttttttaaaaatttaagcactatatttgcatttgatattatgatattgtttattttaaaaactgaaagcgtcatatggctatgtctctctcttaatttaatgaaaaattttcctaaaatcacatcattcttaatacatgctaaaacgttgagacgggttgttgttcctttccagtgttaaaaggctatttgctttttagtgtaccaaaactgatttcagttatagtaaattatgactaataaggtaatctgtccttgttaacaagcctgtatttgttatacctgtacttaaagtaaaattcaaactccttaccctgtcctacaaggctctacctgatctgggccctacctcatctctaacatcatcttatgctattttctttcttgttcaccagagccacaccagctacctttctgtccctccttgttagacttatttctgctttagagcacccttgctgctgccaccacctgaaatgcttctcttctggtattttattttggtgagaacacctggcatgagatctaccctctaacagatttttaagtgtataatacagtattgctgtctgtaggcacaatgctgcacagcagatctctagaacttaccttgtataactgaaattttatactcattgattagcaacagccccaaattattgaaacctccttgaagcctaaatttcagaaatgttcaaatgttttgaaaatggatattctgaattatcttattagcatctacctataattagcactgaaaatagtaattttttaaataaagaatcagttaagggccgggtgtggtcgctcacgcctgtaatcccagcactttgggaggctgaggcgggaggatcacaaggtcgggagatcgagaccatcctggctaacaccgtgaaaccctgtctctactaaaaaaatacaaaaaaatcagctgggcgtggtggcaggtgccaatagtcccagctacttgggaggctgaggcaggagaatggtgtgaacccaggagggttgcagtgagccaagatctcgccactgcactccagcctgggcgacagagcgagactctgtctcaaaaaaaaaaaaaaaaaaaaaaaaaagaatcatttagttcaagtagctttaattcgttgagttttatattaaatgactttgagaaggaattttc

SEQ ID NO: 86 - DNA, 151838 bp, Homo sapiens
gaaaattccttctcaaagtcatttaatataaaactcaacgaattaaagctacttgaactaaatgattcttttttttttttttttttttttttttgagacagagtctcgctctgtcgcccaggctggagtgcagtggcgagatcttggctcactgcaaccctcctgggttcacaccattctcctgcctcagcctcccaagtagctgggactattggcacctgccaccacgcccagctgatttttttgtatttttttagtagagacagggtttcacggtgttagccaggatggtctcgatctcccgaccttgtgatcctcccgcctcagcctcccaaagtgctgggattacaggcgtgagcgaccacacccggcccttaactgattctttatttaaaaaattactattttcagtgctaattataggtagatgctaataagataattcagaatatccattttcaaaacatttgaacatttctgaaatttaggcttcaaggaggtttcaataatttggggctgttgctaatcaatgagtataaaatttcagttatacaaggtaagttctagagatctgctgtgcagcattgtgcctacagacagcaatactgtattatacacttaaaaatctgttagagggtagatctcatgccaggtgttctcaccaaaataaaataccagaagagaagcatttcaggtggtggcagcagcaagggtgctctaaagcagaaataagtctaacaaggagggacagaaaggtagctggtgtggctctggtgaacaagaaagaaaatagcataagatgatgttagagatgaggtagggcccagatcaggtagagccttgtaggacagggtaaggagtttgaattttactttaagtacaggtataacaaatacaggcttgttaacaaggacagattaccttattagtcataatttactataactgaaatcagttttggtacactaaaaagcaaatagccttttaacactggaaaggaacaacaacccgtctcaacgttttagcatgtattaagaatgatgtgattttaggaaaatttttcattaaattaagagagagacatagccatatgacgctttcagtttttaaaataaacaatatcataatatcaaatgcaaatatagtgcttaaatttttaaaaaactgtatgagacattatggggaaaagaatagcaaactggaggtagtaaacaggcacaaatcgtggattccaattccagcattgcaacaactaactaaaattaggtttaacctaattaccttatcaaatatatgaagacaccagagtagatcagtgatttttaatgcgtttaaatggaattttttagtaggatgaaatgatacagaacactagtcaggtctagtggtgccaaccacttccctacagctgaaaaatcacctaactaaacatctttcttctggctctgaaattttatcaattcattcaacaaacatttattgaacaaatatattctgaaggatttgctatgtgccaggcacttttcttccccgcttactctaatcacttacccactgagaacaaggaaccacattggccagagccatcgctatagggagttctccttgatcacccatcattgtgaccagttccaccaatctctcaaaccgatcagccaatactgtttctgcaagtgtgtcaaattctgtgccttgttgaaggatttttgtcagaacttccataaatgtagctcttgtctggagatccttgtggtaacctaagcctaatgtggacaaacagatgcaaatttactaacatggccttgctgaagtaatttttgcttctcttacatgccagttctctaggttttgtatttctatatgaaactttcatttgatctcacctatggagtgcatgagaccactgtctacgttggcattgagtaagtttgacattgcaaggaccgtacagtgcctcagtgatgccagcctccgagacatgccacgtttcctgccacctgtttgcgcactttcatcttcaacttcactgcagtcattcaaaaggttcataaataatgtgaagtatctgagaaataaaaagactgacctttacatagtgaaggccgtatcaactagaaagctaaccagacattccaaaacaatcatatgtgcatggtgtgaatggccctgggttaactgtttctctcctctctcgcgataatcagccagggtggcttattatgaagtgtgctatgttggacatgattttacctgatatagcctagtatacctttcataacattagcatcaaatagatgcaatattacctggtaaatgtgtcacttttaatgttagtatataaaattagtggtccaaacagcttagacaatgtcacttttgtaaatgacttaatgaagcaatctgggttttattataagcaaaatttcactgatcatattactttctttaaaaaaatcacaaaacacagttattttcctatcctagtcctgtcatgggtattatttctttgctttttttgtgtggtggggggctttatttgctttttgctttatgttttttggtgactgaaatttacttaagaaataactgtgatttggcttccatcaattccacaccatctccttcttcaggctgcagagggagaccagctagaagtgaaactactgcttccatgcttgcctggtccaaatctctgaaaaaaaaaaaaaaaaaaaaaaaaaatttagagaccatgaatctttcaagttctttcacttcccctcaaataaacctcttactaacagatataaaccttaggaactacctatttcattaaacaaattattagcacaacccaaataatttgagttaatatgcagatcccagaatacaaaatcatctcaaatggggagaaggtaatacttactttctacaaagtaatcttggcaaaatggctaccttaaatcagaagcatgtacaatgggccctctgtatcagtgagttctatatccatggattcaaccacccatggattgaaaatatttgggggaaaaaaaaggagggtttcatctgtactcaacatgtacagattttttgttgttgttattccctaaacaatatggtataacaaatatttatacaacatttatattgtattagatattataagtaatctgaagataattaaaaatatatgggaggatgtgtatagtttatatgcaaatactatgacatcttaagtcagggacttgagcatctgtggattttagtgttcatgggagtaagatgtgggcaggggtttggggagtggttcttggaaccaatccctgacagagaagactgtattataaagctaggcttggtcaaagaaacatatgtgaatgcttattatacagtccatagtgtttaatcattttctgatatgtgtcaataagtatcattaaagcagacttgattacttccttttttttctgtctctggtgcttgaatcaggaaatcaattatttcttaaaaagattcaacacaatgagttcctcaaataatacctttatctatctaatcataacacaaatgcaatctgaggctttatgtatcttatttcccaataactgtagactattcttcataaactgacaacactaacttcccaaacatatcactctttcacatttaattttactgaaagtctatcagtcaaaaaaaagcagtaataaagattagcatctttacatatttcaaacacaaaagtttgacatctcaaaagtttaaatacacacaaaatacaagtataaagctgtaattaagtagttataactctcacagtaaaacccactaatacttgaaggtcattctttttttaccttgtaagacattttacatcatcatctgctgcttggtttgatgttcccataacccagtctgtcaggtattctaccatcttattcctatagaatggtggagaaaagagaaacagcaaacaatgtttttgaagccacacacacacctttagtcacgtaagatttcttatagtgcaaataatttgccagataacctaagtgacatgacgactttataaaagagatactgctatcacagacataaaagccagaagggaacaagcaacatggatatttatcctccatcatggcccttagttatggtatcagattggaaatagaatcaaattcttagctcaagtatagcacagttttagaaaaagggagcattgtcacaggcacaaagcttagggaaatttgagaagagatgtagagaaaaacaaacatgtaaattgctctcttttcatgtcctcctttctaccaataaccgcatatctactctttttctgtacttcattggacatattaagatttacaagaccctacattgctcttttgagaactcacctaaatttcatctcttggcaaaatgagaggtcatctctccttgccatcattacttcaactaattgacacagtttcgtttttatttgaattgcatggaccatattcccaagcacacgaacatacctatatagacatagaaacaataaaaaaattatcagatatagacaaaagagaaggcattctaaatactttagtcatcaagtaaaacgaattaaatgtaagtttgaaaacaataagatatttatttagaaaagaacgtacacaacttctggctaccttactgtcacaccctagtttgtgtgcagtaaagaatggccagttattttatcaattactaccagtatcagtgtgtaagaggtttttcttatctcttaaaatgtttctgctacatttcagtagaatgcttacctgaccagatttaacatcattgtttcaatgctagcttgccctagatgttcagagctgccttcagtatgattatctagcaagttcttcattatagctatggtttgttctacaaattgagtattggtatcagtcaataaaacctaaagaaagaacaaatacattaatgatttgccatcaatgcccagaagacagaccccctagagagatgaaactgactgatctaaacacacagagtaagtgcacccacaggcatagagccaaataagcatacagatatacgcagacactcgtacccatacacagggcacgtatacccttaggcacacatacacaccagagttcctaagaggcaagctgacccctacattgagatgactcttctttctgcaattttttggaaatttttaaaaactgtgagtacctaatttaaataatctgaaagaaaaaggcttatttcaaacaagtcactctattcatagagaaaggtgaaaaataagagaacactttacctgtccttgggagtcaaaaaacttgctgatggtattcttcaatttgttaaatagcattggatacagagcaggactcaattctagacccaccagatccttaacattggtccgtatttgaagtcccactttctcatggttacacaccattaaggacaacagccgatccataaatttgctgacaggtgtatctgcgtttccctctgaagacatcactgaaatcatagaacccttacgttcactgactggacccatgggtgggctataggttgccaggccagaattgcttctctgctggaggcacactcccccaagggcacaaaggaagccagtcatgttgatccattcctgtagggagtctgtgtcagacaaatctatggatcctcctccactcacatgggacattcgcctcttaacaatggtcttgtgaaggctttcagcagcctaaacacaaaatttttgtgcaaagcatgaattaaaccttaattagttgagacttgacaaattatgctttatccaacatttcttccatgacaaaagtacaaaaaatgtaaaatatacattaaaatcaacccataaaattaccatatacatttttaaagagccactgatctatttttatcatacactaatataatcagccgagtgtcaaatttcttttaaaaagttttgatttcacatggatgaaccttggaaacatcatgctaagtgaaagaagctaatcacaaaagcccacatattctataattccatttacagaatatatccggaataggcaaatctacaaagacagaaagtagattcatggttgcctagggctagagacgttgggggaagagaggcaagaaagtgggtggggggtggttagaggcagagatagctaaagggtacggggtttttttctcaattgatgaaattgttctaaaacttgattgtggtgatggttgcacaactctgtgaatacattaaaaacagtcactgaattggacactttaaatgggtgaactgtatggtatgtaattatataaaacagttatccccccaaaagctttcattctaaagctacatgtcccctccaaataaaggtattaggtacacacatttgcttcgtaaaaatataactttttcctattgtaattaagcatgacaaaaacaccatggaggaacaaccagtttttataaatcacctaataatgagagcaatatgaacattacaaatcaaatacacacaaacactaactgatcattaatttccaaagtaacagataatatagtcaatagtaatagttgaatgaactgtccacattttaaaatttcatttactctatgggatcaatctactgcctaagacattccttaattagaatacctaacaaaatagcaaaatgaattgtttccatgttaatttatctctacctctgttgctccttttctgaaaattctgtgaaacaccctgatgaagggagaaagagcaagaaaaggtaaagaaatggtctctgcaacaaacagtctctagcagtgctgcccagtatttctgtgatgacaggaacattttctctctctgctgtccaatagagtaagtaattgtcatatgtggctactggtacttgcgatgtggttactatatgattgaggaactaaattttatttaattttaattatgttaaaatttaagttaaatagtcacacatagctagtagctaccacattacaaagtacaggtctagataaaccacaactaaatatcagtcttcacacagctatatgtttactttactgagcgactcttgaaagattatcaaagtgaagtacatatatttagcagatcagttaacagacaaaagtcaactttacagacttacctggccatcttccattttggcttttggatagttaaggattagctttgttgcttgttcccattttgcatgtgtatcttcccaagcctaaaatgaaggcaattatcacttgaaagcaacttagtctagagctaaacatcaatcagctacagccaagtttcaaacttgatgtatattaaatactcagatattatacttgtaatatgcacgtatcttggatttacttcaaaagctattcctgatcacacatatgtaacaagaggcttccaaattgagggtgggcgcctgggaggggtgtttctgttgctaagggcatacctcagtgtttcctgcagtgggatgctcaatgcgcctcagcagtgccatcactcttttctgaagtgctgctcttcctaagcaaatacaacagcaaatcaagttactgcacttagagccctgcctgccaatggagaacctgataagctccacccaaaaggagtaggaagagcagagcaaatgcttcaaatgataaagccaaaaacttcctttcactaacctcacaggaaaggtacttatcttggactctacaatgtccacagaataaaatagctattcccacctacaatttactcaaaacatacgccaatgtttgtaaaacttcactatctacaacttaggcagagtaaattacataatcataactgatagtaacatctactgccagttatttttaaaatgtatagcatattaacaactcagtggaagactaacaatttatttcaaatgctttttattttcatcttactttgttcagaaaaggatttcaagtaagctacttgaatttcccctgtaaacttacaaagtagtgaccttaaatacattctcaaaatcagatgccatgtgctttgaggcagactgagtaaaaaaaaccactattcacatttacctgttgacatcatattgctgacagaggcaaactccatgaatgtgttatagttgggcaagaggttatgcactgacacttcatccaccccacaccggatatctgcttcctcacagaggtggcggaaacaggacatggcaaccagaacagcttcagtgtcagggttccacagaaacatgtacagggccacttctagtttggtctgggcttgtcggcaaatcgggggggttccgctgcatcctgctgcactatcctgagagtcaagggtggaagacatatatttgcaacttgggtaattttatgtataaaatctaacaatgcaataaactgtgtgtgtgtgtgtgtgtgtgtgtgtgtgtgtgtgtgtgtctccgcatacaataactcacaagagctttttcctttaatcattataggaatttttcaaaccccaaaatatcttgtccaaatgagaaatgagattatctggaccaacataatgctaccatctgttcaatttcaaatcaaatagatattatcctattccagattccagaaatgtaaactgattctaacatggacaggtaaacaccataacgtaaatctactgcagtaacaatataatgtacctcccagtcaattagaaatgacaaaaaaagaggaagtaacaggaaattctatctacttgctatagggaagtaataaaataagtacactgcagcactcattgaaacaagggcataaacaagaactaaatattgctgtagaagatacatttgattctgaattacttattctccaaacacgaaatggagaaaataattgataaaataaatgcaaattctacaagtaaaacagacattagtaaatatcatactgcttaggtgtttcttccttaacaaggttgcattaaaaattaggaatgaaaaaagttttggtttggaaaataaactcttctgtaatgatgtgatattttcacttgaaatatgatttatatttaaaagaaattatacacacaaacacaaatcacagaaacacttatctttaacatgaagcaaaatactttgtttttatccctgtaaatctgtacctttgttagccggtacgaattctatacttctgtggtatgaatgggttttttatggagtggaggtttataataattataattatcagatatagcttgtaagtgtcaagtgctatttacacatccttttatttaaccctctttaacaactctggggcaggaactattactgtccccattttaaagttgaggaactgaggaacaaggatgttaagaacttgcccaaagttccacaaagagcagtaatagaactagattctaagcagtttttcactattacactatattacctagatgaaatttaccaaatttcattcagaaaacaaacagagcacataaaatgatacagaaaaagtacagaagaagctgaccatagaggagttcccttttcccttccggagagaggctccaggagtacgtagtaattcttcatgatccatggacatttgactggtatttccactagaaggaatatcacatcctaccccgtaaaaaaggagaaagtgacaggaacttctatctgcctgctagaaaaaaataaataaataagctttactgaagcactgacaaccaagaggaataaacacttatttgagttgtcttcctgtttgagactctcctaaaaaacctctcctctcaatctctatgccccaacttgaaggagattcactagaaacccattagaacaaacaaggtttacttaattctttaaaatttctttcagtttcccattctctaaatcatcagaaacagtagattctacaaatataaattaagtctgacataaacatgagtaaaacatcaacaatataaatctactgtatgaaaactataatttgatctcaatgacaaagattttttttccataagattttatactgtgccatgttgggataaccagaaattggctcttgagattaagttcttctggaccagtaattaactctggtatgtatatacaccaagtatgtcacaagagtgactatgcctaccagggcactatgaattcattactggattcctcatactcacattctggagattataccataggcgaggccatgaaagtctgaagtctaatctctttctgtatctttggaataatgccaaattccactacattaacatatcaaataagtcacatgtgaataaacccacttcaccattagtctatttctaaagagacaatttattaataacaagctgtaaatactgaaaaggatatgagtttcatacatttaaggtctttcacagctatgcttctagtaccagataaaaactcattaaatcaagtactccgaaaactaggccataacagaattcctaaattgattaattacagaaactatatgttaaaagaaatttaaggctcttctctatcttccacaacctcaccatgtttcaatagttcagaatcaaaacatttcactccaccccaatgaaaaagtctcctgatattttcaagaggtgaaacccttattggaggaatcgaaataaatctagattgaggaccctcaactgtttcccttttgcttcttgatagataattctctggactagtctagccatgagatctaggtctttacgatttctcagagctatgattctagaactggacaaaaacccattaaatcaagtactcccaaatctacgccataatagaattcttaaattacagaagctatatgttaaaataaattttatgtatgaattatgtcttatgtatgaacttaagagtaaagatacaatatgctcctcaagctactctggttatagcagcccccacttttcctaggcctgccccatagagacctatttaactcaactagaactagaattcatcaacagtgtggttctaaggccaaagcctcagaataatttttaaaatgctgatttgccagtcattgtcctctgcatacatatttccttttgagaacattgggaggaaggagaagctgaaatagaacctaatttggctataaaacactttagtaatctctcaccattaccattccaaatattcttccattttttaaatatgtcattttgcttaccttatttttaagaagaaatttattcctgcagatcaatatttcccgcaaccacttgagaatttctgtgctactaagcatttgatgactagttaatttcttgcagatgtaaaaaagcatttgtgagctgcagtaacataaagttcattgttactagcatcatcaataacctaatgcagatataaccagacataagaatggcattctcccataatgaatacaagtttagagaagcttagtttttcttgtaaggttttagagaaacagttatcaaagtgtcaatagcattataatcaaaggaaataagtctacaggttatagaaaaaaagcaagtatttatctataagccccctatgtttcattaaactcccagtgtttctatccatgtatctcatccttgtagtagacataagaagaaacaataaaccacatgcacagcagagactgcctataaacccagtgctccacagtgggggtctgcaagctaccatccacaggccaaacctagcctatcacttgctattgtaaatatacagttttagttaaacacagccatgcccgttcattcacatgtctgtggccactttcatgctccaaaggcagaactgaatggttatgacagaaactatatgacccacaagccctaaaatatttactatctggccttttagagaaaagtttcctgatccctactccagagctgcactgtctaacatggtagccactagccagccacacgtggctattgagcactttaagtgtggcttgttcaaattgagatgtgctgtaagtataaaagacacaccaaagtttgaagactttattaaaaaaaagagaatgaaatgtcattaataacttttatattgattacatgttgaaattatagataatatacaccgggttaaacaaaacataattacaattaattttacctgcttctttttactctttaatgtagtaagtaaaaaagtttttaacatatggggttctcattatattactagtggacagcactactctagagtaaggtttaattcagctgccaagtaacttagcacacccattcttataagataatggcaaacttgaggtttacacatttacattttcctccgtgtggtgacttcatgctcattaaaatgtaatgatttgtataatctaggaagcagaccacaaaattctgcatacatttttttcttctaagcaggtgtccattattaattcattcatcgaaagcattggtattacagaaagtttatgaaagatcatagttcaaaaaactgaaaaaacagtattgttacaaaattttatcattctaggcttataactatgaaaatctattaaaaatacagtagtaaccacattgaaatctgaaaaaagtaatataccaaacaacagtacttatgttagggtgacaaaatttagcactattcttaaaatttattttctaaattgctgtgatacttttcttacagttaaaacaagaaattctaataatttgaagtcaaataaaatacaaaaccataaaacctttggaagtgtaagttttacaatgtactaagtactacagagttaatatttcaagacaaaaatacaaaataaaatttaaaagttgaatttaaaaaataaaagtacatatacctaatctcccaaaatgtttctacaggagcatcaggattccacaaatcaatgctatctaactgatgaagaaccagcagagcctgaattttttaaaaaagagaaagacaaagagaagactcactcaaacatttttggtaaacataacactggagtacttattttataaatgctaagaaattgagctctttcatttgtagtttcaatatatagtaaaaggtaaaaagagagaaactctggtgaacacaaacctctagggaataatacagacagaatgaaatcattttattcccatcattctgactctaactggcatgtacatataaagctaaatgatgaattcggaacaatatataactgtaaaaactgctttaagaaacaaacaaaataatttcaatagatattaaagaactctatgaaacaaaaagctaatccccaagtaagaaggcttgccaaaattaatacacacagcaaaagatttacttatcttttaagtttttacttaaactgtctcacttgccacaaagtctcttgtaacagaaaagagcaattatttttcaaaatcaagagagaggaagcaaaatggattcagtatttcatagcagattatccattctaaagtatttcaattgaccacagaactgaagttggaatctggctcagagaacactaacgggaattaaataattcatttacaatatataacatataaatagattattatataaattaaaaccatcaaagatataaaaaaaacacaaactcttccttcgaactgatcttatctcaactccaattctacaatcccaattcacattcctcccaccatccctccacccccaacccagcagaaactgtgaagctctggacatttctttcagtccttggtcaacatatcaacatttaaaggccagacccatattatcttatttcaaacatttttattgtaattactttgagatatttaatgaaaattgcaattaattgttgagaatcttaaaaagctatataatttatagctctcatatcaaggaaaaacaacacaaattaaaattcaattttgctactattgtacaaaaacgtggtacaatttactggcactagtttttttaagtgacaaattctctatatttttgtttgataaaactttaaaaatacatattgaaagaaaatgtgttagccttttccaggctttaattttcttttcatattgccttcttttttttgtattttccatgttttaacaaagccataaatgcagtatactcacttgacatttcatatttttccatattgctgtgtgatctatataagttttaataaatgtttaacagctcaccaagttaaaatagcattctcactattgaatattaacccattctcctcccagtaaataaagctctcttaatattctattataattaagagcaataagtacctatgtgtgcagctttttccttttgagttatattcataagatttttaaagtgatagaaattgaattatttgcataaaaaaatgaaatgtttgtatagctcctgccaaatagccttccaaaaagactacaagaaatgtatcaatttacgggaccaatagcaatgtacacaaatggaagcaatgattacgtagtaagtgctaaaatatttttataaacatttttactgggtatgtataaacatttgtacagtatgtacattaggatggctacaatcaaaaagacacattataagaagtgttagcaagcatacagaactattaaaaccttcatatgttgttactgggaatataaaatgatacagctgcttcagaaaaagagtttgacagttcctcaaaagttcgacagagttaccacacgacttagcagttccactcctatatacttaagagatatgtccacatatagacttttacacaaatgttcatagcagcattatttgtaatagctaaaaagtagaaacaacaccaaacgtccaccaactgataactagatgaacaaaacagatccatacaatgaaatatttggcaataaaaaggaagaaaatagtgattcataccacaacataaatgaaccttgaaagcattaagtcaaggtagccagacataaaaggccacatattctatgattctatttatatgaaatatctaaaacaagcaaatccatagagacagaaaatagattagtagttggtagggatgagggaatggggagtcaagtttctttctggggtgataaaaatgttatggattagagagtagctatagttgcacaactgtgtgaataagaactacttaggggggaggggggagggataccattaggagatatacctaatgctaaatgacaagttaatgggtgcagcacaccaacatggcacatgtatacatatgtaacaaacctgcacattgtgcgcatgtaacctaaaacttaaaagtacaataataataaaatttaaaaaaaagaactacttaaaatggccaaattgagggtatgtgaattatgtctcaatttaaaaattagtatttttaatatttaataataatatttttaaaaattttaaagtcaactgcaattagaaaatctcgaactattttattaagcatcagaatttgtacaatgttattgctatgtgatacaaagcaagtaaaccccttctttctccatggagttttataaaacaatgtatagacataaacataccatttccagaaatgacatctacctgttactcacagaaaccacacaccaaaggaacatcatgaatgtacatagttacaatctttccttcaagaacatggaattcattttccccttacctccattgcttcctgagcaatctctggcatgtgtgactgagggaccagttggacgagccctgtaattaattctgctgtactgccttgggtttcgggcccctgttttcttggattctgcaaggaaaaaaaggaaacttcaattaaaaaaataaataaatcgagagagattagaaggaggaagaaatagacagtgactgctaaagggtaccaagtttcttttaggggtgataacaatgttctagaactaggctggacgcggtggttcacgcctgtaagcccaggactttgggaggtagtggcgggtggatcacctgaagtcaggagtttgagaccagcctgaccaatatggtgaaattctatctctactaaaaatataaaaattagccaggcgtggtggcatgcgcctgtggtcccagccacttgggaggctgaggcaggagaatcgcttgaagctgggaggcggtggttgcagtgagccaagattgcaccgctgcactccagcctgggtggcagagcgagactccatctggaaaaaagaaaaaaagaaaaaagaaaaaaaagaaagaaagaaaaaaaagttctagaattacatagtggtaatggttgcagaaccttgtaaatatactgaaaacaactgaattgtaaactttaagatggtgaattttatggtatgtgggtatagtatttttatctcaataaaataaaaattttattaaatcaaaacttcttttgttagggattcttttaatccacatctatacttgttcattaatgtgaataatgtccagggaaaatcctaatgaaaacaaaaaccacgaattcccattaaaaattacatcaacaatatgaggaataattttttttccaacaatagtaaactggctaaagaacgtatctctggtttggaacttactggttttgagcttatacatgattgtgatcaaaggtaaaggacatacatgttggataaggattgcatgattatcctgtacagccctcttgacccatacaaaggtcctgcccaaatccacacagctggtaacaaagcaaaggctagaatttgcatcggcagatacccatacttcggtccttttcatcgtggaaaaatatagtgtactaagcaaagaaaattaacgttatgtaaaaatgtgaatgcctaccttttttttttttttttttgaaacggagtgcaatggcgtgatctcggctcactgcaacctctgcctcctgggttcaaccgattctcctgcctcagcctcccgagtagctgggattacaggcatgcgccaccacgtctagctaatttttgcattattattagagatggggtttcaccatgttggccaggctggtctcgaactcctgacctcaggtgatccacctgcctcggcttcccaacatgctgggattacagatgtgagcgaccacgccctgccgaatgcctacctatttagagactaaaatgtttctcttaacttggaagcatatatttgcacttcaagaatatatggtttggccaggcatggtggctcatgcctgtaatcccagcactttgggaggccaaggcaggcggagtgcttgaggtcaggagttcgagactagcctggccaacatgaagaaaccccatctctcctaaaagtacaagccggtttggtggcgggtgcttgtaatctcagctacctgggaggctgaggcaggagaatcacttcaacccaggaggcggaggttgcagagagctgagatcacaccactgcactctagcctgggcaatatagtgagactctgtctcagaaaaaaaaaaaagaagaatatatgaagccaatgcaacttgtgtcccatattttattttgctaactatagatttttccccattataatgactaaggtaagccctcactgcaatatatctgtaattcaaaaccgttagcttattttctgacattcatataaattcatccaaaaccaaatcatttttattgaatgccaaagacacaacaatgaaaaagagaagatgtgtttcccatcctccatgagcatgtagtctcatgggggaagatatcatcaatgaaataatcagatcaacaagtataaaaatgcaaatcacataagagctattattaaggtacatgctgctatgacagcctataacatggaaaagtgtccgactcagggaggcttccttagtgcagtgacaatagcttagaatgagtaggaattactatgttaagagtaagcagattctaggcagagggaaaagcaactgcaagggaggtatgaaggcatgtggttagaaagactgaaaggaagaccatcatgaatagagtaaaggaagacaaaaaatgtaatgctacatgtggaagaaatggtagatgggagaaagattttgcacgaccctgtagatctatttggagtttggtcttcataagcaagagcaatttcaactaaaagggttcaagctgagagggggcataataagatttgctttttaaagagactgccataacttcagtgtggagaaatgatcagggggatctaagaaacgatgcaagctgagtaattaggaggcttgagaaattgagagtactaaaatggaagacaaaatcatattactttaaaaataccatgattgagaccatttaataattattcctacattcctcctaaattactaagactcagattttttatgtaaaagacaaaatggtcaaatatttacaacgaatcttctattttaatgtacttatggttaccttgagaaaacttattaaccactagatggcagcaaagcaaataatttccattttaaatgatccttggaaaatggcaagttttgcttaaattcttcttgaagcaacatttagtagaaacggcattggtgagtttggtgcctgctttgaatgtgaattatcaccacgtaaacagagtactgctagtattatgtgaccttcatgatgaaataatgccacaaatagcttgtaacacataacaaaggaatgaagagaaagggaacttcatttttttatagagtttcactgacaggttttatggaattttttcatgccaaagatctgtttattctaattagactttcaaacttgaatgggtttttcaggcttaaagtatcacaggccttcttttggggtcactgatcctttgggaatgttccttcttctctcctctccactctccaagaaaaattactcataaatacacatttttaaaaaattcacgaagtttcatagaactcttggaatcataggcatgtagttacaaactccctgtattacagtaatttaaaaaatatgccaccaaaatcgaaagcaccttaacactttttaaaaagccagttactgagcaaaacgataagaaaccttgcttgatgctgctctccagggactgaagaagctcaacaaaggttaaacatgtcatcctatgaaagacacaatatagaactattacatttggtgcattaattagtgttaaattgtatcttattaatagcaataatagctaacatttatttagtgcttattatgcaccaggcattgttcctaaagcattgtatgtactatttcaattttcctaacagtatctctgagataggaactattatgatcccaatatatcagatgagaaaactaaggcatagaaagattaaatagtcatccaaatcacatagctagtaggtagtctccagcgtccatgctgttaatcacttcattatgactcatttttattatttgcgttgttcctaattactctgtgtaccagagtgatgttctcagaaatttaatatcatctgaggcagtaagagtagttatgacaataactgactactagccaggcatgggggctcatgcctgtaatcacagcacttggggaggccgaggctggaggatggcttgaggtcaggagttcgaaggcagtgagccatcactgctccactgctctctagcttgggaagcagagcaagaccctgtctcaaaataataataataatgataatcacactaactcaagtactaaccacacccattttcacctcattctttttccaatacagtatttgtaggcagagccaatgataacagaaagctgataacacaaagaaagggggatagaaaagctaaactggcaaaagcaatctggagattttttaaaccaacagtatagatgtagacactgtgatcgatggtcacttctatcccccataccaggattatacctgaataatatataacttagtaataggatgagaacagagatctcatcaaagtatgttagtttaatgatagggaaattaagaagaaagagaaatgttaggaaatgataagggcaattaagaatctgatctaattatattagtattcattatacattagttttcttagagacgtcttagttttcaggtatgatcagaaaggatcagtaagtgctcttgagctaaaaattatcctcaaggtcttggcgtttcagctaaacccaattaacttagtgtgataattttgagacatttcataaaaaaatacttacacaaagcaagagctttggatctgcatgaattagtttcaccatggacaagagaagatacttatagcttcttgtctccaggtctgtaggtttttctttaaatttaaggcttgttactttttctttaaatgtaagactctaaaaacaaaacaaaaacatggtatcagacataagactcaggataatagctatccaaccttttaaaagaaatttattattaaaaacctttgaaaaaagctattttttatactaccaaatgtgtggtattagtagaaacactcaatagtaagcataaggtcagtattattaagcttaacaaaacaatgaaaatcgtttttgcaccatttatatttttttttatcaatctaataaaacaatgaaaatctattacaatactaaaagcttagtatcaggttgtaaaacatctatgtaaaaaactattttctaaaatgtaaaaacataagggaaaaaagatttggcctatagttctcacaaatatacacactgggtaatttatttaacaaacattccccagacatacatacaagtatttcatagactctacaacattatcaattgtaagatgcatcattatttgatgtcccaaaaggaatgaaaaactgctgtcaattgtaagacaccatttaaaataagatacattcccaattttagagaagagtaaaaataagtgcttcttagaattaatgaaacatgtaggcaatctttgtatttactagtttaattgtaaaatttgctttttccttcgacggcactccacctcttttaagttacagaatgcatgcattttgcctgaagaacatttgtaaaacagaaagaactcagaaaggtaaacttacagaaaatatgtttcaattatagagacatatgatgaattaaaataattataaatgtttttcaaccaaaaatccaacaattatattccagagctaacatcacctattattataaaacatctccttccttttttccttgaaaagaacacaaaactatctgattctgaatgaatgtctttatgtaaacatatatataatacagaaataacaagactgtgtaccaactgtggacccataatacaaatgtccaggtaaacaggctgtctttcaaagttaagaagcagacatgcatatctacaacacaaatgaactatcctcaatgtttaagtgaaatatgcatttgttattatacccaagaacaccgaagggttttagtccttgcggggaagaatagctatttaatgcacacatttatactcaagaatgtcactacagaagagaaatagcaaaacttccaaatagtttgctttttataactgccccctgaccccaaagcaaatgttttactaaatgatttaataaattctggttttactgtttgctctctttcaactgtatttttttcctcactctaagttgaggtgtttcacctcagatcaagctgaaactttgattaaacgaatttatttactttgatgtaactaagtgtaactatcaaatggctcttccctgatgcagccattgcacaggaacacaagatcagagaacaatgagcaggtatcagaatttttccttaagaatcatttccaaaaaacgtaaatagagtcatatgccacaaaacaacatttcagtcaatgatagacaatatgtaacatagctgaaaaattcctatcacttagtatcatagccatcgtgatgtccaagcacaatgcgttattgtttgtagtgatgctggtgtaaacaaatcttcacttctagtcatataaaaaaaaagtatagcacatacaattatgtacagtatacaatacttgatgagaataaataactgttactggtttatgtatttattataatatatatattttgagaccaagtctcactttgttgcccaggctggagtgcagtggcgcgatctcggctaactgcaacctctgcctcccgggttcaggcaattctcctgcctcagcctcccaagtagctgggactacaggcatgcaccaccacgcccagctaatttttttctatttttagtagagaagaggttttgccatgttggccaggctggtctcgactcctgatctcaggtgatccacttgccttggcctcccaaagtgctgggactacaggcgtgagccaccaggcccagcctactatagtatactttgtattgttatactcctacttaaagataaaaagttaactatgaaacacagcctcagaaggtccttcagtaggtattccagaagaaggcattgttaccacaagagatgacagctccacacgttatttcccctaaaaaccttccaatgggagcagatgtggaggtggaagacagtaacactgattgatgatcttgaccccatgtaggcctaggctaacgtgtatgtttgtgtcccagatcttaaaacagttttcaaaataaaaattaaaatagaacattttcaaatagaaaaaacttacaggatataaagaaaaatattttatacagctagctatacaaagtgttttaagctaagtgttattacaagtcaaaaaattaaaaaatttaaaagtttatattttaaaagctactgtaaagttatcatataaaaatattttttataaatttgatatagcttaagtgtagtgtttataaagtctacagtatagatcctgagtatgagaaaaatgcaaaagtattaaaagtaaaataaatttaaaaaaattttaagtctacagtagtgtaatgtcctaggcttcacatgcactcaacactcactcaatgactcacccacagcaacttccagtcctgcaaactccatttgtgttaagtgtcctatacatttttttcttttatactgtattgttactgcaccttttctgtttgaataaacaaatacttaccattgtgctacaactgcctaaggtattcagtacagtaacatgctgtttagtctaggtttgcagcctaggagcagtaggctagaccatatatcctaggtatgtagcaggctatataaccatctaggttcatgtaagcagactctatgatgtttgcacaatgactgaatcactaaggatgcactcatttctcaagacatgtccctgtcattaagtgatgtatgactatattagtttaattatgtcacctcttaatcccaaatatcaacatgtaaattctgttccaacatggttgcctaatatgaaatgtatgacttcagaaattccaataaatttaattcatctcaaataccttttaattttagtgggttacagaaagtgaggaaaaacatgctaaagaagcaatgtgtttcttaattagaaatgtaagaaaaaaattcattcattcattagttgatcttctatattgcaggtattagtaggaatagaagctggtacatgtgatctggccaaagatgagaggcaatcatgtctgggaagaaattcatgaaccagagtcttcagatatctattaaaggcccaaaccacttgttaatttagaccatgtgactgaataacaggcatgtaagaaagatctggtgagccagcatgccacttaagataaaaaatgttgagaaataacaaatacttgtgaaaattcatatatctgttattggcagttttgaattttatgaaagcaggagatgttagtttgcaaatagtaaaatcagtgctaagacaaacatttcaaatattaaaaaaatactacaaaggtacaaaggagaagttatggctcaacattcatataaaaagggccaaagagtttaaataactaaaaagtcaacataaaataataatactatcttagattgtattaatagaaacagggtatacaaacacagcagtttaatagcttttatcaattattacatcatagtattatatctgtatcactaacatcagatcttaatatggcattttaattttaaaaatttttgtcaggttggtctttccagaagagaagcaaatcagaaacaggagggttttttgttttttgtttttgtttctttgagacagagtctcgctccgttgcccaggctgacagtgcagtgacacaatcttggctcactgcaacctccgcctcccgggttcaagcaattctcctgcctcagcctcctgagtagctataactacaagtgcctgccaccacgcctgcctaatttttttgcatttttagtagagacaaggtttcaccatgttggcccagttggtctcaaactcctggtctcaagtgacctgcccgccccggcctccctaagtgctggtattataggcatgagccactgtgcccggcctgtacgaggattttgaaaccacatcaagtaagaaattcattccttcattcattctgcaaacatgtactaaatgcccaatatgtatcagatgttgttcaaacgttagggattcagtgttgattaagccagacaaagctactgctttcatcaagctaacttgctagtgaagaaggacaactaaagaacctgataaagacactgaactgaatgtcaagaaacctcagaactaactctggttgactgttcattaaccatgcatttgttattaatataactttatttaagcttcagtttctttagctataaaaacagacccaacaaacacacatacagttttaaagagagctaaaagaggccaggcacagtggctcatgcctataagccctgcattttgggagactgaggcaggtggatcacctgaggtcacagttcaagagtagcctgcccaaaatggtgctaaatggtctactaaaaacacaaaattagctggcatgatggtgggcacctgtaaccccagctagtcgggaggctaaagcaggagatcacttgaacctggaaggtagaggttggagtgagccaagattgcatcactgcactcactccagcctgggtgacagagtgggactcggagtgggactctgtctcaagaagaaaaaaaaagagagagagctaaaagaataaaatcccttccaatgccaaaacgatataaaaataaaacgaattctaggagtacagaataaccttattcaaatatctgcagggccaccttgtggaagaatcagaagtattctatagagctccaacagaaagaggatcagtgatggctgtaagtgacagagacatgattctatcttggtcgaagagaaaattttcaaataattagctccttccaacaagtaacttgtctctccaaaatacaaagtgttagtaaagccttgaagcagatattattttacttttactgttttgcaacagaactcctagattgctacttctgaagcaagctaatggctcaggtttatcagtcccaaatcatttgaggcaatacaaatgagggacaacccactgaacatactctgtaatacagtagttctcaactgggggtgattttgtcccccaaggggcatctggaaatgtttggagacatgtttggttttcatgacttggagggctggggggtaaagggaatattggcatctagtgggtagaggccagagatgctgctgaatatcccacaatgcgcagtacagccccctataacagagttatccagtccaaaatgttaatagtgccaacagtaggaaactctgatgttaggtattatctgtaaaccatttattatatatatttgcctgtgttgccagactccatgccacctgtagtgagtttttttgtttgattttttttttgagaccgattctcgctcttgttgtccacactggggtgcaatggcgccatctcagttcactgcaacctctgcctcccaggttcaagcgattcttctgcctcagcctcctgagtagctggaattacagggatgcaccaccacgcctggctaatttttgtatttttagtagatatagggtatcaccatgttggccaggctggtctcgacctcctgacctcaggtgatccgcacaccttggcctcccaaagtgctgggattacagacgttagccaccgtgtccggtgttgagttcttcattagacattttcaagcaaaagctataaaccttttgcttggaatctcggtgaggggaagtgctgtgtatgtttagttcaccatgcttccctggcattagcacctttgcctggcaaagagtagaaggtcaatacttccatactggttatctgactgttaactcaccaagtttatgaagggtgagattttaccctaacagccattcaaaacctaaaattttcttattctaaaaattgtttcatattacatttgctatttattttctctcctggtaatatcagcccaaaagctgtcctttagtcattatgtacaaatatacatacatataacatttcaaaaacataaacagcttaggaatgattttgaaaattaaatgtatattgatattttcagaaaataattagaaataaaaactaaattcttattacaggtgtccttgagccaaaagaggaaatcctctctagttatggcttttcggtaaaataatatgtagctctgagaatcagcttataactagggctaagaagtaaaataacttctaagtgtagagaacatatttagactaccaatcaaattttacctctgttcaaaataatcatttagtttcatttttagtccttattcacagaaaattatgggcagctggtaaagtggatattgaagttaaataggaagtgaatattaaccccccaacaagtcctattattggaggtcattaactttctaccagaaaaggtagtaaacttaaagcaaaaaagtcaaataaacttctgatttcccagatctctggaataaacaggtcaataaataacttttaaacaacttatttcaagtagttttaaaagattttttaaaaatatcttattaaatgacatttaaacagctattatttatgcttacctccaattaacttatacctgtactgaaaatttcttcaacttaaaaaaaagtgaagtacttggcattacaaaaagtcaactaaaaggtaaccttgcattttaaagtttacttaaggaaacatcattgccatgatcttttggctatattttttaggctcaataatcccaaaatatatgacataaaaaacttctctatttgaacatctaagataaacaatcctcagaaataattactgacaactggataagagtgaaccacaactgtataaaaccaaaatatttcactgactaaggggacttggaaaaagagaagcatgccagggagaaagctgtttaaattatctcctaactgtgaaatgactaacttactagataaaaccaacaggtgaagacatgctatattttcagttgaaatgacaagatgtgactataatggtaactatacacagaaaagtcaaagaaaccaaggacttttctgatgtagttacaatgggtcatacttacagccacagaagcccactgccatgcaaaacagtgactggttggcatctgatcatgtgagcgacagcagccaataatagaaaataagaagcagaagacaaagcaccaccaatcaatgtcaagagttgctcttgtataatactcttgctatacataaacaccaaaaaaatgacttccacaatcttataattatctttttaaattgattccataggagttttaaaattccatattaagagtaataatctgtgagaatacccaattttaagtctgctttttattaagtttagagtcaaatgtcagtatcaaagttcctatcagttgtaaaacctcaaggcatatttgttgaaatacaaaatatttttattttaaatacaaaaactctaaattttattcatttcctatgtttaatagtcaccattcaattagctaaaatgtgcattggcagcaacattcactctaacccaggagtcagcttcccttactcatccccaaaacgtgagaggctaatcaaaatatttttgttcaaaagttttaaggagaaaaaaaactttaaaaacagaaaaaaaaggtgacattcattaagactttcagtgttttgtgagaaaatttatctaagaaaagttaagttcaactcatggaaacagtggaaaacaaacataatctagtattcaacaatattctagatacaacataccacaacatttagaggaaatgaaggacccattcaattctctaaaataaccaaagcagcaggaataggataaagacactaaaaaaaatgcaatagaaaggaggtgagattcaaaattcgtgatttatcttaccggtgccattcgtattgctgggtgtgctccacaaccttgcactgctttatgaagtgtttcaccaaacatatttcgaagttcaaccgagtgacaatacacagcatcaatcttaggccaccaatccaatgcggactagagaaaaacaaagaccaataggaagaaaaagtacaaaattacgtgagttgtatgctctgtttatcactgtagttttaagttttatccttttgtcgggaactttctaagaccatgcaaacacacaccatgatttccaaagtcttcaaacaacgtctttaattcaaacactaactcatacatattatattataaaacataatagtgagcatgagacaaattgcccactttatgagcatgtgcatgtgagacatcttttctcgatgattagccagtgaatttgaaaaataaagtcttcagagagctaatctgtagccaatcttctttttttttttttaagtttaatgttttacaatttctggcacacgtgcatacatggcatatattttcccaggtaagaatgctattatcaaagctttaaaagtgattagtggttcaacacagtattaaaagtgtatgtggaaaaccattacttatatgtttacagacaacaatgataattacaacatgaaattagtaaatgaaataaaactattaagtaaacctataaattgatatgcaatgatgacatgatatatgggagactaacaattaccataaacaaagacaaactgatcctagtgaaatattttttaaacaattattttatgtattttctatttcaatttaccctgtttaactctgatgtctagtttttagtgcctattttatttggaagtgtatctttaactttaaaatgaattacttgatatattattaaaaaatgacaattgtgaaaatcactatatctttaaagtctatcatttaataaaaaactgactggatgaattttcactacatatgtagactatgcattaaatgacctaaaatgtaggcttctaatttataatactccagatgtttatttaaaaaatctggaagaataatacattcaaattgtagataagagggattgaatagcctcacatctctcacatttcagtcccagattttttcttattcaaaactaagctaattgaagtctcgacattttaatttcttcacttggaattctcagaatattttgaatagcatcgagttatattaccttaacccaaactgtggattacaaatcctgttcgccggatagtaaaatataaaaccaacttatgatacacattttgaatactgaactccattcagggaggaatcccaaaactgggagggaagaaatgcttttttgggacagtatggttgtttacatttttccctcaactcctactttatttaatctagtttctacaaatgatcaatttttagtctgatagtataatggattcctccaactctcagcaattttgacttgcccaaagcaaccaatgcaacttgatttccttatacttactaaattatacagcttgtgttaatcagcctaaagtaacaaaaagctgaataataacaaagtacattgagtgaagggtcttccttacccaacacatctcgtaagatcttgtcagaaactgataaactaagaaaggcatcccatataacatcctattcaaattactgtgtctttttttaatagcttttgaaaccgtattgtggtaccaggtgcaccacataaaataactttaggcttaagatttagtaattttcatagttttcatttttcataatatattcattttaaagtaaaatacacattttcaaataaaataagtatgaaaaactagacatcatgtggttggcaaaaaagtttagtattttgagcagttactaaatgtgcccttcctgaacaccagtcaattaaagtagacttactctttttttccttgaaaataccatgtttatagccaaatggcaacacttacataatatgaacaaattatgtggcaattccttaagagatttaaataattttcaaatgccttggaaacaattcctttcaactacaacctctcagtagaaagcaatcatctcattttcagtatgtgaactatccatatgtaaattacgataaattgtcgtaaggaaaaaacagaaataagtaatataccagctatagcatgtaccagtgatggctaagataattggttcataagtgtgtatattactttttaaatttcccaattacatatctaatttaacctaaaggaagtctatgaagattatgcatataacatagatcttacaactattaattcatctcttatggcacatcataataaaaaagatgacagtacaactactattttagtaactgctaggaacctgcattataataagaatcaaatagtggatatattttagattttctaagaagaaacactagaatattttagatctaaactcagtacttatgaactgagtatgagtatgtttcacaaaagtagaactccaaacaccttactacttctacacaaaccctcaatacacatcactaaaacttttatcttatttgagaatgtgatgctttaaaaaaaatgtgtggactggctaaagaaccatgggagaagagaacttatgaggtacattgaaccaagaatcattagaaaaaaaatttacactacgaatgaatttaagatcagaagtccaaatatctaagaataatttcatgtgatttttcaagacaaaaatattgccataataaatgtcttcaaatgaaactctaaaatagtcaatctcataaatttctatattcactttataaatagtccttttcaaccaaaagagtacttcagattcaatagcgattagcctcaaaccaagggggaaaatatcctaacgagaaacaatttcccacactatctataataataaagtatcactacccaaagcataatttaaaaagatactttgaactaatatttatgttccttttcaagctatttcattgaaaagttactgatacttaatgtttaaaaattattcaatgtagtttttttctttataaaaacagattttcatataacttgatctctgatacagacacactccaccctccacacatgcagtgctcattagagtagaagaggatgcacagccactttcaccaagtacactgaggcatgcatgaagcaccactccaggcatgcttggaacccagaaaggagcagctcagccacttacagcagtgccaagtccatgcttgaaagtgctctatgtagtcagttgtagacaaaaatatttcacaattaaagtaactagccacaaagtatcaaaaaagtatatatttgggtttattgtatacaaattttaagcatttatgcaaagctatccactctttgaatatttttagtgttctgagccacagcggaaaaaagcaataatgacttatttctgagttacacataaacttgaggggagaaatcatctttttgttttaatggccttgaaagtaaaccttgaaggtacaatgccctggctcattacgctgacaaaagtacagtgattttttttaagtttttaatacaaacataccttatttacaatcttcattaaactttcccttttggaacaaagcatattcaatgttacttttacctacaatttaactcagtgatactcaactaagggaggaggtatcattccctcaggcatgtttatttgttcataatgactagggatggggagatgcagcacaactggcatttaatgaaatgaggccagacgatcttaaaggtcctgcaatgcccaaggcatcctgcacaacaaaggactgtcctcccaaaatgctcactaaacacctgctgagaaaaattaaatgtatcaccaaatagctttatcaatagttaattttccactgcaggaatggatagaatatgggcagtatttattttaaataaatacaacatccagggcaaatgaggtgaagggttattttcaactcaccagaggcacagtcttaaaatggaatttgattataaacaggtcaaatatactaagttatcaatgattacagcctcctttaaggaaggaaagcatcaaccaatttacccataaatgtgagtatcatttgataaaagtggaacaatggaaaataacacttgaaaactttcaaaatagggttgttcattattacaagaacagaattttaaaaatccacagtccaaatctgatagttttgctgtctatttaatgtctccacatcagacagagttgaaggtttcgcaagtaccttttaatgatttcacttactttgtctgatatgcttttgtatcttgttaatacctactttaaagtatgttaatatttcattttgtttaagaaaaatgaaattttacactatgaatgaatttaggatcaaaagatttaaaagtaccatcaaatatagtcccatcattttgtcaatgtgctatactagactacaacataaatactattacttttaacttaaatggtaaggtggcaagtcaatgtatcaaatgctgaaataatatgtttgaaaagcttcgggatgaaaattttaaactgtattttcagtgacatttttctcaagggcttctgatctgaataaaacgttttagatttaatctttccaaagcatcttattaactccatcttccttaatatggtcccttcggtcaagacttaatatgaaaaatacaaatatttatcaattatcaaatagaatcaccatggagaaattttcctatttcatacatctaaattcagaacctttttgaaaaccaagagtgcatttcttaaaaagaaatacgcaaagaaaagaaagaaaaaaatttttttagtaatttagcaataccttttggacttacattggtgatgattcgatggagtgaatttaccagcacatagtgaaatgtagaaggtgaattctgagccaggcagatctatagaaaaagaaaaaaaaaagcagattatttctatgagaaaaatactcagtaatacaaatgaagccaaaaagaacagcaaatagaaagtttaaaaaaaaaacactaagtttttaaggtcttgaaacgaacatcaatacataatagtgagaaataccgataaaagtgaacctattaatctctatagtctttttgtttataaaggataacagcatcagtaaatatagttagataaaaaccaatgctctcaccttaaagtgttggttgttgtgagggcttatacgaaagcaagaaacaaggcagtcaatcattagatccacatctgcaggctgactgcctcttgagaatggcttacttggattaaaaagcaggttctataaaaaccccaacagaaaacaaaagcctttaaatacccatgcagtatttctttactaacatgtaataacatcaacacattacccacacaaatggcagtaaaatccagctgccagaagaagcacaaagcacccatactgtggttcatcagtctgatacaattcttcctataccatatataggttcatttcaggccctaattgccacattattttaaacccaagtctgtatatttatgcttatttaagaaaatggtgttttcttcatattctcagtccatttaggctgatgaacacagtaacaacaaaagcaagtcctatgaacttatcaacgaagagtcagaactttaatgttagcaattatctttgacataatacttatgctagaaaattcatttaattttcttaaagtttgtagtagagaaagaataagcatgttaccttaagatcaaccaccatggactgaacaagtaggaaaatgacagagttatcttcccaattgatgtaagtacttgctttacacagtttgacacaggcaattgcagcactttctgtcagctgcctacttcctccatggccagcaagagcttttcgtagactgtccagaaataacttctacagaattcaaatatagcgataagataatatatgaagtttcttctattccagatgtagctaatattatagcaaattaacagcctctaaaactcatactataaagaatgcataatttatatttgtggttttcaatttcataatttaagtagtggtcatcatttaaatgtttctcaaatttaaaaaaaatcctttttctattttctttattgaattattaaaggaatacaaaaaacagtccttcccaaacaagctgttttctgaacttcttttttttttttttcccaagatggtgtcttcctctgttgcccaggctggagtacaaaggcacgatcttggctcattgcaacctctgcctcccagggtcaagcgattctcccgcctcagcctccagagtagctgggtttacaggcgcctgccaccatgcctggctaatttttgtatttttagtagagacaggatttcaccatgttggccaagctggtcttgaacccctgggctcaagtgatccttctgcctcagcctcccaaagtgctagaattacaggcatgagccaccacacctagccttcaactttgaattcagctgaccatatcttctttttgatatttaaagtctaaatattatactttcttggctctggtctatgataaactgttccacccttttctaacactccaggttatattcaaccttcagccttctaaataagaatatattcaaggctgttctgttgctctaaatttgtttctcaaaaaaaattacctattcttgtgatgtcaacccctctttacagttcattaacaaatgtcttcctttggcttttctcctaaatgaatgctcaaatgtaacatgtcaaaaactaaactcacccaacaccagcacaatatattcttctcaagtgtacatggaacattctccaaaacagacctatgttaggctacaaaataagtcttaatacatttaaagaaactgaaatcatacaaagtatgttttgtgatcataatggaaatgaaaaaccaacagcagataaaaaaactaaaaaattcacaaatatgtgaaaatttgtgaatgttaactaatagatcaaaggaaaaaatcacaaaggaaattagaaaccaacgtgagataaatgaaaacgaaaacacaacatactaaaacttataggatgcagtgaatgcagagctaaaagaaaaatgtaaacctgtaaacactgacatcaaaaaataagaaagttctcattcaataacctaaccatatacctcaaggaactagaaaaagagtaaactacaccaaagctagcagaagaaagaaaataataaaaattagagtgaaaagagagaacagaaaaacaatggagaaaaattacaaaaccagaagctgattctttgaaaaagtcaacaaaactctagctagataggttaacaaaaaaataaataaataaaagagagacagagagaaagaacaccaaattactaaagtcagatatgaaagtggtgacacggccagatgcagtggctcatgcctgtaatcccagcactttgggaagccaaagcaggcgaatcacttgaggtcaggagtttaagaccagcctgatcaacatggtaaaacccccatctctactgtaaagaagacaaaaattacacaggcatggtggtgcatgcctgtagtcccagctactagggaagctgaagcaggagaatcacttgaacccaggaggcagaggttgcagtgagccaagatcttgtcactgcactccagcctgtgcgaaagagcaagactctatcccccccaccccctcaacaacaacaaaaaaagtggtgacactactgattttgcaaaaataaaaagaattatgagacgatactatgtaaaactgtatgccaacaatttggataacctggacaaaatggacaaatttctacaaacacacagtctaccgaaactaactcatgaggaaatagaaaatctaaatagaactataactagtaaagggattaatcagtaatcacaaagctcccaaagaaaaggctaggaccagatagctttcactggttgattccacccaacatttaaagaatgcttctcaaacacttccagaatattaaagagaagggaacacttctcttcattagttctatggtccaacattaccgataccaaagccagacaaaaatactacaggaaaactacagactaatacaccctaggaatactgatgaaaaactcaacaaaatcagcagcctattaaaaggatgacacaccatgaccaagtgaaacttactccaggagcacaagatgattcaacaatgaaaaaatcaatgtaatataccacattaatagaatgaagaagaaactccacatgatcatctgaatcaatacagagaaaccacttgacaaagttcaacacctgttatgataaaaaaacactcaagctaggaatagaaggaaatttcctcaacatcgtaaaagccatgtattaaaaaccaatagctaacaacatactcaatagtgaaagattgaacgtttttcccctaagatcaggaacaggatgaggatgcccactttttcttcttctatttggcataatactagaaattccggacagagcaagtaggcaagaaaaagatggaaaattcattgaatttggacagaaagaagcaaaactatgtctattcacagatgatatatatgtagaaatccctaaagatgacacatacacaccaaaaacaagctgttagagctaataaattcaaagtcacagaatacaaaatcagcacacaaaaatcagctggatttctatacattagcaatgaaaaatacaaaaaggaaattaagaaaacaattccacttacgatagcatccaaaataaaatacataggaattaatcagggaggtgaaaaacttaataaaaaactacaaaacattgctgaaagaaattaaacataaataaatggaaagatatctcacgttcctagattgttaaggtaacaatattacccaaagcaatatacagattcaatgcaatccctatcaaaatcccaatggtattttttgcaaaaaaaaaaaaaaaaaaagccaggcgcggtggctcacgcctgtaatcccagcactttgggaggtcgaggcgggcagatcacgaggtcaggagatggagaccatcctggctaacatggtgaaaccccgtttctactaaaaatacaaaaaaaattagctgggcatggtggcgggtccctgtagtcccagatacttgggaggctgaggcagtagaatggcgtgaccctgggaggcggagcttgtagtgagccgagatcgcgccactgtactccagcctgggcaacagagcgagactccatctcaaaaaaaaaaaggaaaaacccatcctaaaattcatatggaatctcaaagagccgcataatagtcaaaactatcttgaaaaagaataaagttggagaactcacactttcttatttgaaaacttactacaaagctacagtaatcaaaacaatgtggtactagcataagcacagtcatacagaccaatggaatagagagcctagaaagaaaccctcacacatatgaccaatttttgacaaagatgctaagaccattcaatagagaaaggatggtcttttcaacaaatgatgctaggaaaactgattatccacatgcaaaagaatgaagatggacccttttcttacatcatatacaaaaattaactcaaaatagatcaaagaccaaaacttaacagtaaagctataaaactcctataagaaaatataggaaaaaaaaatattttcaacattggatttggcaaagatttcttgtatatgataccaaaaaagcacaggcaacaaaagaaaaaacagataaactggatttcatcaaaataaaaacttttgtgtatcaaacgacactatcaagaagatgaaacaacaatccacagagtgggagaaaatacttgcaaataatgtatctcataaggggtgaataaccagaatatattaaaaattcctataactaaaaaataaaataaaatttagagccttacaaatactttacagtttttttaaaaactgaaaatagatgaaccaagccattgcctcaagaaataacagtataaataaaatgaaagctaaaattaatgaaacagaaaaatttaaatgctaggaaacaaaatcaaagcctaggttttaaagaccaataaaatagtaaacgtgaatgaggaaagagaaatgagtaaacagttacaaacatggatactaaagataattatatgagaatatggaaatataatataacctttatataattgtacaaaatatgtaagtattatatacaactctgcactgataaaactgaaatatatattttctagcaaagaacaaaccatcaaaagtgactttaaaaacaacagaaattcttcaaaaaatcaaaaataaaataaccatatgatccagaaattacacttctggatatatattcagaagaattaaaagcagggtcttgaagttatttgtacacccatgttcacagtagcattatttataatagccaaaaggtggaaacaactgaaaaatccattggcagatgaatttagataaataaaatgttggtatatatatacaatggaatatatcactcagccttaaagaggaaggaaatcctgacatgctacaacatggatgaatactatttcagccataaaaaaaaaagaatgaaatcctgtctttcaaggcaacatgaatggaactggaggacattatgctaagtaaaataagcccatgtcaaaaagacaaatactgtatgagtccacttatatgaggtagtcaaattcagagagacagaaagtaaaaggacggttgccaggagttgagggtagggaagaacggagagctgtttaatagatacagaatttgttttggaagatgaacaggttttggagattgattgcacaacgatgtgaaagatagtgctactaaactgtatgcttaaaaatggctaagatggtaaatttgatgttacgtgcattttaccgcatacaaaattttaaagagacagaaaaactacacagatccataagggagctcaaataaaaggtgattaatgagttattttaaatagacaataaacaggctagttctagaaagagcataagaaaccagtagcagtacttgacttaggaaaaaaagtataaactgaaggtcaagagtgaataggaagcttacttttccactgaattcccttcctgatgtacagtgaaaatttccattatgtcaatttattttttttctttaaaactaatgataagcaaaagtcaaaggaaatcctaaccttgatgattttacaatgatttctatctaatcagataatttctattatttaaattattccgggccatagaaaagactgatagttcccaaattcacattactaatttggcacaaataactgttcgaataattagttactttcaaaagtgataatgcatattatgttaattatacatattttctaagcatcagaaagctgaagcactggaaggaaatgttttattaagcagctacccaatacatttgccaatagccaaccaagtttacctcacacacacaaatgaacatactaaaagtaaagatttccaaatatatttcagctccaaatttaaagtgaacatttaaataacatagaaactatctgactggatacaattcagctctaaaactagagttcagggccctttatcttttgttaattattaattttaaattttttgatgtattaatatttatgaagaacatagtaacattttcatagctatacagagatcaaatcaaggtaattagcatacccatcatctcttatcatttctttgtgctgggaacattcaacatcctcctcctagctctttgaaactttgtaacatattgttaattacagccatcttacagtggtatacaacactagaacttactcttcctatctagttgtaattttgaatcctttaacaaatcgttccctaccctccccgcaccctatccttcccagcctgtagtattctgttctactttttacttctgagatcaacttttttttagcttccacatatgaatgagaacactcagtgtttaatgttctgtccctggcttatttcacttaatataatgtcctccaattcaatccacgtgcctcaaaatacagaatttcattcttttttatggctgaatactattccattgtgtatatataccatattttctttacgcattcatctgttgttagatacttaggatgattccatatcttggctattgtgaatagtgctgcaataaacatgggagtacagatgtctcttcaatatactgatttcccttcctttggataaacgtccagtaatgaattgttggatcacatggtagttctatttgcagttttttgaggaaccttcacactgttctccatagtggctgtactagtttacattcccactagccacatttaagagttcacttatctccacacctttgccagcatttgctattttttgtctttttgatagtagccattctaaccggggtgagatgatatctcactgtggttttgatttgcatttccctgatgactagtgatgttgagcttttttaaaaaatatatctgttggtcatgtgtctgtcttcttttaagaaatgtctattcaggtcctttgcccatttttaaattttttgttgttgttttgttttgttttgttttgttttttgctgttgagatatcagagttccttgtatattctggatattaatcctctgctggatacatactttgcaaatattttctcccatcctgtaggttgtcttttcactctgccaattgtttcctttgcaataacgttaattttttaaagaaaagtaacttaaatgcttgacaatatggaatttaaaatatggtacattcaagctgggtgcggtggtgcatgcttatagttgcagctatctgaaggctgaggtggaagaagatcgcataagcccagaagtttgagaccagcctgggcaacataatagcaagacttagtctcttttttaaaaaatggtatattcaatttagggaacaccatacagcagttaaagacaatgacctagatgaacaatggttctcaaacttcaatgtgcatcacaatcacctgaaggacttaataaaaatggctgtttttagtgagaaactaagtatttagttagaaactaagaactggcatttctcacaaatttccaggtgacgctgatgctgctggtctaaagaccacactttgagaaacactgaactatatacctatctgtctatctccccatcctcataaaaatataaaagctagactggaagaatatacatttaaccctttgcagtggctgtccctgggaaagaaaaaaaagaaattagtgggattcgtaattaaatcagaatttatggaagtattacttattcacaatttttaaaagccatgtgaggacttagctctgattttttaacttgcccaaactcctacctaaggggtctaggaagtcatgccctacaaaccataaattctcatcagatgggttttatttgacgctatatatcgtgacttacttttcaatctgactctggcataacattatgagacaaggaaaaaatatttagccccaaaatatatttccttgccataccttgaaatttgccgtgcaaagtctcctgtggggaaaaaacatccacattctatagagaatccccttttccctttgttttccttctttcctttccagatccaggagattaatcgactaagagccaggcactcttttaggtctaataagaaacattttacaaccttctctctctctgaagtctgctgagagattcctctgcacaacaaaatctggtctccacaatcctttatcttaacctggacattcctttccattaatcccaagtcttcagacaaactcaaccgtcaaccagacaacgtctaaatttacttatggcctggaagcccccactttgagttgtcgcgcctttctaaaccaaaccaatgtatttcttaaatgtatctgattgatgtttcatgccttcctaaaatatatcaaaccaagctgtaccccaaccactttgggcacatgttctcaggaactcctgatggctgtgtcacgggccatggtcactcgtatttggttcagaataaatctcttaaaatattttatagagtttgactcttttcgtggacacatatataaatttctcaaaagatgagcaaaatataaaaatgttaatagcagtatgggaaactgttacattctttgtacatttcaaatatttctttttaaaaaaagatactatagtcaaaagaaacaggtgactggaaaaacatttacagactaaaaatgtaggattactgctctgaatatacaaaaagttccgcgaattcataaggaactggaagcaacataacagaataataggtaaaggaagtcaacaggcacctgcaaaagaaaacatgcaaatggcaaagaaacatatgaactgttttcaaacctcactaaccttaaaaagaataaaaattacaatgagatactatctttgttctcaacacttgagaattttaattagtgctctcatttggaaaattaatgtttaagccattaatacttttttcttttatatcacttattaaatatgaactttcagaatagtcatgtaactacaaccacgatcatgacatagaacatttcaaacatcaccacaatcaatcccctactgctcctttgcaataaatttcctcccctaactctcactcctggcatccactgatctgctttctgtcctgaattttgtcttctctggaagttttaagaaatcatatagtatgtcatctcttgaccctggcttctttcacttagcataatatttttgagatttacacatgttgccgagtcagtagttcctttttattgctgaatagtattccacagttccaaggcatcaccactggtttattcattcaccagctgagggacatttgggctgttttcaaatttgcgctattataaataatatgtatactcgagtatacatccttgagtgaaggtatatgcctttgtgtgattttttattttcatattataggtacacaacataattttcattttcttcaagattgtaacttgccttcaacatttgtatctatggattaatattcacagagataaatatttaaatctatacacatattcttgttcctaaccttatgttatcattctatgcttgaaaatttacaacatatttttaatgctagtatctactgtttgcttcctttctgaatgacattttttcagctttattgaggtacgattgaaaaataaaaattgtatatatttaaggtgtacaacatgatgttctgataaacttatacattctaaaatgagtaccacaatcaaggtaataacatatccatcacatcacacagtttacctctgaaagagaaggtaagaatacctgagatgagatactatctcaccttattagtgtggcaaaattttaaagatttaacaacagctaatcctgacaaaaatgcaggaaaataggcaattcagtggggatgaaactctgacctgctgcaactattggggaatgtaaatctagtaataactattacaaattttaaatgcaaatgttcttgacacaggaacccctagtttttagattctagtctatagaattaagagcatcagttaacaaggatatatgaacaagatatttacttaaggcttagctaagtgtcaaaaaactgaaaacatctgaatatccacccattcagtgaaatggctgagtaaatgaggctcattagtgtaacagaatgttacctaatactgaaaggaatgtgtcagatctctatcaactattttgaggaacagctaaaatattttcttagataaacaacgatgcagagtaatgtgcataaaataatttcattttaaaatacaaccaccaccaccctacgtatgtatattttgcatttgaatatatgggtaaatagatgtgactggaaggatacataccagccaataacactaaccagctcagaaggaatgtgagtagaaaagggtgagaatactattttattttttttgtttttttgttttttgagatggaatctcgctctgtcgcccaggctggagtgcagtggcatgatctcagctcatggcaacctccacctcccaggttcaagcaattctccccggctcagcctccagagtagctgggatcacaggagcctgccaccatggccagcttttttttttttttttttttgtaatacatttttaaaaatacattttttagccaggcgcaatggctcatgcctgtaatcccagcactttgggaggcccgaggcaggcagatcacctgaggtcaggagttcgagaccagcctgaccagcatggagaaactccatctctactaaaactacaaaattagccgggcgtggtggcgcatgcctgtaattccagctactcaggaggctgaggcaggagaatcgcttgaacccgagaggcgggggttgcactaagcggagattgtgccattgcactccagcctgggcaacaagagtgaaacaccgtctcaaaaaaaaaaaaaaaaaaaatacttttctttttaatccagaaagatttaaaaatctaaacttttaaatctagaaaataccagaaaaaaattaaaaagcatacttcaaaaatcttggcacctgccagacaaaaacataacatgctgaatgattccatttgtatgaaatgtctagtttagaattaagtaaatctatagacaaaaaactagattactggttgccaagggctgcgagtgaggcgagaggaacagggagtgattactaacgggtttctttttgggaagatgaaaatgttctgcacagaaacaatggtgatgattgtacaactttgttaatgtactaaaatcgctgaattttacacttcaaaaacgtaaattttatgatatgtgaattatatctcaataaaatgaataatatcttctgggaagagagatctgaccaaaaaagctaggagacaaaaaggaacaaggctgaggtgactacatgcaaattttaaatatctatatagtaaaaagaactcataaagtttaaaaatgaaaccaagtaaaaatgtacacatatacccttacaaatcaacaaaagacaaacaattcaatggaaaaatcagcaattccctgaagatacacaaataaccagtaaacacttagaaagctacagttgtgattattaaaacgtaaattcactcgagtactactgaatctatagcttatttatttatttctatttttccaataaacaacaacaacaaaaaacaccctactgtattagtcagggttctctagagggacagaattaagggaatagatacttatacaaaggggagtttattaagcattaacttacacgatcacgaggtcccacaataggctgtctgcagggtgaggagcaaggagagccagtccaagttccaaaactgaagaacttgaagaccgacgctggagggcaggaagcaaccagcacaggaggaagatggaggctgggaggctaggcccatctctctttttcacatttttctgcctgcttatattctagccacactggcagctgattagatggtagccagccagattaagggtgggtctgcctttcccagcccactgactcaaatgtcaatctcctttggcaacaccctcacaggcacacccaggatcaatactttgtatccttcaatccaatcaagttgacacttagtattaaccatcacaagtccaccccttgtcaacttgaacccatacatatctcctgagatcatacataatctttaaataaagacaataaagtcataattatgcctaacataatacaattatccttcgtacaaccagaaacacacctatcccaacccaaatactaaaagttaacaatacttaaaatgctgatgtgaagtcaataaatcttaagtcatatgataaaagaaaaaggaaataaaatgaagatattttcttagtacaggtgtatacatgcacaaacatgtttttaacaaaaggaggaggaaatactcatgacaattacagttgtttctgcagctggtcatgcagtcgtagctggtattgatgactaccttcttctactagccattctgtattccctttgccttcagcaagcacctcagcaggtggtggtttttttcctggtagagtgacccaaaccttcattcctgaagggtctgggtcatttgtagtcctgcctggatggggctgttgtagtttcccatttaccttaatcacagggcatggcaatacatggtaatactaaaagacgccctaatggatctccatgcatactcttctttacctccgctatggagtagtagactgatttcatcttgatagtcagggtcaatcaccccagccaacactgtaactcccttcttagcctgttgacttaaaggtaggaggagcccaaagtgtgtccaggtggcaatcttaacttccagtttaatggaatcgttgttgtgtctcctggtggcagcgttcctccctctggaactaagacctctaggccagcagaacataatgtctcaagaacgggaagaaaaattttctagtggatcactaggggtgatggtgagtgattcctggacccgggaatcctggctatgggagaaacagtaccatatattggacactgattcagagcatacacagccttctggaaaactttgctccagccctgcaaagtactgtcttctagttggcattgtaattgtgacttcaaaaggccattccactgttctaccaatccagctgcttcaggatggttgggaacatggttaagaccagtgtggccaggcacattggctcatgcctgtaatcctagactttgggaggccgaggggggcagatacaaggtcaagagattgagaccatcctggccaacatggtgaaaccccatcactactaaaaatacaaaaattagctgggcgtggtggcgcacacctatagtcccaggtactcggaaggctgaggcaggagaatcgcttgaacctgggaggcagaggttgcagtgagccgagatcgcgccactgcactccagcctggcaacagagcaacactccatctcaaaaaacaaacaaacaaaaacagtgaattccatgagcatgagcccactggcacacttctttagctgtaaagtgagtgccttggtcagaggcaatgctgtgtggaataccatgatggtgggtaaggcctttggtgagcccatgcatggtaatcttggcagaagcattgcatacaggataggcaaacccatatcaggagtaagtgtctattccagtgaggacaaatctctgccctttccgtgatggaagaggtccaatataatcaacaaggtagctggctgatcaccctgaggaatgatgtcatatcaagggctcagtgttggtctctgctgctggcaaattggacactcagcagtggccatagccaagtcagccttggtgagtgaagtccacgttgctaagcccatgcataacttccatccctgccaccatggccactttgttcatgggcccattgggcgaggagaggggtagctggggaaagaggctaagtggcatccacagaacaggtcacgctatccacttgattattaaaatccttctctgctgaggtcacctgttggtgagcactcacatgagatacaaacatcacagtttttaaccactcagagaggtctatccacatacctcttcctcaaatctctttgtcaccaattttccaatcatgcttcttccaagtccctgaccatccagccaaaccactggctccagcccatgaatcagtatataatcgcacatctggccatttctccttccacgcaaagtacacaaccacgtgcactgctcaaagttctgcccactgggaagattccccttcaccactatgcttcagggatgtcctagaaaggggctgtagtgctgcagctgtccactttcaggtggtgcctgcatattgtgcagaaccatctgcgaaccaggccctagtcttctcttcctctgccaactgatcatagggaactccctatgaggctatcagtataggtggggagagagaaggtacggtggcatgagtggagaccatgggcatttgagccacttcctcatgtaacttacttgtgccttcaggacctgcttgagcccgatcgtgtatgtaccacttccacttgatgatggaatgctgctgtgcacgacccactttacggctagatgggtcagaacacacccagttcatagataggcagttcaggtcacaaggtgacttgaagacccacagttaaacattccgtttccaccaaagcccagtaacaggtcaagagctgtatctcaaaaggagagtagttatctgcagaagatggcagggccttgctccaaaatcctagaggcctccgctgtgatttacctatgggggcctgccaaaggctcgaaacagcatccttatctgccactgacacttcaagcaccattggatctgttgggtcatatggcccaagtggcagagcagcttgcacagcagcctggacctgttgcagagccttctcctgttctggaccccactcaaaactggcagttctttgggtcactggataaatgggccagagtaacacacctaaatgaggaatggtgcctccaaaatccaagtaggcccactaggcattgtgcctctttcttttttgtaggaggggccaaatgcagcaatattcttcaccttagaaagaatatcttgacaggccccacacccctgaagccctagaaattttactgaggtagaaggtccctaagttttactcggatttatttcccatcctctggcacccaaacgtctcaccaataagtccagtgcgtttgctacttcttgctcacagaatccaatcagcataatatcattaatgtaatagaccagtgtcatatgttgtggaagtgaaacatgaccaaggtctctccaagtaagatttgtttatataaattagaaaactcaagcagttctttacgagtgtagcgcacctcctcatgggtcacactctcagcctcacctctagggacctgctaggactttagtctggttataggtctagaagcaaacaggggtgttgggggtggcttctgaggagaatcaacattatcttgcctggcaactgcctcaggggaggccattcctgttgcctcaggcagcgcagggtttatctcttcagacaaaagtggaaaggctgatggcagcatggctcagggaggggatgttgccactactggggatggggaagctgtttcttctggcaaaaaaggttcatcagagtttacaaactcagagtccccagcttcatcagggtcctcccacacatgccctttccaagttgcagggtcccattcttttccaatcaatgcccacactttaacagtagacacctggttaggctgtacatgcaccttttgttgcaggtcagccacttgcatgataagagtttgtgtttgttttttcacaatttcagctctttttctacaggagataagggtctcactcaggtcaatcttagcagatttgaggctcagtatctgcttctgaagacaggagacagaatccctgagctcatcattttctattttatttttttattttttttttttattttttttttttgagacggagtctcgctgtcgcccaggctggagtgcagtggcgcaatctcggctcactgcaggctccgccccctggggttcacgccattctcctgcctcagcctccggagtagctgggactacaggcgcccgccacctcgcccggctaattttttgtatttttagtagagacagggtttcaccgtgttagccaggatggtctcgatctcctgacctcgtgatccgcccgcctcggcctcccaaagtgctgggattacaggcgtgagccaccgcgcccggcccatcattttctttcaccactttgtccactgaatttaggagcaaccaaccagcttcattatgttccttggttctccatatatggtcaaaggtattattatgtatagggtcactaaactccttgcctctcattagcggtgaatcaggagtgtcaaatgcatttattttgcaaactctctaaacagttcacagcaacgactatcagtgttctccacaatattagaagtagagtccttaatattttagggtctaatcatattaagcagcaaactccagaaacccccaaacaaactaagaaactccatccttaatactccgttcctctagaaccacactccttgtaccaaaatctctattagggttctctagagggacagaagtaatagaatatttatataaaggggatattaactattaactagcacgatcacaaggtcccacaataggccgtctgcaggctaagaggcaagaagagccagtccaagttccaaaactaaagaacttggagtctgatgttcgagggcaggaagcatccaacacaggagaaagatgtaggctgggaggctaggcccgtctctcttttcacatttttctgcctgcttatactccagccatgctggcagctgattagatggtgcaccacccagattaagggtgggtctgcctttcccagcccactgactcaaatgttaatctcctttggcaacaacttcacagatacacccaggatcaatactttgtatccttcaatccaatcaagttgacactcagtatttatcatcaaacctactattttgaagggctccaaaacaatctaccatgaaaaatggtgtcctcataatggaaaagttgagatatacacctaagtggagtaacacgcaatcacagactctcaaggattacctggttcatttatttaccctttaatgtataaattcccggtccaatacttctacaaagtaataaatcattcagctgattctgaacatctccatctacaggcaaaccatgaaggaaaccatctcatgttcagccagctaagagtatttctccaaaagcagcaaaaaatgaaaaaaaaaatatttgcaaaacaaactgcatattgaaatttcagtaaaaccctaggattaatactcagttcttttttttttcaatcacctaggtgatatttaaaaaaattttaagagcctcctagaattaccagttgtcatggtgccaatttcactatagatggtatatgcgagagccttaccttcctggcaaaattctttgaaaactgttctaaaatacttaaaatgagttactagataatttcagtagcactatatggacacataccctaagtacatgcaaataacacactataaaagtgatgaactcaagtagggcaatccttgtagtgaatattagagaaactacgtttaataataacagaggtatcgtttagtcttctcagacaaaagaatgaaactaagggattattttaaatctttgttcattgcctggtattattttccctctgccaaataaaattatgtatgagtatgtctcttctaagtccatcaaacaaagaaacctaaaatgatcatttaaatggttccctgaaatactttgcttaaataataagcctaaagtaatacacaccttgagtaaaataaactgcttcacatctagatataatggaaataattttgccctccttaccttattcatgttgttttcatcaaccacgtctttggatatatcctggattatttctggacacaagataaggagaatgatttgtagtggccaaactgctgctttacgtttggtgctttcagcaaaaccatccaccaagtcaaatagcttttctgcacattctgcatgaaaaatatattaaatgacattattagataggaacaaaatccctggcattaaagtaaaagctgacactatgtaaaaacccaagggcaacatttttaaaagataaacatggaacttcatttaagcaactacacaaatgcattctggtaagtagacaagcaatgtaatactgtctatgtgttagaagagctatcttgatctatcctggaaaagctcacattttagaatggatgatcatgtattcagtctcactgtgaagggccttatgcaaagtgtgatgtacccaagcaacaaagactgaacagcttcccaaaaagaattaccaaagttctccaggagtctgtattctctgccttgcagttgtgtcttacattataggtgagaatattactactttatacacatctccctaaatacaaaataaagcttcagagcacatgcttctctacaacaaagagccaaacaccccatcctatcacagctctaaagatctgaccttcatttcaaactactttgtttgctccaaggaaaggaagagggttgggcctaatttagaaatgtaagagaaaaacagtatttcctatttgacaccagttgacaatagaagatgtaaaagcacctttataacaaaaataacttggaaaacgatgataggtttttatgtcacaagtaggcatttaaaagacaaaaaaaaaaaaaaaatcaatcgtatccttaccagccatatcagtctgtgggatctggtacagttttgtaaattcatctggataattttctacccagttccaaaatgcctataaataaagaaccacatgtctttacagtgattttttgtaatacagtaaataaaatgtcacaaacttctaacttccttcataataatattacaatgtattcttcctgaaaatgaatgtgaaactatcactcaagtcataactttttgattcaggatgctaacaacagcaaattttacatcaaaaacaaaattttaataccagagaggttgtaacttaccttttccaggctatttataactgctaactgcgcaaccttctttagggctttaaatttaaatgctgtttctggaaaaaacacaatttttaaaaattaactctagaataagttaacacaaatacaactcagagcaaaataactttccatttacgtattacttttgctccaatattatctgtaagcaatgaaaggtaaagacacctaacataaacccaaaactcgatagttgtctgctaggaaagaaaaattccataaacagcaaatatgccttggacatcaatgattgtgagctttttcttttaataacttgctttttcaaaaaaaagtataaaacacatacaggatattggttcctcctatccatgagcatggaattgttttccatttgtgtcctctcttatttcctagagcagtggtttgtagttctccttgaagaggtccttcacatcccttgtaagttggattcctaggtattttattctctttgtagcagttgtgaatgggagttcactcatgatttggctctctgtttgtctgttattggtgtataggaatgcttgtgatttttgcacattgattttgtatcctgagactttgctgaagttgcttatcagcttaaggagattttgggctgagacgatggggttttctaaacatacaaccatgtcatctgcaaacagaggcaatttgactttctcttttcctaaccgaataccctttatttctttctcttgcctgattgccctggccagaacttccaatattagtttgaataggagtggtgagagagggcatccttgtcttgtgccagttttcaaagggaatccttccagtttttgcccattcagtatgatattggctgtgggtttgtcataaatagctcttattattttgagatatgtttgatcaatccctagtttattcagagtctttggcatgaagggctgttgaatttcatcaaaggccttttctgtatctattgagataatcatgtggtttttgtcattggttctgtttacgtgatggattactttcattgatttgcatatgttgaaaccagccttgcatcccagggatgaagccaacttgatcatggtggacaagctttttgatgtgcttgttggattcagtttgccattattttattgaggatttttgcatcgatgttcatcagggatatcagcctaaaattttctcttgttgttgtgtctctgccaggttttggtatgaccatgatgctggcctcataaaatgagttagggaggattcactctttttctattgtttgaaatagtttcagaaggaatggtaccagctcctcctctagctgaatctggctgtgaatccatctggtcctggactttttttggttggtaggctattaattattgcctcaatttcagaacttgttattggtctattcagggattcgacttcttcctggtttagtcttgggagggtgtatgtgtccaggaatttatccattactgctagattttctagtttatttgcacagaggtgtttatagtattctctgatggtagtttgtatttctgtgggatcggtggtgatatcccttttatcattttttattgcgtctatttgattctcctctctttcttctttatgagtctggctagtggtctatttattttgttgatcttttcaaaaaaccagctcctggattcattgatttttttttttttttaaacagagtcttgctctgtcgcccaggttggagtgcagttgcacgatcctggctcactgcaagctctgcctcccgggtgcacgccattctcctgcctcaggctcccgagtagctgggactacaggtgcctgccaccatgcccggctaatttttttgtatttttagtagagatggggtttcactgaggccaaggcggcggatcacgaggtcaggagactcattgattttttgaaaggtttttcgtgtctctatctccttcagttctgctctgatcttagttatttcttgtcctctgctagcttttgaatttgtttgctcttgcttctctagttcttttaattgtgatgttagggtgtcaattttagatctttcctgctttatcttgtgggcatttagtgctataaatttccctctacacactgctataaatgtatcccagaggttttggtacgttgtgtatttttctcattggtttcaaagaacatctttatttctgccttcattttgttatcttcccagtagtcattcaggagcaggttgttcagtttccatgtagttgtgtggtttagagtgagttccttaatcctgagttctagtttgattgcactgtggtctgagagtctttgttatgatttccattctttggcatttgctgaggagtgttgtattccaattatgtggtcaattttggaataagtgcaatgtggtgctgagaagaatatacattctgttgatttggggtggagagttctgcagatgtctattaggtccacttggtgcagggctgagttcaactcctggatatccttgttaactttctgtctcgttgatctgtctaatgttgacagtggggtgttaaagtctcccattattattgtgtgggagtctaagtctctttgtaggtctctaaggacttgctttatgaatctgggtgttcctgtattgggtgcatatatatttagggtagttagctcttgttgttgcactgatctctttaccattatgtaatacccttctttgactcttttgatcttttttgttggtttaaagtctgttttatcagagactaggattgcaaccctacttttttttgctttccatttgcttggtaaatcttcctccaaccctttattttgagcctatgtgtaactttgcatgtgagatgggtctcctgaatacagcacagtgatgggtcttgactctttatccaatttgccagtctgtgtcttttaattggggcatttagcccgtttacatttaaggttaatagtgttatgtgtgaatttgttattatgatgctagctggttatttagcccattagttgatgcagtttcttcacagcatagatggtctttacaatttgttatgtttttgcagtggttggtaccagttgttcctttccatgcttagtgcttccttcaggagctcttgtaaggcaggcctggtggtgacaaaatctctcagcatttgcttgtctgtaaagtattttatttctccttcgcttatgaagcttagtttgcctggatatgaaattctgtgatgaaaattcttttctttaagaatgttgaatattggcccccactctattctggcttgtagggtttctgcctagagatctgctgtcagtctgatgggcttccctttgtgggtaacccgacctttctctctggctgcccttaatattttttccttcatttcaaccttggtgaatctgacgattatatgtcttggggttgctcttctcgaggattatctttgtagtgttctctgtatttcctgaatttgaatgttggcctgccttgctaggttggggaagttctcctgctaatatcctgaagagtgttttccaactttttccatcctccccatcactttcaggtacactaaccaaatgtagatttggtcttttcacatagtcccatatttcttggaggctttgttcatttcttttcactcttttttctctaatcttgtcttctcgctttatttcattgagttgatcttcaatctctgatatcctttcttctgcttgattgatttggctattgatacttgtgtatgcttcacgaagttctcatgctgtatttttcagctccatcaggtcatttatgttcttctctaagatggttattctagtcagcaattcgtctaaccttttttccaggttcttagcttccttgcattgggttagaacatgctcttttagcttggaggagtttgttattacccatcttctgaagcctacttctgtcaatttgtcaaactcattctttgtccagtttcgttcctttgctggtaaggagttgtgatcctttggaggagaagaggcgtgctcgtttttttttcagcctttttgcactggtttcttcccatttttgtggatttatctacctttggtctttgatgttgatgatgatactattcctttcttagttttccttctaacaggcagaaccctctgctgcaggtctgctggagtttgctggaggtccactccagaccctgtttgccagagtatcaccagcagaggctgcggaacaacaaagattgctgcgtgttcctacctctggaagctttgtcccagaggggcacctgccagatgccagccagagaggacacaaacaaacggaaaaacattccatgctcatcgataggaagaatcaatatcgtgaaaatggccgtactgcccaaagcaatttatagattcaatgctatccccatcaaactaccactgactttcttcacagaattagaaaaaactactttaaatttcatatgaaaccagaaaagagcccgcataaccacgacaatcctaagcaaaaagaacaaagctggaggaatcacactacctgacttcaaactatacaaggctacagtaaccaaaacagcatggtactggtaccaaaacagatacatagaccaatggaacagaacagaggcctcagaaataacaccacacatctacaaccatctgatctttgacaaacctgacaaaaacaagcaatggggaaaggattccctatttaataaatggtactggcaaaactggctagccatatgcagaaaactgaaactggaccctttccttacaccttatacaataattaactcaagatagattaaagacttaaacataagacctaaaaccataaaaaccctagaaagaaacctaggcaataccattcaggacataggcatggggaaagacttcatgactgaaacaccaaaagcaatgacaacaaatgccaaaattgacaaatgggatctaattaaactaaagagcttctgcatagcaaaagaaactaccatcggagtgaacaggcaacctacagaatgggagaaaatttttgcaatctacccatctgacaaagggctaataaccagaacctacaaagaacttaaatttacaagaaaaacacaaacaaccccattaaaaagtagatgaaggatatgaacagacacttctcaaaagaagacaacaaacatataaagaaaagctcattatcactggtcattacagaaatgcaaatcaaaaccacaatgagataccatctcacgccagtaagaatggcgatcattaaaaagtcaggaaagaaaagatgctggagagaatgtggagaaataggaacacttttacactgttggtgggagtgtaaattagttcaaccattgtggaagacagtgtggcgattcctcaaggatctagaactagaaataccatttgacccagccatcccattactgggtatatacccaaaggattacaaatcattctgctataaagacacatgcacacgtatgtttactgcagcactgttcacaacagcaaagacttggaaccaatccaaatgcccatcaatgatagactggataaagaaaatgtggcacatatacaccacagaatactatgctgacatagaaaaggataagttcccgtcctttgcagggacatggatgaagctggaaaccatcattttcagcaaacacaagaacagaaaaccaaacaccacatgttctcactcataagtgggagatgaaccataagaacacatgtacacagggagaggaccatcacgcatcggtgcctgtcggggggtgggggctgaggtaagggatagcattaggaaaaatacctaaggtagatgatgcgttgatgggtgcagcaaaccaccatggcacatggacacctatgtaacaaacctgcatgttctacacatgtaccccagaacttaaagtataattaaaaaatttggaaaacatatacagggccaggcccgatggctcacgcctataatctcagcactttcgaaagcaggagtgggaagatagcttgagcccaggatttcaaggctacagtgtactataatcatgtcactgcatgccagcctgagcgacagagcaagactctgtccaaaaaaaaaaaaaaaaaaaaaaagcaaaagcacaggtgtttatgggaaatttttaaaaccatcaatgattctatcattcagagacaatcacagttaacatctggtggttttacttctaccacttttcctatgcatgtagaaaacaaatatatttaacataactgagatcatataagctgtatcaaacctgttcttttccatagtatccctaattatttctgtatcagtaaaaactctttttttttttttttttttttttttgagatggagtcttgctctgtcgctcaggctggagtgcaatggcacaattttggctcacgcaacctccgtctcccaggttcaagcgattctcctgcttcagcctccccagtagctgggattacaggcgtgcgccactacacccagctaatttttgtatttttagtagagatggggtttcaccatgttcgtcaggctggtctcgaactcctgacctcatgatccgcccacgtaggcctcccaaagtgctgggattacaggtgtgagccactgtgcctggcctatttttgatggctctatatgcaatagtaactattacacaaactattaaaacatatcatgtatttttagtatgatacacttaattctttttgaatcttaatgttttcagagtattacagatgaacaaactgtgtgtctaaggttacagatctaataaatgattgaattgggctttaaaaccaaggtcttttcagtatgctttgatgcccctcataatatttaagtcactgtattaagtgactggttatttaatgttttccagttttaacactgaggttatttctgttatttcactattataaataacattaacaaatattttcatatcaacatcttttcccacatcactgcttatttaagataaggaatctctagaagtgtccagtcaaagagatgaatatttttagggcccttgataaagattaccaagctgcctttcactagggttgggccaaatgctgctatcaccaagcagcatacgaaagtgccttcatcctatctttgtcatcataaaagtatgttcattttctttattttgctaattggagtgttcaaaatagtagactgcattttaacgcaagtaacagtaaacatttctccatataaatatattgggtattttaatttcttcttctttaagtttattgtccacatctagaaaaagatttatgtttggaaaaaatgacctgtctataagcgattttactggcaatggtccctcggcaaagaacttctcctgttgacttttaatgaagggataaaggtttttattacatctatgtaagtgtctaagagagagatgagtcttttttctggacttgcaaataagtaactctccaaatcagtttttaaaagtacccctttgaattctctttgctctcaccctccactgatttccaaataatgacattactcttcacagtgctctttagcaacaactttacctttatgacatcttaaatgtgttatataccataatctactctcaaagccaaagtatctttcagttctacaagtttcttgttggacatcctactgatacctcaaactcagaagatctaaaactgaatttatcattttcctggtcaaaccctctcttctgccatcaacctttccttcccttttctgctctaaccagcttattctgtaatatttggtgatatctctctaacctcatatatctaaattgactatcaaatgctatgtattccatttctttttttttttttttagatggagtttcggtcttgttgtccaagctggagtgcaatggcgtgatctcggctcactacaacctccatctcccaggctcaagcgattctgctgtgcctcggccacccgagtagctgggattatgggcacgtgccaccacacccggctaattttttgtatttttattttattttatttatttatttagagacggagtatcactctgttgcccaggctggagtgcagtggcacaatctcggctcactgcaagctctgcctcccgggttcatgccattctcctgcctcagcctcccaagaagctgggactacaggcgcccaccactacgactggctaattttttgtatttctagtagagacagtgtttcaccgtgttagccaggatggtctcctgacctcgtgatccacctgcctcagcctcccaaagtgctgggattacaggcgtgagccaccgcgcccagcccattttttgtatttttaatggagacggagtttccccatgttggccaggctggtctcgaactcctaacctcagtgatccgcccaccttagcctaacaaagtgctgggattacaggtgtgagccactgcgcccagcctccacttctttaaatacctatcaaactggtccccatccttaccctaccccaatccatcatctggatctccacaactctcattatttttcacttatattactgcataaccaagtcccagaagttcaggtaaccctctaccaagccatcctgcaaatttcaagcaaaggggtatatctaaaataaaatactgattaaggtattctctacctcaaagcctttctatcacttcccagggccactaaaataaagcttcgtaactcataagcacaacagtgcagcagtcaagtatctaggttctagagacgagcagatgtgaactcaatctttactgaacaattactagctctgtgactttgaaaatttactgaggcctcagtttcctcatctacacaagagatgataatattaatactagtattgcgtcacagggttattgtaagaattgatgagaaaaggcatgcaaactgcatagcgcaaggcccggtgcagactgaaaatataacaaatgtttctctctctctctcgatatatctatcaagatacagatatatctatagacagatctggatatacacatatcgattgatatatctatatacagataggtatatcgagagaaagagagaaagagagagagagagagagagacagagagacagagagacagacagagacaggatctcactctgttacccaggctggaatgcagtggcacaatcacagcttactgcaacctcaacctcttcctgggctcaagtgatcctcccacctcagcctcccaagtagctgggactacaggtgcgtgtcagcacacccagctaatttttttttgtatatatgggggtctctctatgttgccctggctcaagcaatcctcctgcctcggcttccccaaagtgtggggattacatgtgtgagccaccaggcctggccatatttttattaaaatgatctgacctattcttgtaccttcacatcttgctcatctctcatcccctcaaacaaatatatacttcctctctcactttacactcaccctatttgagtttatcatagtttttttctgcaaataacttgataatgacatcacttgtctcataaaccatgccatgagctccttagggacagattccatattttattaatttttgtaatcccagcacttagcatggcttcttatacatagtttctcaacaaaggcttgttgagttgtatttaaaacacattactacctttactactcattactgaaagggtgcattccttttaccactgtcaccaagagccatattttgctggcctatttaatatcggttttatactttatatatttatcagcatatactctaaatttatgttcatgagggagccgcattcgatgggaaagttacttcagtataaaagaaagtcatttatccacacattcaattagtttctcttatttggacagaagagacatttcagttaattattacggattgaacatttctattgttttaaacagctattcacaggcaacctggactagacttgtttccaaaacatcactgaatagttatgaaaaatcataaaatcccactaatacttcttaactttaattcatagagatctctaaattttaccattcagtttctcaactgctcaacgcttaataatagatatcaaaatcttgcaaatctcaactattaattcaatggtggtttattataatctaaaataattgctgtccacatgtttgtatcttggcataacagctaaaatcacccctatattttcctttattaaagttactgaattaattgttgcttggtttcacaatggtaatgacctaaaatcataaattatgaacaagggtaatatgaatagaacacagctttatattattcctttatataggtattgcctttttacatctctggtgagatagttattgagtttaaaggaaatattaagaaaacaaaaacacgtattttgaaaactacattgcagaactgatgtttctgaagctaatataattcaatctgttttaggtcagatattaaaaatattattgtttgacaattccttaagttacaaataaaaatatgtgtgaactgtatacggtttcatatctaaattagccagggtctaataatgccaaaaactaaaaaacatttttttgtaaaatgaaatttagatattcatactcagtttatgaatattcattgatatctgatttacatgaatacatcactgcttaccacagaatttatctcaattccttcagatcatactcagtttatgaatactcattggtatctgatttacattaacacatcactgcttactacagaacatatctcaattccttctgatcgtttatttcaatccacataatcatgtaaagtacttcccaagctttaaagtcacatattaggtgttataatatccccatgtggaactactactgacatgttctacaaggagacaaaaccggcaatggaaggttaagggactttgtaatgctataaagtcagtcagtagagagctgaaaacagaaatgtcagaaatgaaatctctggctcaattcatcctctcaccataacatcacaatctcctcgttccattctgcaataaaactttgatatcctactacagacaatctttgtaaagtgctacaatagctaaacagatagcttctataacctatagccacccttgagagatcaaattccagaaaaatgaaataatagcacccttgcattctctgtattgaaaacaaaaattgtagttaagcaaaactttccattgccaagatttaaaatgctcattttctctactgcattattttcaaagattgaaaaataattacccatttgtattactggttatttcacaaggaaatgtcattataaaatccagtttggtgttctagttcagcacaattaatataattagtacattcatgatactagtttttgacccagtgatttttttcagatatattatacatttaaacttacccttcaggagtcgttttaattttgcacaatccacattgatatactgtaacaattctatatcatgaacatcaacattgtcttctgaacaaacagttaattcctgtaacctaaaaagtaaaaaccaaaattaacttatcaaattaagtattaggggacaggtgtggtatctcacacctgtaatcccagcacttcaggaggccaaggcaggaggaccacttgaggccaggagttcaagaccagcctgggcaacatagcaagacatcatctctaaaaaaaatacaaaaattagctgggcatgatggcacacacctataggcccagctactcaggaggctaagggaggaggatctcttgagcctagaagtttgaagctgcaatgagctgtgatcacaccactgtacttcagcctgagtaacagagtgggccctatctcttaaaaaaaacaaaaacaaaaaaagtcttcgggtatccctaaattctgaattcaacagattcttcccccaaagatgagttcataagagtaaagacatatataaaaataaggcaataaatatttcttataaaaacctaaaggaacataacaaacaagggatatgataaaagaaaccatgataattcagtaaacgtagcatcgtagcatccttatccttaagattgaggtgtctaaatattgccgactttcggccagggttctttgggaaaattagttaattccaggatgggggcaagagatatacaaggtgagggcaggtcaccttgggcttgaaaacaggaaactatcaacaactatcagaaccatgtcaaatatcacacaggtatgcactttaggcatctcaactgtcaaaaatgggataatctgaggatcaaaagaattatgtctacaatggaaacacatacaataaattaaaacacacaagcctgttataatattgaaagaaaaaacttcatgggtaacctttcgcaactgttagggtaccaactcattctgataacgaataatggaagtcaagtctgtatcctgcattccctacatggactgtattgcaagataactaaacacacaatgaagcaaaaatctttcatagaagtcacaattttaaaataaagaatgaatgacagaatagaaaacgtttcattttgcagcccccaatgaagtggaatccaggcagtgatcatcagtgattactaaaaacattaggaaaaatttatgggaaactgtataatgaatacataatgctgataacatcgaaatccaatcactgatcataacattaaaagtcaataataggacatgtttcctgatgtgattcattaggaaccacatagcatcatcagtaaagtattcttgtccccccccagccaaatgaacgtgaatccaatgaaacccaaatacagaatgtagaaaggcaaataacgcagtccaacaaataaacagcatgggaaaaaatggagagcaaggtgaagaaatgaagaaatgatactgattaacagaggctcaggagaaatatcaaccaattccaaagtacgcatcctatttgtatcttaatttgaacaaaacaaaaaagccatttctgagataatgaaaaaacccacaaatttggcaatgcatgatattaaggaattatgattcttgataggtatgacaatattatagttaaatgcttaaaaatctatttattagagatatatactgaaatatttacaggtgaaatgatgtctggggtttgctttaaattactgaaaagggaagaagagaaaccatagcatgccagaaacagttaaagcagagtaagagatgcatggggatttgaagtactattctatgtgtatttttccatttttccacaatgaatagttttaaaaattcatatttccaattacaagtaaaagtataatttgaattaagactaaaactataataagtaaacttgattttactaacttctacttttatcaactagatttttgaaacacgaatgaaactttatattcacagggtacatttactttgtatttgaaaaccgagtaagccttttttcattgcacttttcacagtttgtacatgtatttatgtaattatttgcttaatatccctacttcacagaacataagcttataaggacaggaatatctgtttaaaccccagcttctcctatgttgaatatgaagttatcacaaacgtagaaacatttaacacttaacaaatatgtagatatttttaaactgataaaagaaattcacttagcctaaatgttaataaaaggcattaaacttttcttccattttacaccaacaaccacagcactcagattttcaaaagttggtattgctaatctattaaatcatgctacctaatgaggcatactcattattcatattaatagacataaaaaatataagcagcacaattaaattgtaaacttttataaatgcagcaatagagatatggtgaaaaggcacaaatactatatggtcttataatttatatgtattaacttgaatttcaatcatttagtgcaatttgcaaaggagttattaatcatcacactaaaccttcagttgataagaatgtaatcaatcctattcttccttctcaaattctcgtttcactcactttagctttaattagactacagctaacagtacaactattctaagcacttacatgaactctcttcctatcatcagggtaagaaaagctcagcatttcaagctgggaatgaggttgtcctcaatgctaaaaattccacagctgctgcaaagagcgtagaaatatggagtacggctcctcagaaaacacaacatcatagatcagcaataccaacttctgaaaagttgactcttgtggttgtttgtgaaaaatgggagaaaaattttgtcccttttatagtctggtacccttatagagagcaggtattttgtgaaggttaaacatcatttccgaagcagagaaatcaaataaagcgtagtctgagcaaaagaaatgaacagtagaaaacctatcactaaaacagctagaaagtctaggcatactgaaagatattttaaatgtataggtccagaaaagaagaagaaaactgaaaaccagagagttaagtgcacaagtacatgacccagccctgcaacaaaggaaagatgagtgaggtttttgatctccttaacctaggagcttggggcttaacatccacatggagactggatataaacgccttgtaccctaataattcaggattctaacttgggccctgcataaaacatgaactagaaagaacaatgcactccccctgccgcccccactccccacaaaaagaaaaaaagaaaaaaacctaccagcacaaagaagcttaactgctctgcctaaactttggataaagtgaaaaaagtcacctagagctgtttaccttctaagagtttagggttcaaatttatactgcccatacaggctgggactgagaaattaagaaaaaaatagctccagaactgggcacctggcaaatgcaaatgcaaaaccatcactagaacactccctcagcccaaggctacaaggattctcaaagaaaatacaggccacactaaagataactttgcaatcaaggattccaaaactgagatgaaacaattcactatgaatgaatcagcacaaacaaatcaatattaaacaatactaaagagaacgtaaaatacgttttaaatgatcagagacatataaaaaaactgaaaactatttttaaaaaaagagtaagaaaccataacgaacagatttgtatggaaccaaatagtaaactgtaaagaaccaaatgacttttaaagtcattgagttttctgcttctggtggtatatcaaatgagatattctgaagcaccttctcactacaaaacaactagatcaactgcatttgtggagtaattctgtggagaaagcagttactccgctacataaatactataagccacagaaaatggtatactcccagagaaaaataaagctatcttaagatttatagccagccaggcatggtagctcacatcctgtaatcccaacactttgggaggccaaggcaggaggatcccttgagcccaggggttcaagacaagcctgggcaacatggcaagaccccgtctctacaaaaaaattaaagaaactagccgggcatggtggcacgtgcctgtagtcccagctactcaagaggctgaggtgggaggatctcttgagcccaggaggtcgaggctgcagtgagacatgttcacatcactgcactccagactaggtgacagagagagactgtgtctcaaaaacataaaataaataaatctatagcctatcttcccctaaagaaaagtaaaggtcagaaatataaaaaccaaatcttaatcttaaaggagaaacattgacggggagaatggacaaacacgaaacatcttcatgatactgattcatctattatatataaaacataagatcaatctttagaaagaactaccattcaagccacacacatattttaagtcacctaatactatgacgatgacagcataagatgttccaacctaaactaaaccatcataatggtcttttaggtgagtgatccttcagtaagatcagctcctatttctgacacaagctaaatggaactgaaaatgcagttgtctgaaacaatgttatttcacagatgccatttctgagtggtctgtcctctgaaagctaataaaattttagacacttggtttctattctggcaacagtgaactagattcaggaaataaacaaaagttgcttatttttacatgtgctaatgctgcaaaatcccataaagtaaaacctttggtgactagaaattttctagaattttccaaggtggcacatttgttgtgttctataaggcagttcatgcattgatagactacaagacatttgggtttttttgtaccactttctacctttaatttaacaggtgtttcaaatagtaaggccggcctagcagtcacctaaatgaaaagggtttgcgttttttattaaatacaattttccaccctcctactctctaggtgtttgttaccttgctgactcaaccactgtattattattcataatataaaacgttactgctcaaaagatttcatgaaaacatttttctatcatgtaaatattacccaagattatcaataatataccattaaataaaactttaattttctttggatcaagaattgcattgaggttgaaaaatattgctgcctaggatcttaattatagaaatgtcattgttgattaaaaagattgcaggactctgaagttaatcaattcccccaaaaaaccgtaacacaaattctcaaatggtgatgtatgttgtctttcacacctgctggaaaacaacaaaggaatcagtaaatctgaataatcaaagtccactgttcgtacaacactgacgagccaaagatgcaggcaccaacaaagaggattgtttttctctattcggtattagtcttcgattcacgaatcactaaataatttgtgctatagtttctaattaagttaataacccatctgactttacttgccttagaaaggcaaatcatgtgcataacaacaatttgcagctacttgctactgtcacttataattctatcccatagagcactacctatactaatttctccacctgtaggtagcatatcacaactaatgctcaggatgattttgagtcatcaataaaagcttaaattatatttttgatacatctttaaaaacagaagtatattttataaaacagatttcatcaaaatgtggctaaaatagatagggaagcaatctggtatagtgaaactaatataaattctgaagccagcctgacttagaaattttgggtcctccattatttggcacatcacctgaacttttttgagtattagtttgctcacctgtaaaatgagggaagtatcatcaaggttactgtgaggatgagacagcaaaggaaatgctataaatactcaataaatggcagtattttacatacatttaaaatgtagtccactttctggagaattctactttgcaattattcacctccttgtgttttcacatcacttaggtttttttgtttttgtttttgttttgttttttggtaacctaaaatcttgtgataaagggtagagttgtgaaagtatttgaattctgactactctcattaattattccatctaattgggtagtttcatttaaagggataatatgtttaaaaagccaaaccaaaagttcatacctagtattgttttttaaagcctgctcacggcagatatttttatctgaaatttagactttcacattcataacagtgctcttatttaattgcacatatcaatatcacaatattacgcaattaaaatgtcaaagatattaatgcataaaatttctacgcaagcccagacaaactcatttctctggaggctgaggtaggaggatcacctaagcctgggaggtcaaagctgctgtgaggggcaaaagaacttgtctcaaaaacaaaaaaacctcatttccattaactttttatttttatgtagacaaaaaacaaaacttctaatattcatattacttcagtagtcccatgtggatttacacactaacctggtagaaatgcgactaaagactgcattgaagttgttgcagctgagagaaaataaaaccccagaggcagaattccgaagttcagctgcatgctggtttccttcacgacaggtgtgaagaaaatggcagatttctggcagcaactgtttgaccagcatcgtttcatctaatctcattgtgtcctttggttgctaaaatagaaataatcacattattctaaactttaattttacctgtaaacattttctattatgaaaattttcaaacacacacacagaacaaaaataatgaacaccttacatacacaccacctagatttaacaactgttaacgtttcatcatatttgctacatctgtctatagatagtttaataaagaggatggttccatctctgaccccataatcacaattaaagttcaatccccctgccatccttaccagtcctcccattcctgcttgctctcttgttcaccaaacgagcccttccctgggaatccccagtttgctgtgagttctacaattacagaatcgacttaattcatattgattgatgagtgcattgtgtcatctgtcttgacatttaagtaaattcctgggtgagccatcacacttgcttttgtgcagactgaccaaaacagacactacctactcaaagtaattttattttggttgaaatcttttcaaagtaaattataaatagaatacttcaccccatgtgccttggcatctcttaaaagaattttctctaatgtaacttcaatacaattaacacaccaaggaaaaataaacaattcccttgtatcatctaataccaagtctgaattcaaatttcaccactgcccccaaaatgtctttcataggcatttttattcaataaggatccaaaaaagttcaccgattacaacatgatgtttccttagtttcactattctatgcaagggcgcaatctcagctcactgcaacttccacctccagggttaaagcaattctcctgcctcagcctccctaatagctgggattacaggcgcccgccaccatgcccagctaatttttgtatttttagtagagacggggttttgccatgttggctaggctggtctcgaactcctgacctcaagtgatccgccctcctcggcctcccaaagtgctgggattacaggcgtgagccactacgcctggcccatattcaccactcttatttcccatgactttaagtgggccagctgccttacagaatgttccatatccttgatttaattattttccagtgacataggttgatttgctcttctagttactgtattgtatattttcgttcttttttttttttttttttttttgagatggagtctcgctctgtggcccaggctggagtgcagtggcgcaatcttggctcactccaacctctgcctcctggtttcaagtggttctcctgcctcagcctcccaagtagctgggactacagacatgtgccaccacatctggctaatttttgtatttttagcagatatggggttttgccatgttggccaggctggtcttggattcctgacctcaagctctccgcctgtctcgatctcccaaagtgctgggattccaggcgtgagccatggtgcccggcctgtatattttctgtaagctaaaatttaaacctaatggtctgattagattgaggttaaacagtttaggggattcactataggttatattacatcacaccatgagaacataaggccaggtggtcctgttattgacaccaagtttgataacttcggtgttaacagtgaaatctctactttgtaaatatatactttacaattaacacacaatcaatggataagctatcctgtaggtatgctgttccacattactatttcacctaacagtcttgataactacatgcggataagaattttaataacactgagcaagatggcaaagaacaaaaatgtgtacaattgtatgctacgctcaattctgtaactgcaatccaagcactctcagatgcaaatacactgaaacatagggacagtacataaacagacttcacaaaaacctgtgaattcacattacaatgcctatttcttgtttataggctaaccaaacaatacagatgttaactctaacaaataaaaatctaagaagtattaaatcttttaaataatagtcatattcacaggaacaaaaatacttaagattcctcaaattctacaaaattgcactcataacatattggtaagtatttttctttcacttaaatattccaactatgtataacaaacgtatacttgtgagctccgttcttcttaaactgcctcaatttactttgatttaaaagtaagaatcaagaaacatctgtaaaatcactgaaggaaataaaacaattgttcaataatataaatagcattactttttaaatagtaaatttaatgaaaaagcatacacatttttcaacagtagagcacggcaagataatatacattttatgcattacataagttatactaggcccacttattagcatttcaattaggctatcttcaaagagtattaaatcaaacagaggccaataatatcggtaatcattctccaaaatacattcattattacctctcaattacaaatgttaatggagaaaagctgtgaaactgaacaaggcaatatatgaccccacgccccaccattcagtcatgggtgtggctgatatactggtaatttgcagtcaaagtaataagaccactggaaaaaactgattcaagaaaagtttaaaatttgcccatcttcccagttccatcatcctatgtaacagctcttttgctctttcactccattttacacatgaacaatagcatatcacaagttaacggaaaataccatgctaaaacaactagctcaccttcgattttaagtagaaaacttataaacactgtctccacaattttggaatatggtcaacggtcaataagaaaatttaaaatattatgcttagggcaggcacagtggttcacatctgtaatcccaggagtttgggaggctaaaatgggcggatcacttgaggataggagttcaaaactagcctgaccaacatagtgaacccccatggcttatgaaaatacaaaaaaaatagctgagcatggtggtacatgcctgtaatcccagctacttgggaggctgaggcatgagaatagcttgaacccgggaagtggaggttgcaatgagccgagagggtgccactgcacttcagcctgtgccgcagagtgagactctgtctcaaaagaaaaatatatatacatattatgcttacattttttcgcttacagccttccctagggatacacagttgtgtcaatataatttttttttcaatgccctaccccaatgcttccaccaacacttctcaaccacactatcagtcctcatatattaaggtctctttcaactagtttcactatagagaactgcaacatatgtgaagagggaagcaattctgaatcaaaacaaaattctgaattctgagccaaaggaagagagaacataagaaatgagttaatttcaatacacatggattaggcagatcattaaaacagaggtatttaatttatatatttatataaactcttaccatgttccaggaagaattaaggataatgatgtatagaaatactttctttacacaatagaaatactcttgaaaaagttcaaattaagtcatggttgaaatacactgtggtaacaacttacaggaaaccagagaaataattgtttggtactctcctcctccacatacctatcgcatatttgtgtgtctacataaaacaagtgttctcaaggtaacatctatccttaataggtttaatttttaagttctcatttacataaatttcaaaagtagaatattaaaatcatattcatataggaggaaatacaagattactcttggacttctgaatcgcactctcccacaactctctgagagatccgttaaatcaaatagtgatctcttcataaaatattttcctaaaaacctgagagacagatacgtggctgaaacataacattttataagtaaacttaatatctgtttaatttacaaaagatgagaaaattttctcatgaaaaattgtctgtcaccaggtcagctatattaacaaaactcatatttatatgtctcagacaaaagtccataggactgtcctcttggtccacatctgtactttgggacataagatcattctcaagatcaaattcacaaagcctgcctacttaagatcaatttacttaccccagcaagacatttttccagtgtatccaatataatcaactgagagagatataaatttttttcagcagcttctccaaatattctctaacagaaaagatattcagaacataaaagttagtttcactttctgctaccaatcaacacacatctgaaaagtgaaagactaaaagatcaacaatagtcttccattttacctcccagattatactatacttaaatatattatttctgattttatcctaatcctcataaaaactaaagtctaaggcaaacagaaatggcatttattagagtctgccattaaccttgtaacagtaaaagatgctgttttgcttcatgctttaaaaatatgtaggatttagacacacatatagacctgtaccagaatcttgaattggggatttaactatacttttatgccacgaaatgatcaaagtcttaatttttatagcaaaaacatgctatagcaccacagtgaattttaagtactcactatcctcaaaatgaatactacatatgtatttattaacaagagactatggttttgaaaacttatttaataagcactaaatgaacgccaatataacaatgctgttttgttttgaaaagagggtcccaaatattaaaatatttcaatataactgggaacacagccacatattcatatgtgcaaatactaaactgtgccccacacactgcaacagaggagctacaaaaaatgttaaatgtctttccgtaaatctctttacctatttataaatggtcctgcttttggggggaaaatactaattttttccataaagaaggtaaatgattttctacacctccagtttattagttttgtaagtttagggtattgtgtaagcaactttcttaaaaggaaacacaccaaggatgatgcgaacaaaaagttaaacaccacatgctctcactcatatgtggaagctaaaaagagtaaaaagtagaagagaggacactagaggtaagaagggtcgggtagggagaatcggggtgggtagagatttgttaaaggatacagaaatatagctttataggaagaataagacttagtgttctgtactactgtagaatgactatgttaacattatatagttaactttttttttttgagacggagtctcactctgtcacccaggctggagtgcagtggcgcatcctggctcactacaagctccgcctcccgggttcacgccattctcctgtctcagcctcctgagtagctgggactacaggcacatgccgccacaccccgctaagttttttttttttttttttttagtagagacggggtttcaccatgttagacaggatggtcttgatctcctgacctcgtgatccgcccgtcttggcctcccaaagtgctgggattacaggcgtgagccaccatgcctggcctacagttaacattatatagtttcaaataacaagagaatattcaatattcccaacacaaagaaatgataaatattgagatgatggatatgctaattaccctagtgggatcactatgtattatatgtattgaaacatcaatatgtacccataaacatgtacaattattgtatgccagttaaaaataaaatagaacaagagaaaaattatctaaaatatgggaataaggcaaaaaggtaacttcatgtcttttcaatgtcatactagaatattatctaataaacctaaggaccatctcaaaaaaaaggaagggggaacaatcttcacaatctataaccagaagttgtttcacaactcaatacaaacaaatacaaactgggattataaatgcaggctgggcgcggtggctcacacctgtaatctcagcactttgggaggccgaggcaggcggatcacctaatgtcaggagtttgagaccagcctggccaaaatagtgaaacctcgtctctactaaaaatacaaaaaaattagccgagcatggtggcacatgcctgtaattccagctactggggagcctgaggcagcaaaatcacttgaactgggaagggggaggttacagtaagccgagattgcgccactgcactccagcctgggtgacagaatgagaccctgtcattcattcattcattcatttattcattcataaataaataaataaatgctaaacaccagcagagagttcagagttaatcaagaaaaatccagatcagttgccatgaactgagtatgttagtttgaaacagcttagaatggagatgttaaataggaatttagagagaggaagggatcacttgagaaagacaaaagatgttatatgttcaaaggtacagagggaggacagctggagtactctgaagtctaggaaacgtcaatcgattttagaaaatgggaagaagaaagaaattatgagcttttaacagtggaattatttgatgaaactggtatttgagaaaaactgtttcaacaacagggtaactactacagaatctgtcacaggttacagaaggaagaaaaaacacatatcttcataaaaaaatcaatccacattttaggactatgagatcatattttatcatctacttagggctgggacaaccgtaagtaaattcaaacaagatgctaaagaaaaatatgtgtaatggattactgtggtcaattcgtgtaggccacaaaagctctatgaaatcctaattcaagaaacatactggaaaaggagacatggtcacaaaagataggagatgtttctaagggaaataataaattaaaatgaaagttacagttacttgtgctcactgaatctaaaacccagctgattaaaaatttgacaaaataaaattaaaaggttatctgtgctcgtaaacaaaataagattaatggttatatccaaagtccacagaaaatcactttccatacttcaaaatatgctgttctaaactttttaatcaaaaagaaaagaaagcaaattccccaaaacacagtaacccaaatactcaccatattgttaacattctttaaaatagtagtgaggccgcttataaccaaagaaaacttgtatttggaaatattgattagacattccttgttgtgctcagtactgactttggtatgtgtgttctgctgtcctgtttttattggaagctgaaaaaaaaagaaaaaaaaaacacgttaacagcttatccttaaaaacgaccataaataacttacttgccattgaaaatcatgacgttttaggaaaactgcatcaaccacagatacctatacttgcatctcaaactccgattttcaatcaacctccaatatatgatacacagatatgtacatttgcatctcaaacaccaatatatgatagcatttattatagcaaatcttaaattctttggaaacttccatttttgcagctttctttctggaagtcataaatctctatctacaaaatagaattctttatccagcactatataagaagaaatgatgactcacagaaacagagctatttgcttgtggctaaaaattatttcagagaatgtctgcaataaaatgcatacaaccgtttcccttatccattgaactcaaacattaaaagaaaaacagatcaagaaaatctatgccctagacttcttgtcaataatggcaaacaactgctgattgttcagaagcaagaacaaactataaaacctggggaaaaaacagtaagactcactcagtaagataagcaccctcagctacacaattgaagggataacagaacacaagcagacaaatcccatgagaaaaaatattctatgagaagaccacatttacatttctctgtgaatgagttaagttccactgtctagaagttcatctctactctgctcaaaaatagcattctgtatttaaagcatcatggacatacttactgttaatattaaaccctgctaatgctaacagagaaacctagcaatgttcctctgtgaaaaaaacaaacctgaatataactttctcatttttaacatagtacaactaaaggtggaaagagaccgaggggcatgcccaagtttgctaaatcagttaataatggacgattattttgatagtaaagaaatactaaataggctgggcacggtggctcatcccagcactttcggaggccaagtcaggcagaccacgaggtcaggagattgagaccaacctggccaacatggtgaacccagactctactaaaaatacaaaaattagctgggtgtagtgccacgtgcctgtaatccaagctactcgggaggctgaggcaggagaatggcatgaacccaggaggcagagattgcagtgagccgagattacgccactgcactccagcctggcgatcgggcgagactccatctcaaataaaaaaaaaaaaaaaaaaaaaaggaaatactaaatgaaattggcggggtggggcagcatttttagagtgtaaaggagggggcagaacagaaactacagaacttcgtaatgttaattataaagattatggaggaaaaaaacctgaaaggccaaaaatgggacttttgtttacgagcacagataacctttttaattttattttgccaaatttttaatcagctgggttttagattcagtgagcacaagtcactgtaactttcattttaatttattatttcccttagaaacatctcctattctttgtgaccatatctccttttccagtatgtttcttgaactagggtttcataaaatgcagctggtgaatctccctaagtatcccataaaaatcagagaaatggccaggtgcggtggctcacatttgtaatcccagaactttgggagaccaaggcaggtggatcacttgaggtcaaaagttcaagaccagcctggccaacatggtgaaaccctgtctctactaaaaatacaaaaagttagccgagcgtggtggcacatgcctgtaatcccagctactagggaggctgaggcacgagaatggcttgaacagcaggtggaggctgcagtgagctgagatcgcaccactgcactccagcctaggcaacagagactctgtctcaaaaaaaaaaaaaaaaaaaaaaaaaatcaaagaaactagaacttctctagtaaaaacacaaactgatgaatatctacatgaaaatgaagggacaaggtccctcattcccaaacccagagaagtgaacaaatagaaacaaaccatttatagttacaaaactggttggggacatgcgcaatggctcatgcctgtaatcccagcactttgagaggctgaggcaggaggactgcttgagtccaggagttcaagaccagcctgggcaacagagtgagacctcatctttactttaaaaaaaaaaaaaaaaaatctaggcttggtagtgtgtgcctgtaatccagctactcaagaggctgaggcaggaggactgcttgagcccagaaagttgctgtgatctagccactgcactccagcctgggcaacagagcgagatcctgtgtctggaaaacaaaaaacaaaaatactaatgtggtataagcatctatgcaagagaaagcaggtggaaggagaatgtctaatggatctgacaagaggagattcccaatgtactgcatccttaataaaaagcacagcagcccaatttaggaatattagccaaaacagagggtagttatgctcattgcaatttgcagatgaatgaaaaaggcctatgataaaagtctcaagagaatggagcacactcaaaagcatcactgtctaataggatttgctgtggtaatgatagtgctctacatgggcaatgcccaatacaacagccactagtcgtcacatgtagctattaaccacttgtaacatagctggtatagacaagaaatcaaaagtttaaagtttatttaagttattattaaataaagtttatttaaatttagctttaagtagccacacatgtaattattagatctgactggacagcacagttctagcccacactgagaagaaactgctgagaatgaactccaaactgaaaacaggggtaaagggagaaaaggaaaaaggtccaaataaaaatgaaaaagagagagatgaacaagagatctctgaaagaatgagaccattttttttttatttcatgaaagtaaaaaaagaataagctctagagacataaagctacaaagctatcctggcctacaaatccctcctaccaattcagaaaaattaatttcacataaaaataagccaacagaaaagttctatggtcaaataatatgtaaagttattattaagaaaaaggagtaagaaacagaaaaacataaaaataagggtctaaacaacagaaaatcaaagtttccaaaaagacatatccaccaacagatgaaaactgtaaattattatttcaaagtgagccaagagaaattaagaaaatgacaaaagatgtggaataacacaaataagaattacagatagaaataagttgacagaactcaagaaagaattagaagataaatcatttcagaaatgaaaactaaccagaagatacataagagtaaattaacacagaagataatgctttaagagtaaacaaatgttgaaaaaaaaggggggactaaggaggaaagttgtaatataaaaaagaaattacatacgagataataaaaatttacaataaagtgacaaaaaaagatagaaaaagaagattcaacatacatataacaggagtcaccaaagaaagaaaccaaaccaatggaataaagtggatattagaaactagaattcaagaaaactttgctgaaattattattgaaatttttaaaaacttgaaactgtatctttaatgtgcataccacacacctggaaaagtgacccagaatgaccaataccttaacatattttgaacttccgtgaacaagaaaaaaaaaatcttttgaacttacaggcagaaagaggacattatttatacaaaaaaaacccaaaaattagactctcatcagactttgacaaaattttatgtcagaaaacaataaagtaaaataaatttaagatatttaaagaaaacataaaccacacaggaaggggaacatcacacaccggggcctgtcgtggggtagggggaggggggaggaatagcattaggagatatacctaatgtaaatgacgagttaatgggtgcagcacaccaacatggcacatgtatacatatgtaacaaacctgcacattgtgcacatgtaccctagaacttaaagtataattaaaaaaagaagaaaacataaaccaaggattttatatctagccaaactgaattcaaatacagtcagccctctgaatccatgagttctccatctatgcattcaacaaactgcagatcaaaaaataaattttagtatgtctgtactgaacaggtacagacttttcgtcattattccctaaataatagtgtataacaactatttatatagtattacattgtattaagtattatcagtaatcaagggatgatttaaagtacacaggaggatgtgtgtaggctatatgcaaataccacaccatttcatatcagggacttgagcatctacagatttcaccgtccatggaggttcctggaaccaatgtcccagatactgagagacaattttatagcaatgacaaactgtgctaaacggcaagaaccctggaaattttgttcccttttccttttcctggaggatatactagagaatatgcttcagatgaccagaataattggaaagacatccacattaataggaatcattaaatatatttagtgatggggtatgttctgagaaatgtgtccttacatgattccactgtcatgtgaacatcacagagtgtacttatacaatcctagatagtatagcctgccacacctctaggctatatggtatacagggtacaaaactgtacagcatgttattgtactgaatactcttggcaacttgaacacatggtgtttgtgtatctaaacatagaaaaggtaatgataccatattataatactgagggactcccattacatatgcagtccatcactgaccaaaatgtcattatgtggagcatcactgtatttttatttatttatttattttttttttgagacagagccttgctctgtcacccaggctggagtgcagtggcgtaatctcagctcaccataacctctgcttccaaggttgaagcgattcccctgcctcagcctccctagtagctgggattaaaggcatgcaccaccattgcctggctaatttttttgtatttttagtagagacggggtttcaccatgttggtcaggctggtcttgaactcctgacctcaggtaatccacccacctcggcctcccaaagtgctgggattacaggcgtgagccaccgtgcccagccggagcatcactgtgttttctaaaagaactgagaatggtggcaataagggagaaagtatattaggtgactgctttatgtacttgataatatagatacaatacaattatcaaaatgaggagagggagggtggtgagagcatataaatagtagaatatgtttcttgattgtcttgttattaactgagagtaaaatgctagggaaaaaggagatgaggaaaggaggtttctagttcatttcaatattgctcagagtaaaaaaccaacacataatacccctccaccccaaaagagaaggaaattagaataccatataaaggtattaatataatggtaaccaccagaacaaaaacacaaattgtactggtggtgcgtggtgtgttaactgttaagctgggaactactttcccagatcccactcactatatggttctggttagagttggtctaaagggtaatttgtacaggctgtctatccctaattgaaaaatctgaaacctacaacactctaaaatccaaacttgttgatcaacaacatgactctcaaaggaaatgctcatttcagattagggatgatcacggtgagtaaaaggcaaatattctagaacccaaaaatatgtgaaatccaaaacacttctggtcccaagcatttcagatacgggatactcgacctgtataaaatttgtttgaaatgtggaagcgaagcagcagctattattctgaaggtttcacagtaacatacaatgagagacagatacagaggcacccagaaagttccagcttttactctctctctctttcactccatgtccagctctttctttggaccagtggtcactttgctgaccaatactagcccaaacctaccaccagatgcttgggtgcaaacctacagggctttgtaagacaaaccttacatggcaagagcttcccacagtgccctcctcaagctcctccttcataatctcacttcagtggctggatatatttgacttctcagatttccccaacagctccaacttatctacccattgtcattgatttggacgatctggttagtggactcctctgatcctccaattccccattccagatactcacctcacttagtcccctcaaaactgtatacaatctaatttctacaataaattccttatcattacacagtatgaacgctggtctgaataaatctttctaaatacaaaaatatatgctgaggccaaggcaggcaatcgagaccagcctggccaacatgctgaaactccatctctactaaaatacaaaaaaattagttgaccatggtggcgcgtgcctataatcccagctacttgggaggctgaggcatgataattgcttcaacccagggggcagaggctgcagtgagctaagccccactgcactccagcctgggcaacagagcaagactctgtctcaaaaaatgtgtgtgtgtgtgtgtgtgtgtatgtgtgtgtgtgtacatgtatataagtgtatatatttatatatgctgaaagagcaaataacatgaacacagtgacacttaaataaaagacatgtataaaatgtaacgtaaaaccaaaaaatgaatccaaattcattaaatgatagaataatctccaggacacatcttaagttaaaaaaaaaacaagatggagaaaatatacacagtatgttccattcatctaagaagagggaggagatagaaatatatgtttcttatattaagaaacaaaacaaaacagtagaagaatgaaatgctcaaaaaaattagtggttgcctttaggaaatgaaaagaaagtagaagtgaaaaggatagaatccatattctatatggaatacatattgtttttgtagatttcattttagaactacgtaacttacataaacataaaattaaaattttaagaagtctagaaatcaaaaataaacaaatcaactgaaaactgtatctaattctttaatggtataaatgtatctaattatttaatggtataaagagaggaactaaataattctgtggtattttaattctatgactcctagtgcctctaaaaacccaagactttcagcatgggaaataaaagtaatggtaaagtaaagaaatgtagtcttgaatttgaaatagaagtatctatatgaagtcaagatattttattttgtactttaaaaaacatatttctatttctgtccaatgaaaatgcctagaaacaatgaccaatcccatagtaatgactaatgaccaatcccatagtaatcctcactcagttgtaatcttgaacgaccatttcccagtaaaaggaatctggactcctttaggaaatggctgcttctatgtctggaggaaaaaaaaaaaaaaaagacataatgaccccggaacatcttgtcataccagatagcagcactgactaataacggtcaagccaaaaatggttaggaatgaattttaaagaggcccccactggccaaaagtgtaataatttgaacacttaaggatggcaatttattgaaacatattaaatatatttaaatccatactactgtttccatgtaggatagaataatttactgcaaaacaatagctcccaccacaaacttaatttctaacaaaagatgaaatataaaaatcacctgtttgaagaattcagagagctactgaaggaatagggattagcaacactaagattccaaaaagagtgagctataatgaggtaaggggatcttctgcagctgcttttcccctggggcatttgcagattctggtcaggaaaacagattgagaaataaggcttttttcccaggcaatgtacctctaatggaagaagaaaccatcagagattctggtgttcactgagggctagattggcaaaactgaagacgtgagggaatctcaaatgcctcagtgagtggaagagggtaaaaaggctaaactaaaaacttctgaaaagcaaagcagaatttgaaagccttgcagcttcgagaggacaaaagagttcagaatctgctagtggagaccttagtaaatacagttctcagtgataagccctcgaaggctgtgtcttctacaaacaggagcaaattacagcaactggaaatcttaggagctactagtaggcatgtaactcagtacttaccttggaaactggcattatctgctaaaactgaacacacacacacacattcagcaatttcactagatatatacccaacagaaatgtatatatgttcaccaaaagacatgcacaacaatgttttacagcagcatgttttataattcccaacaactggaacaatccaaatgttaatagcagaaatggtttttaaaaactggtatagtcataccatgaaaaaatatacagcaagagaatgacttacaattgtgagcttaatttcacaaatacaatactgacagacagaagtcagaacaagacatattgtatgatgttacataaatttcaaaaccatgctaaattcaacccatgattttagaagtcaggatagatccctggaaaacagtgactgaaaggaaacacgaggaggactcctagattcacagtattgttttatttcttgatctggatactggttacactggtgtgtttactttgtgaacatttaactgagctgtatatttacaatttgtgcccttttctatacacataatttaacagaaagtttgctaaatatatgtttaaatccatgaatgaataatgataataaaaaacaaaaacaaattggccatttggtggatacagagaaatcgtggtagacactgaggtgctacccagttcctccttcaaaaaaggacttaccttaaatgctgggagtgctgtcagtcagccccttcagggattgcctcacctacaaggaacaaccctgttcaaggtcatatccttcccaagataacccacatcaaatgactaattgatatggcaatatgaaggcctggacacatcagccaccgcaattctgggcaactcagaagagccattcttgtcccaggctcccattctcgctccaggctccccgtgggggttggccaaagctggtgctgggcctgcactgcatttgcccagtgctcctcactcccagatgttgatttcaaagaaaaaagataaaaacaaaaaagctgattaacttccaattgaaaactaagtttgaaagccagagaacctctctgaaaacacagagattctcctctcctgcagcaggagggcagagaaacctaaggaccaaaaccagcacttgattatcgcccatttattacacttatatatctcagagatatacagattggatggatggatggatggatggatggatggatggatggatggatggatggacagacagattagatatctaaatctgtatgtgttgggcttcaaaggttgaactcccaaaggcagcaggtctcctacgtccagatcaggggcctggctaggaaagaacaagactctgacacatggaatggaaacatctgggttggcgctcccaaaaatcttgtctccccagattcctgaaccgtctgccaacaaccaatgagcctggaagagaaccccaagcctcagataagactgaggccccaaccaaaaccttgatttcaggctgatgagaacctgagcagagaacacagctaagcaatgccttgactccgacccacagaaattgtaagatagtaattttgtgtgttttaggctactgtttgtggtagtttgttacacagcaatagaaaactagaacaactaccaaacctgaatctgtaatggaaacttctctcctgagcttcagatgtgttatccaaatgtccatttggtttctccacatggataacttgtaggcacttcaaactcaacatttccaaagcttaattcataatcttcctaccatgtttcctgtcttggtaaatagtaccacaatctacccagtttcccatgtcggacatctgagaatcttcatgatacttcttttgttccctttacttcatctccctttagtcagaagaatttttaaaatatattttggcctccacctttactcatttctcaacttgctcagaagccaggcagggaaggaagaaaagtggtacttaggccccccaggctcctactaacagcaccaaattctatgaaaaggaaaaaaaaatcaagattaaggagttctaagtaaccaagaatttatcagataaggtgttcaggggaagctctctgaagatgtgacatttgagcagagacctaaatgaagtaaaaaaatgggaagaccagccatgggattagtggttcacacctctaatcccagcactttgggaggctgaggcgggcggatcacatgaggtcaggaatttgagaccagcctggccaaatggggaaacctcgtgaaacccaaaaatacaaaaattagccaggcatggtggtacatgcgtgcagtcccagctactcaggaggctgaggtgggagaattgcttgaacccgggaggcggaggttgcattgagcccagatcgtgccactgcactccagtctgggcaacagagtgagaccctgtctcaaaatgaatgaatgaatgagaacgggaagacccatgcaaagatctaaagaagagcattcacggcagtagttgcaagtaaaatggatctgatgttgggtgtggcatgttcaaagcctagcaagagggccaatgtggttaacccaaagggaacgaagaggaaaatctaggggatgcggtcagagattcaagaagcaggagtcagatcatgaaaagccttataggccattttaagaactctgaatttattttgaatttgacgatgtcacggattatattttccaactgtcaagtatctctcatcccacatgctttcccgcaataagattttgccactccctcattaggaaaagaaatttatttttctacctcctttcatctagcaggtccagtgactattctgaccaataaaatacggcttaaaggcacactgtgtagttccaggccatagtccttaattggtctgacagtttttatttccctcttcctagaagccagttgtcatgtaaaaaatgggactactctgagatcagcatgctgtgagaagccgaggccacatgcagagattctgaagaatgggacgccattgtggagagagaggccaagaaacactgaggagccagacatgtgactgaagaagccataatggaagggattctccagtgtcagcaacacaatatggaacagaagaactgcccagctgaacctgtcatgaattcctgacccccaaaaattgtgagcacaataaaatggttgtttttaggctacaaggctttggagtagcttattatacagcaatagataaccaaaagacaggggaaaaaggcactgaacgaatttaagcaaaggaatgacataatctgatttatgttttaaaaagaaccctcttgttgctgtatgttagaaaacagtcttactcaagagaggatggtagcttaagttaagctaatatgaatagaagagaaagtagtgagatgttataatagatttagaaggggggtgcttatttaaaatggtaagctgattctgaagttaatttggaagaataaacttgtgagaataccaaagaaatttttgaaaaacaagaacaaggccaggcgcagtggctcaagcctgtaatcccagcactttgggaggccgaggcgggcggatcacgaggtcaggagatcaagatcatcctgactaatacggtgaaaccctgtctctactaaaaatacaacaaaaattagctgggcgtcgtggcaggcgcctgtagtcccagctacttgggaggctgaggcgggagaatggcatgaacccaggaggcagagcttgcagtgagccgagactgcgccactgcactccagcctgggcaacagagcgagtctctgtctcaaaaaacaaaacaaaaaaaagaaaagaaaagaaaaacaagaacaagagacatgaccaagtactgaaatatactgttaagctcttacagcacaatctgtacaagtacaaattaattgcaatcacagaaaagatattcatattcacacacaaatttaatataataaaggtggtatttcaaatcaatggtaaagaatggattagtcaatacaattatgccacatcaaaaagaaaagactaattcatactaaattttaaaatatatgggtgctgccaggtgtggtggctcatgcctgtaaaaccagcactttggggaggctgaggaaggatgaccacttgagcccaggagtttcagaccagcctgggcaacaaagtgagaccctgtttctacaaaaaaaacatttaaaaattagctgggggtggtggtatgcacctgtagtcccagctacttgggaggctgaggtgggaggatatcttgagcccaggaggttgaggctgcagtgagccataattgcgccacagcactccagcttgggtgatagaacaagacccgtctcaaagagtgtgtgtgtccgtgtgtgtgtgtgagtgtgtgtgtgtgatttaaaaaaaacaaagccataaagctattaggacaaatactaaagaataatttaataatattggagtaataaagattttcctaagcaagacaaacatacagcacctataataaaaacactgatatttgcttacaagaaaatgtataaattctataacaaaaagacactgctaataaagaaacaaacgggaggtaaaagaatgcacatacaattagctaccaaaaagtttacataactaacagatcaggttgtcttgcctattaataagaatatttattggaaaaacttcaagaaacaaggggcaattcaaaggtaagtgatcagtaaataacataaaaatatgaccatctcattaataatttttttttttttttgagacagagtctcgctctatcgcccaggctggagtacagtggcgcgatctcggttcactgcaagctccgcctcccgggttcatgccattctcctgcctcagcctcccgagtagctgggactacaggcgcctgccaccacacccggttaattttttgtatttttagtagagacagggtttcactgtgttacccaggatggtctcgaactcctgacctcgtgatctgcccaccttggcctcccaaagtgctgggattacaggcatgagccacagtgcccggcctcatttccggcctcattaataatttttaaagtgcaaaatgaaattagaccacatttgtaaccatatttttcacaaaaaaagtaatactgaaacacatataagaaaataattatgcctagaatgaggaggaaaaaaccttgagcaaaatttaaaatatgaggtcattgtatttgagaggtaagaataaggtgattttttaaaatttttacttttatgagtttctcttcttttcagttagatacattactttcacacaattgaggaaaaacactttttaaaaacatttcttgctatattatagaaatctttgggtataatggaagaaatgtaaagctaaactgcatgaagaaatataatcaccttttaattatgatctctattaacaaactatcagcaacttaagatgtaagatttcaacaaacaagaggatttagcaaaagaaggcataacattaagcaaagcactctgtgaacaatggttaatttgtttctagtttcacttagaaaattcttcaaaaggtcacaggctaaaatttttgcctctgtgtacattctactcattttctaaaaggccccttagaccataatgggggtagggtttacattaaaattcacctaagttttcacctaaatgagagaaaaaacaaagaaaataaccatgctagaggggaagtacccaatacatcagctctagacaccaggtaacaaacataaaccaggaagaagcccacaagaaacggaattaagtcctcctcccaacaatcatgggagtgaacttggaagtacatcatcccctgccccagtaaagctttcagatgatatagccccagccaacagcttgactgcaacctcaagagaccgtgctccagaggcatccagctaaggtacccctatcttcctgacccatagaaactgtgggataataaatgtctgttgttttaaactgctaagttttgaagtaatgtgttttgcagcaatagataactaatacattgtgagtctaagtgctgaaaagttagaaagcaccaattactcccaagaaaagaaaaataagactttatcccaacagatccctgctggctacagaaaggataacatttaaattctaactaaaaggccatcaatgatgtccctgaagaaagagcaccactaccaacaccgtagtaagaaaaaaggaagaatatttcttttattaatacctaaaatcacatagatgtctctcatctgaaagaatagaatttctggtaagtatttcagatacctaaaaaaaaaaaaaacaagattaacaccttctatgtgtcaggcactgtgctgggtactacagatacaaccacaaagttaagcctgatccctgccccaacaatacctttaaaaaaaaaaatctgtgtatatgagatttataagctgatatcttgggatgtgtatagacagcaaaatggttactacagtgaaaacatctatcatagttactatgtgtgtgtgtgtaagtgttacaagcagctaaattacttaataaaaatccttaatacagttttgttttattaactatagtcttcatgttatacataagctctccagacttcttcattctatatatctgctattttattatctatataaccccatttccttcctcctcctgcccaaggtaaccactgttttattctctgtctccgtatacttgactttttaaaaacattccacatataagtgagattatatagtatttttctttttgtgcgtggtctatttcacttagcataaggtccaaccaagttgtggcaaatgacagaatatccttctttttaaaggctgaataacgttccattgtataaacacacacatacacacacattttctttatcaatttgccatcaacagacatttaggttgtttccatatcttggctaccttgtaaataacactgcaatgaacatgggagtgcagacacctttatgaagtgatttcatctcctttaagtatccaccctgaagggggacttgccctagctatacttttgaaacacaaaaatttctataaaataaggattttaagtgataactgattctaaggatatattgttttattacagagttgacacgaaatttttgtctttataaaattacttgctagggatcttctatttgatcatccaagataacagtattgctataaacaactactaattagcacttactgagcacaagtaccaggcactaaacacattatacacctcattgaatcccacaattgtcattatctcaattaatctctcagtctgagtctctgccactctccttttattctcccaccactttccttattcatactttcggagatgccatcctgaaccccacagcagtaagcttccttgacctctcctacatgattcttattactgtaattacataaccagatgatacgttgtttaatatccactgttgtgctagaatgtaaattccatgggagcagggaaggtatctttcttgtaatcgttttatcccctatggtcaggagttttaaaaggcaattagtacatgcttgctaagaaaagaaaaatgaactggtatgttacaccgcctcttgctgccctcaacaatcacctttttactgcttagggcagtatgcttctaactgttgtccaagaacaagtggtctctccaagtctaccaaccagtctacagataatttggtgatctcagaggaagagacccaccaacgattaccttcacctgtgttttacaaacttgaactgtaaaataatatttctacaataatcctacttccttactttgttactttcttaacgagtgaaaatctctataccataaaccagcagcctctttcctttatcttgcttccaagtccgaaaatcagacatacatcttcccaggcaaccaaccacgcaatattttctggaacaaactaatgttcaaagaaaagacatacatttagaaagcctccaacaataaagttagttctccaccaacttaccctagcccatgcacatgagcttccaattatctcacatttaagagtagatctgcatttttttccagcttgaggtataattgacaaaaataataatttaaggtctacatgataatttaatagatgtatacattctgaaatgattaccacgatcaactgacacatccatcatcacagttaccgtgtgtgtgtgtgtgtgtgtgtgtgtgtgtgtgtgtgtctgtgtaaaacatttaagatctaagagtaggccaggcgcaatgactcatgctgtaatcccagcactttgagaggccgaggcaggccgatcacttgaggacaggagtttcagaccagcctggccaatatggtgaaacctcatctctactaaaaatacaaaatttagccacgcatggtggcacatgcctgtaatcccagctacttgagaggctgaggcacaagaatttcttgaacctgggaagtggaggttgcagtgagctgagatcatgccaccgcactctagcttgggcgagagaatgagactgtctcaaaaaacaaacaaacaaaacttagatatttaaagtgaaaacagctcagaatcaccaggtataaggaaaccttattaacatgaaagaaaaagaaccaagtacacacaattaattttgagaaaaaagataatgaagaatgagaagaaaacttcaaaatacggtaaattattagtatcttaaaaaatacttaaaaatttaaagaatgctgcctctgatcccagcactttgggaggccaaggtgggcatatcacgacatcaggagattgagaccatcctggctaacacggtgaaaccccgtctctactaaaaatacaaaaaaaaaaaaaattagcctgtagtcccagctactcaggaggctgaggcagaagaattgcgtgaacctgggaggcggagcttgcagtgagccgagattgcaccactgcactccagcctgggcaacagagcgagacgctgactcaaaaaaaaaaaaaaactaaagaatgctatttttaaaatagagagagcaggccaggtgcagtggctcacacctataatctcagcactttgagaagcccaggcgggtggatcacctgaggtcaggagttcgagaccagcctggccaacatagtgaaactttgtctccactaaaaatacaaaaattagccaggtgtggtagtaggcacctgtaatcctagctactcaggaggctgaggcaggagaatcacttgaacccgggaggtggaggttgcagagtgctgagatcgtgccattgcactccagcctgggcgacagagccagaccctgtctcaagaaaaaagaaagaaagaaagaaaacattaaagagttggaagataaagtcaagatattttctacaaaaaaagaacaaaagaaagaccatgaaagaaaaaaatgtaaaacattacatgagtaatcaattccaacatgtgaaaaaaagaaaaaaattaataaataagataggaagacgttgccagagaataacacaagaagttttccagacttgaagagtctctaaactaagtaagacccatttggtatcccaacatgttattattgaactgcagaatagcaaggacaaataaaaaaaaattccaaggattctagaaaagaaaaaataaacagattgatgacaacgtaacagaaaccagaatggcattggggttagcaataatctcagtgataaactaaaaggcaatggagaaattctttccaaattctgagaaaaaaaattatttcatattagaacttaagacctagacaaattatcaatttttttttcaaaaaaggtagaataaagacattctcaaacattcaaggtctcaaaatttatctcctttgtacttttttttttttccagcaagctagtggaaggtgtgttgtaaatgaatgagatccacaaaacaagggaatcaacacaggagacaagcaataggaatttccaaaatgatgctgaagggagaacacaggatgatagctgcacacctggtatagcaagcagccaattctaaacactagcatgggaggaaatcctcaaggaaaatggtcacactgaacagattaacaggtttgaccctatgtgaaaaactgtactgagaacgtgttaatgatggaaagaaataacaatagctacataaaaactgaagcaaatgaaaaaaatgaggctaaatgagacattacatttaggagacacaaaaagttgtaccagaaagtaaacttaatcacagtacactacttggctcagcctcaaacaatattacatacatctaattgtagttccagaagaaaactaatagaaatacagaaaagaaacaatatttgagaaggtaatggctttttagaactgttagacaacaacaaatgtcactcccaagaagtccaaaaactcaaagcagaatagagatccatatacctacaaacattttggtgaaactacagaacaaacaacaaaaaggagacctaaaaaaacaactggagagaaaatgtcacctataaaataaaggcaattatgtcaactgaattctcaatggctatgatagcagacagatagtgaaatagtatctttaacatactgagggaaacataactgtccagaattctatatatccagcaaaactatcattcaagaataagggagaaataaagatacagtagtctccccttatccatggggcataagttccaagagccccagtggatgcctgaatccagggatagtactgaaccctatatatatactatgtttttttcctacacatacatgcctataaaaaagtttaatttataagacacagtaagagatcgacaataataactaattttaaaaaaagaacaattataacaatattccagcgtcactgctcctcctccttggggccattactatataaaataagggttaactgaacacagcactacaatatcatgacagtcaatctgataaatgagatggctactaagtgactaacaggcaggtaccatacacagtgtggatacactggacaaagggatgatttgcatcccaagtaagacgaagcaggactgtgtgagatttcatcacactactcaaaacagcatgcaattttaaacttatgaattgtttatttctggaattttccatttaacattttcagactgcagttgactgtgggcaacaaaccatagaaagcaaaactgctgataagtggttgtggggggagcggggagactactgtattttctttcctttttttttttttttttttttgagacagagtcttgctctttcacccaggctggagtgcagtggcacaatctcagctcactgcaacctccgcctcccaggttcacgtcattctcctgcctcaacctactgagtagctgggactacagacgcccaccaccacacctggctattttttgtatttttagtagagatgggggtttcaccgcgttagccaggatggtcttgatctcctgaccttgtgatccgcccgcctcggcctcccaaagtgttcggattacaggcgtgagccaccgcgctggccctgtattttcaaagaaaggaaagtaagagcaattactgcaacagaccctcatcaaaagaaattctaaagaatatgcttcaagcagaagtaaaatgaacccagaggtaaattctgagactcaaggggtaaaaaaatgaaacagttgaataaaaggcacataagaaaatggcagagctgggggtggtggttcacacctgtaatcacaacactttgggaagctgaggcaggtggatcgcttgagctcaggagttcaagactagcccctgggaaacacagtaagatgctgtccctacaaaaaaaaaaaatgttttttaattatctagacaagatggcacatgcctatagttccagctacttaggaggctgagctgggaggatcacttgagcccaggagacagaggttgcagtgagccatgatcacaccactggactcaagttagggcaacagagaaagacccctgtttcaaaaaagtaataataattagattaaattttaaaaagaaaatggcagaaaggaatccaaagatgtcagtcatcacaatgaatgtaaatgaactaaactctccaggcagaagaaaaaaaaaccatcagactggtttcccatgaactgtttataagagacaaacataaagcatacaggcacagaaatattgatagttaagaaatggaaaaagatctatcaggcaaatagaaacaagagaaaactggagtggactaagataaaaaggactagagatcaagaggggcactacatgatgatacaggactcaaatcaactgtaagatattgtaagcctctatgcacctaataacacacacacaaaactgacacatctgcaagaaaaaagcataaacatactaattcagtgaaagatttcctaacttacctttctcagtagtaagatctagcagacaaaaaagaatcagaatttagaagagttgaactgcttaataaacttgatcaaactcctatgtaaaaatcacactcaagaacttgggactacatatcattttcaagaagacatgaaaactttataaaaatggactgtatgcttatggtagccagactccaagatggtctgcaagtattcctacattctgatatccacacccgtgtgtcatcctctctcatctggtattcgggttgttctgcataaccaatattatacggcaagcaggaaggtatgtaacttctaaggatcatgaaagaatgtggcttttgattctctcagatcactcactctgggagacgtcagctgccacattacaagcagccagatggagaagcccaagtagaaaggaactgagacctcttacaaatggccagcaaagaactgaggcctcctgccaaaagctatgtaagtgaatttacttggaagcaaatgctctacccccagtcaagccttcagattactacagacccagccaagactgtcactgcagcttcatgaaagactctgagccagaaacactcagttcagccactaatggatttcagatggacagaaactttatgtgataataaatgtttgttgtacaaaacggctacatttgggaataatttataacataacaataaataactaataaatatgttcaaggtcataaagctaagttcaaatttgaaattactggtaacatataaaccataacatgtttcatattcatatgaaacactctaggtgaaaggagaaatcataattgaaaacattatatggaaatatgaaattgaaaaataaaaagccaattattgaaacttgtaggatacaattaaagcagcatttaataaatttataactttgaatacttacaatcaaatgaaatattcaaaactgatgagcttaaatataactctaaaagtcagaaaacgtgctaggtacagtggcttccacttataatcccagcactttggggaggctaaggcaggaagattgcttgagtccaagagttcgaagatgcagtgagctatgctcatgatactgtactctagtctgcatgacagagcaaaaacctctattaaaaaaaaaccaaaaagtcataaaaccacctaacactcattaggatggctactatcaaaaagagacatgaaataaggccagacgcagtggctcatgcctgtaatcccaacattttgggaggccgaggcaggcagatcacttgaggtcaggagttcaagaccagcctggccaacatggcgaaaccccatctctactaaaaatacaaaaattagccagacatggtggcaggtgccagtagtcccagctactagggaggccaaggcagcagaatcgcttgaacccgggaggcggaggttgcggtgagcccagatcacactactgcattcaagcctgggcaacagagtgagactctgtctcaaaaaaataaaaaaaaagacacaaaataacaaacgtaaatgaggatatggagaaattggaacccttgtgcactactgatgggaaagtaaaatagtgcatatacctatggaaaacagtaaaacagttcctcaacatattacaaatagaattaccatatgatccagcaaccctacttctaggtacatatgcaaaagaactgaaagcagggtcttgaagtggtatctgcacacccatgttcatggcagcattatttacaataaccaaaaggtgaaagtaacccaaatgtcctgaatggataaagaaaatgtggtttacacaaataacagaatattattcagcctttaaaaggtaggaaattctgacatatgctgcaatgtggattaaccttgaagacattacactaacggaaacaagccagttataaaaagacaaatactgtatgacgccacttatttgaggtatccagggtagtcaaattcatagaaacagaaagtagaatggtggtttccagtggctgggaacatggaggaatgggaagttctagtttaatgagtaaagggtttcagttttttgagatgaagggagttctgtagattggttacacaacaaggtgaatgtacttaatactactgaactatacacttaggaacagttaagatggtaacgtttatgttatgtgcatttttccacatttaaacataagattaaggccaggcacggtggttcatgcctgtaatcccagcactttgggaggccgaagcaggtggatcacctgaggtcaggagttcgagaccagcctggccaaaatggtgaaatcccatctctactaaaaatacaaaaattagccgggcatggtggcgagcgcctgtaatcccagctacttgggtggctgaggcaggagactcacttgaactcgggaggcaaatgttgcagtgagctgagatcacgccactgtactccagcctgggcaacaacagtgaaactccgtctcaaaaaataaataaataagtaacattaaaaagttaggggaaaaatgcatagcagaataaacccaaggaaagaaaatgtaacaacaaaattaacaaaacagaaaacaaagtttaaaaagctaagaaatgagtctttttatttttttgagatgaagtcttgctctgtggcccaggctggaatgcagcggcatgatctccactcactgcaacctcctcctcctgggttcaagcgattctcctgcctcggcctcctgagtagctgggattacaggcgtctgccaccacacccagctagtttttgtatttttagtagaaacggtgtcactatgttggtcaggatggtctcaaactctcgacttcaagtgatccatctacctcagcctcgcaaagtgctgggattacaggcatgacccaccaagtctggcctagaaatgagtctttaaaaatacactgaggccagccacagtggctcacgcctgtaatcctagcacttttggaagccaagaaagaagatcatttgagcccatgagttcaagaccagcctgggcaacaaggtgagaccccgtctctacaaaaaaaatttaaaaattagctagggatggtgacatgtgcctgtagtcccagctacttgagaggctaaggtgggaggactgcttgagcccaggaggttaaggctgcagtgaacagtgatcacaccactgcactccagtctggatgacagagtaagaccctgtctcaaaaaaataaaaacgaaatacacaaacagaaaaaaaaacatgaaaaaataaagaaataaacattaggggtgaaatattagacacaacttcagttaacacagagattaaatagattatataaactccccaattgattttataaggctagaatcaccttgatatgaaatccagacaacagctatataagaaaattacaaaccaatcttactcatagatacaaacatcctaaacaaaatatcagcaagtttacaccaacaactgatttgttaaatttatacatttcaataagaacagcccacagaatgtaacatcaatgtaattattagaaatcatgaaaagccacagggagggggctccaagatggccaactagctgcagccagtaggaacatctcccagaggatcaggatgactggcacactcttagcagatcttcagagggaaagcactgagtgctgacagagggaagacacagatgctgaactgacgagggaagaagtaaggaaccctgcacagggctaccacgcaccgggactttttcctggcccccagtgactcctgaagaggcagttgagttgaacagggaagcagcaacccactctcaccaggggactctggaatccctgcagaaggagactcctccaccacaaggagacccctcaaccaccaaggacacttgagctggcagggaaagctgcttagagaagtggtaggggcagaactccagccagggcagagctcagaggttttggtgctggagcatctgtagtgcaacagggccaggagtgcccatcccccaaggctcgacttgctcccataggagactttagccctagaggaactgccagacctgaactctgcagggcagtcttgcccataaggtgggggtggtgtgacctgagtaccctcagtctgctggtctctcatggggctccagcctggccaggatgcttgcagtactgccggggggggccacataccagctcctgcactgacaaggtgctgacaggcagagtgctccaaccacagtgatccctgtggaaaagcacgagcctgccaataccctcctcccaccgaaggctgctccatgctgctttgcctgcaggcactcgcccatggccaccctccaaatgctttgcccacacgtgtgcacaggtgtaccttgttttcccttccccgccagcacacatgcgtgcaagcaccctcccatgccactgcagccagcgtgagtacaccctgcctatccctccatggccattgtcaagggagcactggcaggtacagagcccaccagtgccatccccaccagcactgagcccctgcaccaacatgaaactaggcagagaaaacagaggacccacccccaccccttaccggccactgaagccagcatgaacgtgcacagagggcacacccagtcctgcacccaccagcaccctgcccctgtgctaacaccaccaccagtgcatgtgtaccagcagccccccgccctggccttactgccactgttgctgccaatgcccacatggaggccagcaccctgtggccttgctgccactgctactggcacatgcgaacaagaattgattccactgccaccccctacactttggctggcacaacccacgggagtattgtgaccagaggtccaggagcacctcggcccctccagtgcagcaggttcctaaccttaaagaaccagagaacaaagctggggcccaatgccagtcccccagagttggaggacccatgtactccgggagtcctgagatgagccctggcccctccagtaatgaagccagttaactgaacctaccttgtaccacaaacatccaaggtcatcatataggataaaaaaaaaaaaacaaaaaaaaacagcgacttcaaagactgaaggaacatcagcccacaaagatgacaaagcaccaacacaagaactctgatgactcaaaaagccagagcatcttctttcctctaaaacaaacgactgcactagctctccggcaagggttctgaactggactgagatggttgaaatgacagaaacagaattcagaatatggataggaatgaaaatcattgagattcaggagaatgttgaaacccaatgtaaggaagctacccacaataaaacgatacagagctgacagacaaaatagccagtatagaaaagaatataaacgacctcatacagctaaaaaacactctataagaatttcatggccgggcgcagtggctcacacctgtaatctcaacattttgggaggccaagacaggcgaatcatgaggtcaggggttcaagaccagcctggtcaacatggtgaaaccccgtctctacgaaaaatacaaaaaatcagatgggtgtagtggcaggcacctgcaatcccagcaactcaggaggctgaggcaggagaatcgcttgaacccaggaagcagaggttgcagtgagctgagatcgtgtcactactctgtctcaaaaaaaaaaaaaaaaaaaatttcataatgcaatcgcaagtattaacagtagaacagaccaagctgagaaaagaatctcagcgcttgaagattggctttctgaaataagaagacagacaagaataaagacaaaagaatgaaaaggaacaaacaaaacccccaagaaatatgaaattatataaagagactaaatatatgattcactggtatccctgaaagatatggggagaaaggcagcaacttggaaaacatatttcaggatatcattcatgagaacttccccaacctagctagagaagtcaacattcaaattcaggaaataaagagaactcccacaaaatatttcacaaaaagataatctccaaaaaacagaatcatcagattcttcaaggcagaaatgaaagaaaaaaatgttaaaggtggctagagagaaaggacatgtcacctataaaggaaagcccatcagactaacaatggacctctcagtagaaactatacaagtcagaagagattggaggtctatattcaacattcctttttttttttttgagacggagtctcactcttgtcacccaggctggagtgcagtggcgcgatctaggctcactgcaagctccgcctcccgggtttacttacgccattctcctgcctcaggctcccgagtagctgggactacaggcgcctgctaccatgcttggctaattttttgtatatttagtagagacagggtttcacggtgttagccaggatggtctcgatctcctgacctcatgatctgcccgcctcggcctcccaaagtgctgggattacaggtgtgagccacagcacccagccacaacattcttaaagataagaaattccaacccagaatttcatattgggccaaactaagctacataagcaaaggaaaaataagatccttttcaggcaagcaaatgctgagggaattcgttagtaccagacctaccttacgagagctcctgaaagcagcactaaatatggaaaggaaagaacattatcagacactaaaaaaaacacacttaagtacataaccagtgacactacaaagcaaccatgccaacaagtcagcataataaccagctaacaacatgatgacacaattagatccacacatatcaatactaaccttgaatgtaaacgggctaaatgccccagttaaaaggcactgagtgacaagctcaataaagaagcaacaaccctggggctgggtgcagtggctcacacctataatcctaacactttgggaggtcgaggcaggtggatcacttgagctcaggaatttgagaccagcctggccaacaggatgaaaccccatctctaaaaaaaaaaaaaaaaaatacaaaaatcagccaggcatggtggcacacgcctgtggtcccagctactcgggaggctgaggtgggatgatggcttgagcccaggtgatcaaggctgcagtgaactgtgattgcgccactgcattccaaaaacaaaaccaaacaaaacaaaacagaagtgcaaggtacagaagaggtcaatgtacaaaaaaaatattaattaaaaacaacacatagcttcccaatgtcatctcccctattcaacattaaaagccctcaacagatgcacagagaaaaaaaaagattgaagataaagaaacaaagctacaactatttgtagatcatccactgtctacatagataaccccaaagaatctagatataagtcagtaatagcacaaaaacaggccagatgtggtggctcacacctgtaatcctagcactttgggaggctgagactagaggatcacctgaggccaagagtttaagaccagcctgggcaacatagcaaaaccccgtttctttaaataaaaaaaaaaaaaaagtataaagacaaaatataagttaatttcatttctatatacaatcagaaaatataactttttaaatatcatgtataaataataaaaatattctaggaaaaactgacattttatgtagaagttctttatataaggagaaaattataaaacttaactggaatgattttttaaaacataaaataaatagaaagtcatattatgttcttaaataggaagcctcaatatcataacaatgtcaatcaattcttcccaacttgatccaaagactcaatgcaataccattcaaaatcccagtatcattttttgcggaaatcaataaactgactgtaaaaccaatatggaaaggcattattataagtcttttggggacctgccatactttatactaagaattattataaagcaaccacaatcaggacaaataatcaagtggattactggcactagaggagagagccgaactgagagtctagaaactgagcctgtgcatatactgacacttaatattcacccaagcaagcactgagatcacaggagaaaaaatgcactactcaataaataggctggaacaatcagttatctgttatcatatggcaaaaaaataaaagtggatccttacaaaaaaagtctttccatgtggattagagacttcaatgtaaaagtgaaaagcaaacaacttttagaaaatagagaattatcttaatgataggacacaaaaaaattttaaaacataaatcatagaagactgataaattcagctgcagtaagatcaagaatttcaatcaccgaagttttttttaatccaatcataaattggaaaagatatttgcaacacaaatctagaattagatctaggctaggcactgtggctcaaatctacaatctcaacactttgggaggctgaggtgggtagatcactggagctcacgaattcaagaccagcctggggaacatggcaaaaccccatctccacaaaaaatacaaaaattagccaggcacagtggcgcgtacctgtagtcccagctactcaagaggctgaggtgggaggatagcttgagcctagcaaaggttgcaatgagccaagattgcaccattgcactttagcctgggtgacagagccagaccctgtctcaaaaaacaagagaattagatctaaaaccataaaaaattgctatgaatcaatcaggaaaaattaaacaatccaaacagaaaaatgggcaaaaagtatatacagacacttcacagaataagaaacacaaatacatttcacagaataaataacacaaatgctctatgaatatccgaaaagaaactaaacctcattggtagtcaaggaaatacagattcaaattacaatgaaacaacatttcttacccaccagatacataatttttttttctttttttttagacgaagtgtcgctcttgttgcccaggctggagtgcaatggcaagatgtcagctcactgcaacctccgcctcccaggttcaagcaattcccctgccttagcctcccgagtagctagcactacaggtgcatgccacaacgtccagctaatttttttgtattttttagtagagaccgggttttaccacgttggccaggctggccttgaacaggtgtaagccactgcacccggccccataaaattttttaaagaaacaattctaagctttggcaaggacacagagcaataggaatacttctatattgcagttgggagtgtcaactgattcaatcactttaaaaaataatttggtggccaggcgcagtggctcacgcctgtaatcctagcacttcaggagacggaggtggacagatcacttgaggtcaggagttcgagaccagcctggctaacatggcgaaaccccgtctctaataaaaatacaaaaattagctgggcatggtgctcgctcctgtaatcccagctactcaggaggctgaggcaggagaatcgcttgaacccaggaggcagaggttgcagtgagtccagatcgtgccattacactccagcctgggggagaagagagaaactccatctcaaaaaaaaaattaattaaaaatttttaaaaattagaaaaatttggcattacttagtaaagctaaacaaacccataccccataaaatgaaaaattctgctcccagacatatacttcaaattcctgcatgtgcacaaaagacatgaataacaatgttcgtaagcagcattcttagtaatagcaaaaaactagaaacaatccaaatgtgcatcaatagcccagatatatatatatatacaatatatacaaataatgaactaatgtatagcagtaaaactgaatgaactgcatacaataccatagattaacgctcaaaagaaaaatgatgcttacaaaagaaatcagaatacttacagtattattccattacatgaaaatcaaaataagtaaacaaagcaatacattgttcatggagacataaagaaaagaaaggaaattttaaaatacaattcaagatagtggtagggggaatggtaagaaaagaactgtgatttgggccatagaggtgtttccacagcattgggaatgttgttttttactctgtgaattgataagagttcaccatgtttttttttttttaagtataaactgtacaaacatgattcacataatcttacaagtttcacagtatgttttaagtcaaataaaaattcaaggccaggcacggtggctcacgcatataatcccagcactttgggaggccaaggcggacagatcatgaggccaggagatcgagaccatcctggctaacacagtgaaacaccgcctgtactaaaaatacaaaaaaaaattagcccgcatggtggcaggcacctgtagtcccagctactcaggaggctaaggcaggagaatggcataaacctgggaggcggagcttgcagtgagccgagttcgcaccactgcactccagcctgggcgacaagagtgagaccctgtctcaaaaaaaaaaaaaaaaaaaaaaaattcaagaatacaaatatatgcttcctgaagcattgtttataataaaacaaaaacacaagcaaaaaaaaaaaaaaccctgaaaacaaattaagtgttcctctataccagaaatggataaactgacatactgataatagaatattatacgtgcagttaaaatgagttaacttaatactcatgtataaatagggagcaagtcttagaataggtttaaaaagcaagctgcaaggccaggagtggtggttcacacttataatcccagcactttgggaggccaaggtaagaggattccttggggccaggagtttgagatcagcctaggcaacaaggcaaggccctggctctgcaaaaaaaaattaaaaataaaaaataaaatttaaaaaagcaaattgcagaatatttacaagaacattttttatgtaaaaatgttaaactgtaatttttttatgaacacaaacatatgtaataaaaggataaaaatggacagagtacaaattaacttcagaatagtagttaacagaaaggatagaatgggatcagagaggggtttaaagacagcttcaactatttctgggatcctttgcaaattagaagtatttataatttaaaaataaaaatatccccccaaaagaaaaatataaaaatattctctctccttctccccctaacacataaacatataaagagacaaaaataatagaaaagagaaaaaatgctttctagaacaaaatggaataggaggctacttgccactatcgcccaagctggtacattcaaccttgcttaaaggaatgttattcttggatttcccagactttagaattgtgagaagtaagtttctgttgtttataaactaccaaatctatggtattttgttatagcagcctaaactgactaagatatttaccaaaacaagctgcctctaggtcatcattttagctaacatttcaactatcttcacttgcaaaaattaattattttcctaacattattctttaaaatgccatctggccagtgcggtggctcatgcctgtaatcccaacactaggaaggctgaggtggaaagaccacttgagactagaagttagagactaggctgggtaacagagacagaccctgtctctacaaaataaaaagccatcaaccaaatttctgaataatcccttttcctagttgtataaagaaataatgcagctaatgctaaaaatgaaaatggaaaataaggattctgaaagattgagaatgaagattatacacatttaaccatatatataaatatggttgttaactctcccataaagtcaaataggcacaattaaattatttgatgtttacccctgggatttgaatttttaagaacatattaacaaaatatcctagcacaattgacaaactatacatgttataaactaaaaattgtagaagaaaagtcagcacaatcagtgaagattcccatgtaggcttcatctccttcatgggattgagaaaacagtttttgaatggcaaagattctatgcgctagttttaacatggcagttcaagcacctgccactgtgctaagtttataacttaattcaagccagaagcttcagctatttagtcacgtactaatggccaggttacttaccaggctgaatgaaggagaatttcattcattaaaaaaaagaaagatgcagatcaaaataaacttggactcatcatgaagagggtagagccaacagaaatttagctaccaggcttaagcctagaagtcctcttgactttcacactgagatgacccactggtctatttttaaccatttcttctccataccaaaatgattccattatattcaaccaggaaaataaaaaattcaccttcaattgagattacaaaccatatacttcatataattaatcttcaatttatctgaaaaccaatatgcaaatgaaattacagaggtagaaatgctcttttggcccataagtagacacaactaaagaagacaaagcagatgcaattagatgtttaagccaacagcacccattcaagcaaaataaaacaatgtgatacctatttcaatgcaagactgcatctaaagcagttgagggcatttgctttgatgtgggggtgggaagaagggtctccaaagataaagcaggaaataacttcaaaacaacttttgggatcaaagcccatttttaagtcctttatgaataactgaaaacaattttcccctttattcaaaacaataaacaagaaacttgtcatttacaactcctccctctcctcaactcttattcacttaaatctcctcctttcctccttacccctatcatccatctgaagccttccaatttcatctcctaaacaaatctcatgacaaggttgcccctaatttcctataatgagtaccctggctcagatcatccctattataacaatttcttaattattattcttgcctttactgtcccttcaaatccatcttctatatcactaccaggaaacactcttcagaacatgtgagcatgccactcacttgcttaatactcttcaacagctccctgaacccacagaataaagttaaaattctttcattcattcaacacttaattgcctattataaccaagcaagaactgtgctaagcctggggatattaatgggacaccattgaaacacctgcatccttcagaaccagaataatttttgtaggatgaaaaagtcaaagtaaattcttcccagaaaaaaattcagcatctgtgaaaatcctcaataaaattgtggcaaaccgaatccagcagtacaccaaaaagcttatcccccatgatcaagtcagcttcatcactgggatgcaaggctggctcaacatatgtaaatcaataaatgtaatccatcacataaacagaaccaatgacaaaaaccacacgattatctcaatagatgaagaaaaggcctttgataaaattcaacaccccttcatgataaaaactctcaataaactaggtactgatggagagcatctcaaaataataagagctatttataacaaacccacagctgggtgcctatagtcccagctactcgggaggctgagacaggagaatggcgtgaacacgggaggcggagcttgcagtgagccaagattgtgcctctgcactccagcctgggtgacagagcgaaactccatctcaaaaaaaaaaaaaaaaaaaaaaagaatagtgatttgcacatagaagggactcaataaatatttgttgaatgaatgaatatatgaaataaaatcttccatgatcttgaagagaagtatttgtcacgtaactggtcttatatggcagaatgtcccttgtttaccattcctattcccttctaaccaaatcatggtatgtatttttaggtattctttggcatttctttttgaacacctggaaaaatgctaaaatatggtttaaaactcaatgtttgtgaattaggctgttaggtgcagcctgacttaagggataagggctgaattatagagaaattgaattacgctttcaaatatggtatgcatatgaaactaatacatggttgttgtgtttttttttaactaggttaaatgtggtaaatgcactcttttaatttagtgttttattaaattttggtatatgttgtgttataagcataaaagtttctgaaagaatttttgggcctagaagttgtgggaattgttgctttctttaacttttgatttgaaacaatcacaaattacactggattcttaaaaatgttgtaggatctttagggagctcaactgcagtccagatgctgattttttttttttttaaatactttaagttctgggatacatgtgcagaatgtgcaggtttgttacataggtatactcatactgaatgggcaaaaactggaagcattccctttgaaaaccggcacaagacaaggatgccttctctcaccactcctatacaacatagtattggaagttctggccagggcaatcaggcaagagaaaaaaataaagggtatttgaataggaaaagatgaagtcaaactgtctctgtctgcagatgacatgactgtatatttagaaaaccctatcgtctcagcccaaaatctcctttagctgagaagcaacttcagcaaagtttcaggatacaaaatcaatgtgcaaaaatcacaagcattcctatacaccaataacagacaaacagccaaatcatgagtgaattcccattcacaattgctacaaagagaataaaatacttaggaatacaccttacaagggatgtgaaggacctcttcaaggagaactacaaatcactgctcaaggaaataaaagaggatacaaacaaatgaaaaaacattccatgctcatgaataggaagaatcgatatcatgaaaatggctgtactacacaaagtaatttatagattcaatactatccccatcaagctaccattgactttcttgcagaattagaaaaaactactttaaatttcatagggaaccaaaaaagagcccgtagagccaagacaatcctaagcaacaagaacaaagctggaggcatcacactacctgacttcaaaccatactacaaggctacagtaaacaaaatagcatggtactgaaaccaaaacagatacatagaccaatggaacagaacagatacctcagaaataacaccacacatctataaccatctgatctttgacaaacctgacaaaaacaagcaatggggaaaggattccctatttaataaatgatgttggcaaaactggctagccatatgcagaaaactgaaactgggcccttttgttataccttatacaaaaattaactcaagattgattaaagacttaaacataagacctaaaaccataaaaaccctagaagaaaacctaggcaataccattcaggacacaggcatggggaaagacttcatgactaaaacaccaaaagcaatgacaacaaaagccaaaattgacaaatgggatctaattaaattaaagagcttctgcacagcaaaagaaactatcatgagtgaataggcaacctacagaatgggagaaaatttttgcaatctctccatctgaccaagggctaatatccagaatctacaaagaacttaaatttacaagaaaaaaaaaaaacccatcaaaaagtggacgaaggatataaacagacacttctcaaaagaagatatttatgcagccaaaaaacacaggaaaaaaagctcatcatcactggtcattagagaaatgcaaatcaaaaccacaatgagataccatctcacaccagtcagaatggcgatcattaaaaagtcaggaaacaacagatgctggagaggaggtggagaaacaggaactcttaaggccaggcgcggtggctcacacctgtaatcccagcactttgggaggccgaggcgggcagattacaaggtcaagagatcaagaccatcctgcccaacatggtgaaacgctgtctctactaaagatacaaaaaattagctgggtgtggtggcacacacctgtaatcccagctagtggagaggctgaggcaggagaattacttgaacctggcaggcggaggttgcagtgagccaagatcatgccaccacactccacactccagcctggcaacacagtgagactccatctcaagaaaaaaaaaaaagagagagagacatagaaatgcctttacactgttggtgggagtgtaaattagttcaaccattgtggaagacagtgtggcgattcctcaaggatctacaactagaaataccatttgactcagccatccaattactgggtatatacccaaaggattataaatcattctactataaatacacatgtacacctatgtttattgcggcactgttcacaatagcaaagacttgcaaccaacccaaatgcccatcaattatagactggataaagaaaatgtggtatatacacaccatggaataccatgcaactataaaaaaggatgagttcatgtcctttgcagggacatggatgaagctggaaaccatcattctcagcaaactaacacaggaacagaaaatcaaacactgcatgttctcattcataagtacgagttgagcaatgaaaacacatggacacacagaggggaacatcacacactgggcctgttgcggggtgggggtttaggggagggatagcattaggagaaatacctaaggtagacgacaggttgatgggtgcagcaaaccaccatggcacgagtatagctatgtaacaaacctgcacattctgcacgtgtatcccagaacttaaagtattaaaaaaaaaaaaaatcagcatctggactgcagttgagctccctaaagatcctacaacatttttaagaatccagtgtaatttgtgattgtttcaaatcaaaagttaaagaaagcaacaattcccacaatttctaggcacaaaaattctttcagaaacttttatgcttataacacaacatataccaaaatttaataaaacactaaattaaaagagtgcatttaccacatttaacctagtttaaaaaacaaccatgtattactttcatatgcgtaccatatttgaaagcataattcaatttctctataattcagcccttatcccttaagtcaggctgcacctaacagcctaattcacaaacattgagttttaaaccatattttagcatttttccaggtgttcaaaaagaaatgccaaagaatacctaaaaatacatatcatgatttggttagaagggaataggaatggtaaacaagggacattctgccatataagaccagtcacatgacaaatacttctcttcaagagcatggaagattttatttcatatattcattcattcaacaaatatttattgagtcccttctatgtgcaaatcactattcctttttttttttttttttttttttttttttttgagatggagttttgctctgtcacccaggctggagtgcagaggcgcagtcttggctcactgcaagctccgcctcccgtgttcacgtcattctcctgtctcagcctcccgagtagctaggactacaggagcccgccaccacgcccagctaattttttttgtatttttagtagagacagggtttcacctgttagccaggatggtcttgatctcctgacctcatgatccacctgcctcagcctcccaaagtgctgggattacaggcatgagccaccgcgcctggccgcaaatcactattctaaacagaaagaatgtaacagtgaaaaaaggaaaaatgcttgtctttatcaaacatatacttaataaagaatataattaataaaaacggttttggaggtcaggcacggtagctcacacctataatcccagcactctgggaggctgaggcaggaggatcaactgaggtcaggagttcaagaccagcctggccaatatggtgaaaccccatccctactaaaaatacaaaaatttagccaggcgtggcggcacgcctgtagtaccagctactccaaaggctgaggcaggagaattgcttgaactcaggaggcagaggttgcagtgagccaaaatagcaccactgcactccagcctgggcaatagtgagactccatctcaaaaaataataataaaaataaaatgagccaggcacagtggctcatgcctgtaaccctagcactttgggaggccgaggaaggtgaatcacgaggtcaggagatcgagaccatcctggctaacacagcgaaaccctgtctctactaaaaaaaaaaaaaatacaaaaaaattagctgggcatgggggcgggcacctgtagtcccagctactcgggaggctgaggcaggagaatggtgtgaaaccaagatgcggagcttgcagtgagcggagatggcgccactgcactccagcctgggcgacagggcaagactccgtctcgaaaaaaataaataaataaaataaaataaaatgattttggagttctaaaaataaaattttctaactatattgagtgataaaagtaactatttcaaagatgtggtcatgatgttttgatagggccttgaaagggaagacttaaaattttaagttcttcaatttcaagtctctcaagatttcctctatccttaagcaggtaggttagacaggtcctagttagattacgcagatactcttatctgaacatttatattatttctctgaaacatatacaccactccacacaccaccacgcacaatttttatgcagggttagcataaaaattgctaaccctggcaatttttcaaagggtaagttctttaatttaattcatcctatctctattaatattcaggcattttccctaaaacgttcaatgaaattaaatagttttacctaaatttggccaactatgagaaatgttaaagtataccgagtcaatctgtatcttgaaacaaatgacagcctaaaaagttttcaaccatacaacccataacaatggatttctatctggtagatttcaacaaaattagtgagatatctgcatgagtaaagtctacagttcaaaagtcactattttacagttactccaaggtttttagatagatgatatagctgtcataagtctacaatttatttaaaacatttcttggtcagataattattacctattttgatcttttttaatgtggaagtaaaatgctccaaaatattaatgacagtggataataccataccttaaaaaaagaaaacaaaacaaaaactctacatacatggaggggacaagaatttgtcctcactggcaccaacatattctgaatatgaatatgcattccctgcctacagtgcttctgccagcatcaccatcaaggacatgggcgacaccttgttcatcatcaaggtatactactcaacaagactttgatcaaggtactcatttcacagaaaaagggttatgcaggaatgggttatggaacttggaaatcactggtcttaccacatactccatcacccagaagcagctggtctaacagaatggactactgaagactcactcagttacagtggatcaatgagcaatatacaatattgttttccccatagctagaatacaaaggcctgagaatcaaggggcacaagtagaagtagttcctctattattcctaaaaattccattagcagaagttttgtttcaagtacctacgactttgatatctgctggattggaggccttggttcccaagcagggaatgattccacacagttccactgaactggaagtaacaactacctcatgaccactgcctccataccactaaatcagaatttctcaatcttagcactactgacagtttggactggatcagtctctactcttgggggctgtcctgtgcatttcaggatgcctgacagcatccctgaactctacccactagatgccagtagcattcccccacccccacgaaagtcataacaattaaaaatgtctccaggcattgccaaatgtcccctgggaggtaaaactgtcctaagaaccaccgcactacatcaacagtcaaagaagggggttattctattagctgatgtaattcagtcctattactaggtgatactgtactgttgctacataatggggacaaagaggactatgtctggaaccctgaggattccctgaaatgtttttctaaacctatatatataagagcaaaacttaatggaaaaccacagccacaggcatgcacacacatgaagcaggaccaccaaagatttgtattcttttttttctttttttgagacagagtcttgctctgtcgcccaggctggagtgcagtggtgtgatcttggctcactgcaacttccacctcccgggttcaagtgattcttgtgcctcagcctcccaagtagctgggattacaggcgcctgccaccacgcccagctaatatttgtattcttagtagagacagggttttactatgttggccaggctggtctcaaactcctgaccttgtgacctgcccacctcagcttccagagtgctgggattacaggcgtgagccaccatgtccggcccatggtctttttttcttttttttttttattcttttttgtgagacagtctcactctgtcacccaggctggagtgcagtggtgtgatctcagctcactgccacgtctgcctcctgggttgaagcgattctcctgcctcagcctcctgagtagctgggactacaggtacccgccaccacgcccagctaattttttatatttttagtagaaacggggtttcactgtgctagccaggatggtctcgatctcctgacctcgtgatccacccgcctcagcctcccaaagccatattctttattaatgaagatttaggttaccccaccagctgagatcttgaatgagaacaaaggaaacatggaatgtacagcagaagtagttataaatatgaactacaatctctcaaccagttacagaagcaaggtctacagcagctatacatattttcttccttattacagggaaacgggcaagtttataaatcaattccttccctcttcttctctatgttattcaaactttattaaaggttaactttacaatttagtccctaggtaacaggatattcagaaggaactatgaatttgaggcataattaacacagcctagaaatagatagtgtgaatgtcccccagaaatcaatacaattatgagactctgctcctcattttgggaagagggtaaggacatcctcatttttacaaagaacattttcatctttttaggcaagagcttagagtgtttttcttcttgtaaagaagatgaaatatctgtataaaggctgagtggtcaaacactttgggaggccgaggcagatggatcacctaaggtcaggagtttgagaccagcctggccaacatggtgaaaccctgtctctacaaaaattagccaggcatcgtggtgagtgtttacagtcccagctactgaggaagctgaggtggaaggatcacttgagcccaggaggtcaaggctgcagtaagccatgattgcaccactgcactctagcctgtgcaacagagcaagaccctgtctcaaaacaatttacggcctggccaagttcagtgactcatgcactttgggaagccgaggcgagaggacagcttgaggccaggtgctcgagaccagcctgggaaacacagcaagatcctgtctctataaaataagaaaatgagccgagcgtggtggcatgtacctgtagtcctagcttcttgggagaatcacttcagctcaggagttcaaggctgaagtgagctatgaagcctaggggacagagcaagaccctgtctttaaaaagaaaaagaaaaaaatctatggcctaaataaaaacaaacaagatcaataaacatccatgtatttctatatattagcaacaatcaaaaattgaaactaaaaaacaatacctgttaagatggcaatcttcccaaagttgatccatggactcagcagaatctctatcaaaactggctttttaatagaaattgacaagccaatccgaaaccatacaaggataacaaaagacctagactagtcaaaacaattctgagaaacaagaaagctggaggacttatactacctgacttgatattttattatagtttatatagttaagctcttttatagttaagactatgtggtattggcataacaggcacatagcacaaatacaaaaattaactaaaaatgagccacaaacgttagtataaatcctaaatttctacagaaaacagaggagaaaaatttgtgaccttatattagaaaaagataccttagatataccaataacatgatctattttttaattgataaggtggacttcagaaaaattaagaacatctgcttttgaaagactttgagaacaaaaaaacaaggaaaaactagaagacttgcaaatcatttatctgatgaacttgtattcagcatatattatgaattctgaaaactccagtaaaacccaattttttaaaaatgggcaaaagagataaacagctcaccaaagaaaatattcagatggtaaataagcacatgaaaagatgctcaatatcatgagtcattagggaaatgcaaatcaaaaccacaatgagacaccacttcatacccactaggatggctgtaatttaaaagaaaaggttaaataagtgttggcaaagatgtggaacaactgaaactctcatatactgctgtaagatgatacaatcactttaggaacagcttggtggcctcttaaaatattacagaatataatatcctgtaacattattatatacatccaccatatgatccacccatttctactcctttgtatttactcaagagaaatgacagtcatgtatatgaatcttcaagacaactttatttgtaatggtgaaaatttgagttgtcttcagttatccatcaacaagtgaatggataaacaacttatgatatatccactgagacaaaaacagctcaagggttccctagggatgggatggaggtaggaatggattataaggaggctggagaaaacttttgccggtaatatatgttcttcatcttgattgtggtgatggtatcaaaggcttatatgtatatcaaaactcatcaaattatacattttaaatatgtgcagtttattgattggatggcaattttaccttaacctaaaagctgtggaaattctattattctagaatagcaaaaagcaataaagttcctaaaaacagcaataaaaacaagaggcaataggtcttgtctatttactcacacacttacccgagtgtgtgctcttcattatttcctacagttttgtacttccatttgagatattttcattctgcctaaaaaacttccttcagtaatcttacagtgcaggtctgctggtcataaattgtcagcttttgattgtctaaaaatgtctttatttcgccttcttgtctgaaggatatttctgctgaaggtagaattctagcttggcaggtttttttgccaacatttaaaaaatgtctgttatttcccagtttccacagttgtattaaaaagtcagccatcagttgtattatatcgttcctttgaacacagtgccttttttcccctcttctggctgcttttaagcgtttctctttgtttctggttttcaacagttccattaagatatgctaagtgtagttttctttgtgttcatcctgcttggggtttgctaaactacttgaatttataggttgatgcctttcatcagtttgggaaaatattttatcattacctcttcaagtatttgcttccatgctaatctctctacttttgggtctccaattacacattagactttttactaatgttccacatgtctcagaggctctgttctactctttccattcttttttttttttctgtgcttttatctagatattttctattgatctgtccacaagctctctagtcttgccttctgctgtgtatagtctgctactgaaccggtacaatgaataattaatttcagattaatgtcaattaattattaatgggggggtttgtgatggtggtgttaaggaagattttgttctgtcttgttttgttttttaatgtggcatgcactatactaagccctgggagtacaacaacgaacaaaacagacataggccctgctctcgtggaacttaaatagtatacattaaatttacctgggttttttttgtttttgtttttgttttttaagaacagtaaagaatgagggggaggtggagtgtcctagagtcctgcgccaaagtttctaattaaactacaaataaagaccttaagcaaccaacgttgtgtttttgattcctagaatgttcatttggtttctttctgtggattccaattctctatgaaaattttcatccattttctccgtattttcctttattttcttaagtatattatagttattttaaaataagtctttgtctgatgaacttcaattttctgagtctgcttctataagttttatttttctcttgaatttttccaccctttcacatctctagaatagttaatagtatgatagtattataaacgaaagaaccatagaaaccccagaatatatctcctcagtaagagctgtctatttcctctattaggcaaaagggataagataggctgatcacctcagtccaatcaggaattgaactgggccagggatatgttgcagttttagtaaaatgcacttcctctctagtttccttttccttcagtgtgtgtccagaatcagcaaatgtcagcaatcctctgctcacctataaagatctcttctatttctggaattctaattcatctagtcctcattacatccatagctctccaatattttttttagtattgatttttaaagttcatccaattgtggttttctaacttgttgcagtgatatatatgactgtactgtgacctattaaataccacccagaaattaaattctccctgtatatcacacagcagtggtttacaaacccagctttatgtcaaaaatgacctgggacctctagaaatcacacgatgtttagtagagccaggaaatctgtacttttaacaagtcttaagtgatctggcagagctgacatttctaaagaaactagcgtgcctgcaccagttgctcctcctctcccctcccccacagctcagtatttataaggacatttaagaaaaaatacacactacacacaatggataaattaacagaagagttaaaacaaaagttcagaataactagaaatgttaaagacaaaaatatgtaaaggcttttaaaatacattaggatcaaaaagatgaggaaagaagaacaagaatcactagagtccatgattccagcaccaataggtcattaaaagcagaactattcaactcaatttttatttctaattgttctagttgaaaataaaatgaggccaaggcatggtggctcacgcctgtaatcctagcactttgggaggccgaggcaagaggatcacctgaggttacgagctcgagaccagcctggacaacacagtgaaacaccttctctattaaaaatacaaaaattagccgggcatcgtgacaggtgcctgtaatcccagctactcgaaagactgagacacaagaatcgtttgaacctgggaggcggaggttgcagtgagccgagatcgcgccattgcactccagcctgggtgacagtgactcaaaaaagaaaaaaaaaagaaaaagaaaaaaaagaaaatgatcttcaaatctgaaaaaaagcattgctgagagtcatcagaacttagatacataaagcatgaagagcccacctccctgttttacctgagctcaagtgtacatgaatccaagatacagatgaaaatttagaaatatggtaagagaaatgtggtcagtgaacttgcagaagtcatgaaaagtaacaggagccagattgggaatgagaaaatgttgttgcaattgtcaaaatccaagagtgggtaaaggtgaaagggtgattttaatactatggacttaatttaatgtcagcatccagataattctaagactgattaggcatgagttgttagcacttatacagggaagcagcatttactaataaaatcttacctttgtaaagcacttttgcttttgagtttagagtagacaaaatactttcatgcatattacctcctatctttgattctcatagatccctgtgaaaaagtgcaggtaacattatgtcccctccaccacgtgttactctcttcaacatattaggaattcagggctcatacagcttggcttgcccccctgttaactcattccagtagaaagttaagacttaaagtcaagtcttctgattcctaattgagttgtttttatattacacagctcttaaagtcagtataagaataaatcacgctgaaatgatatataggattgctttaaaataataaagaggtagtgagcaggaaatgggtaggaatacggatgaaataagactagggagaaattgagtaatggatacaaaaggattaatttataacatctctctaggccatgtgcagtggctcacgcctgtaatcccagcactttgggagactgaggcgggtggatcacttgaggtcaggagttcgagaccaacctgcacaatatgacaaaaccctgtctctacaaaaaatacaaaaaatttagccaggcgtggtggtgtgcacctgtgatctcagctactcgggaggctgagagagaggatggcttgagcctgggaggcagaggttgcagtgagccaagatcgtgccattacactccagcctgggtaatagagtgagactctgtctcagaaaaaaaaaaaaaaaaaaaaaaaaaaaactctctacttttatgttggaaactttttattttaaaacatgtgaattaacatttttgataggtatactgtactggtaatcaaatgcataccaaaaatatactgtacctgaagctcagcatttttttttttttaacagagtttcactctgtcacccatgctggagtgtagtagcacaaacaccactcactgcaggctcaacctcctgggctcaagccatcctcccacctcagcctcccaagtacctgggactacaggcatgcaccaccacgcctagctactttttttatttttttgtgcatactagctgtgttgtccaggttgatctcaaactcctgggctcaagcaatcctccctcccccacctcccaaagtgctgggattacaggtgtgagccaccatgtccagcaagctcagcatttttaaatccatttaagtttcatataatgccctcatacaacattgggaggaaagataaaaaatggtatgcctgagtactgaccaccattgcaccaaaaggaaaacaattaggatagtgaggtgtcttgaaaacatgttctttgagaaatggttgaagaatgaatgaaattttttggtgggggtgggaatctagggtgtacttaagatgtcttcaaatgtttttattttatttttatgtatttattttatttatttatttattttttcagagacagaatctcggttgggcacggtggctcatgcctgtaatcccagcactctgggaggccgaagtgggaagatcgcttgagtccaggaattcaagaccagcctgggcaagatggcgaaacctcgtctctacaaaaaatttaaaaactagcccggcatggtggcatgcacctgtgggtagtttgtgtcatgagaggaacaagagcttcaggtcttcgttgatctttgtcgccaatatatgactaaaacaaaacctactatcactgtcattccctactccagattcacttatcagaggccaaaaactgaaacataacagggaaagaaatactgtgctttttttccctccgcactcattacccaaaaggaagaagactcacatggagcataaaggcacattttcccagacccaaggtgggacaggaatagaaggcaccgataaagacaggaggatagaaaaaaatactccaaaagacaagatgaaggatttgagggttgttatagggaaaaagaaaaactgaaaaagtagatgtaacaattaaaaaaaccacatccaggaatcttcattcaaatactaccaaagttgaaaagtttgcctcaaatgtaatcaaactctaagtaaaatgttcttagaatataaaaaccaactttacaaaaatagactgtgcaatgccaacatgaaagaatcataatctcatatttatagctgtatgtgtatttctgttggtattctcacaaattctattctcccacttaagaatgtacaataagtgtattatataactaaataaaagggaaacaatgttacaacttctaacagctgaagaagttttgataaagtgaccaggagaataatacataatgaaatcaaggatatataatgcttaaaatttacatctatttctaacatctaaccaacttgaaaagattcagatactctaacatgaacttaaaaggaaaaacataatataccatcttcgagtgaagaagcaatcatacatccctcattttgcatatttgtactacctgttagtaaaatttagacttttaaaactatttattggaaagatagtgatctaagggtcaagacatccatactctagtttaactcagttaattatataatcatatgattgtgaacatgttttgcctctgtaacttttttctcatgtagagtagaaataataaccaccaaattataaagaatggatagaaaaaaaatactgcacagatgctaatacatttttatgactgtttacagcttcctttcatataagattcatacctaagtcattaaacaagcccatgatgtgagaagggtaagtatcatgcccattttacacatgaaaatatagaaaactgatgttcagagaggttaagagacttccccaagaccacactgcaagttgcacaatcaaaagctttttcttttactacatagtaggctgccctcacaagtctaaagtggtaaaagttgttttctcatgcccaaactactatgagaactacccaagagaaaccgtgtcaacagaaaagtgtcaccacttgagatcattaagagacataacttcccaaaaggtcattatctgagtataaaattttgattaaaaataagttaaataatccttaaaagtttctagtagtcctgctatttactaaattaatttcatgcctcttgtgctagatataccactctgctggtgggggtgggacacgggagttaggtggagcaggaaagaatttcatcagaaaaagttaagttctcagccgggcacggtggctcatgcctgtaatcccagcactttgggaggccaaggcaggaggatcacctgaggttgggagttcaagactagcctgaccaacatggtgaaaccctgtctctactaaaaaaacaaaatcagctgggcatggtggcgcatgcctgtcatcccagctacttgggaggctgaggcaggaaaatcgcttgagcctgggaggcagaggttgcagtgagcccagatcacaacattgcactccagcctgggcaacaagagcaaaactccatctcaaaaaaaaaaagttatctgaagttcaatggaataagacattcaaagctataaaatatgaataagggcaggcgacagcttgtggactgcagtggcaaccctaagccaaaccgtgagtgccagactatggtttaaagaaaatatgcaatctggaagtttgcacctcaagttactgctactgcaaagtaattagtaccatttatggtaagaatatgtaaagttttagaacataatgccaattcttcattttagtaggatgaactccacactagcttgaggctttgtctcaacagaagctttttgatgatatagtcagtggctcaaaagccactcaggacccagcacagtagttcacgcctgtaattccagtgctttgggaagccaggtgggaagactgcttgaggccaagagtttgagaccagcctgggcaacataacaagacactgtctctacgaaaaaaattaaaataatagccaggtatggtggcgcacgcccatagtcctagatattcgggaggtgggagatcacttgagcccaggagttcgaggctatggtgagctatgatcacaccactgcactccagcctgaggaacaaagagagacctcacttctaaaataaatgaataataaacaatttttaaaaaccagttatatgcagagaatataactatatatcacaggcatataacatttgaagtggtcaaatggattgcctttaagagaatttagcgagggtactataaacagcagttatagtttatatcctatagcattaaacacctgagagtactctgtttactgaaggctctaccacatagtatgatacagaaatttacaacttgctgagaccttaaacttaattcacagtcactacaacgtaaaaccacttttctgtccttcaagatcaaaacaaatggtctcatctctcccttcccgcccccaagaaaatggggtactttaaaagatgtcagatgaaacaagccaatgcttttataaatacaagtcaatcctttgcaaagaaacagattaagatgctcatattctgcttcggtattgatcccaagccttttaacagtttaagctgaccacaaatctccccttccacttctatagaatattctcctccttaaacttcctttagagccttccgatacctcctgtcccttgacttatatacacacacacctccaaaatatacgcagacctaaggaacacaagtggaaaacacatttttaattaatacgctgcttatccttaaaagtatgtcgttagaatgcaacaatatagagtctacatagaaccccagaataccaaatttgaaagctacaacaaaaatgccccatagcaatctgagtaatttaaagaacaaagatgtaaaaaataaggcattcttactactgtattatatgacttaaacttttgtttaaggacaaaatgtttggttgggtgcagtggccggtacccaaataaaaaacgaaaaacaaaaatactttctccatattaaaaaaaaaaattttttttgagacagggtctcacccaggccagagtgcagtggtgcaatcatgcctcactgcagccttaatttcctgggctcaagcaatcctgactcagcctcccaagtagcatatactaccacacttggctaatttgtctgttttttttcttttctttactttcaaccaatgcacactggctgattttttttttatttgttttttttactttttgtagagatggggtctcactctgttgcccaggctggtctcaaactctgaggcccaagtgatcctcccacctcagccccccaaaaagcttgaattataggcatgagccaccgcacccagccaaaacattttttaaaagcagacttaaggccaggtgcagtggcttgcatctgtaatcccagcactttgggaggctgaggcaggtgtttgaggccagcctggccaacatggcaaaaccccgtctatagtaaaaatacaaaaatagggccaggcacggtggttcaagcctgtgatcccagcactttgggaggctgaagcgggcggatcacctcaggtcaggagttcaagaccagcctagccaacatggtaaaaccctgcctctactaaaaatacaaaaaaattagctgggtgtggtggcacacgcctgtaatcccagctacttgggaggctgaggcaggagaatcacttgaacccgggaggcagaggttgcagtgagccaaaattgtaccactacactccagcctaggcgagaaagcgagaacttgtctcaaaataataataataataaagcagatttgagaaaagaatctaatttcctaatggttaaaaagtcaaataaaaagagtagggcaaaaaacaggaacatttaaaataaaatgtaacaatattagaccagcaccacagcttatgcctataatcccagcactttgggaggctgaggcaggtggattgtttgaggtcagtagtttgagaccagctaacatggcgaacccttgtctcttttaaaaatacaaaaattagccaggtgtggtagtacgtgcctgtaatgccagctacttgggaggctgaggcaggagaatcgcttgaacccagaaggtggagcttgcagtgagctgagatcgtgccactgcactccaacctgggcaatagagcgagactctatctcaaaaaaaaaaaaatgaagaagaagaaaaaagagaacttgtcaatggatactaaagtaaggtatatattggccaaggtacatacaaaggaatatccagagactagtcacgctctctttttttttttttggaagacagggtctcactctgtcaccgaagctggagtacagtggcacaatcatggctcactgtatgcttgaactcctgggttcaagtgatcttcctgcctcagcctcctgagtagctgcgactacaggcacatgccaccacacccaactaattttttttagagacagcatctcactatgttgcacagcctggtcttgaattcaaggcctcaagcagtcctcccacatgggcctcccaaagtgctgggattacaagcatcagctaccgcacctggcctactctcccttatttaatgaaaacacaataatcagtaataagctacactgcactctagcctgagtgacagagcaagactctgtcacacacacaaaaaataataataataataagctataaagaaaacatataaatcttatattagaaaaattttagacttttcaaagtgcttcacattcatattctatcacaccattgcaaaatatcctaacagtaagtgacaaatccaaaattacaaaagtagttgatcagatctgaaacctgattcaaaaaacatgtttgctctatgggaggaaatataaatatgtataaattccttctttatgctaattttcttactcattcctagttaaaatatcacttatcagacctaggctattgcaaacatggaagtaaaattcagtaaaacaaagccaaaagtaccactttttttatttagccagtctacccttcaaccaggaatcatatgaaaaacattccatcaatgttctgtgtgtttaagactgtgctgggcactggggtgactagaagagaattcaaatagcgttctttgcttttcagaaagtatgcactccatttgataaaaagacaagaaaaaaagaaaacaaagccaagctgtgttcaaacaatcctcctaaaggaagaaaacttactgtgtggttctgtaaaactccaggtaacaaggataccaagaagtgagatagcagagtttagtctgaaacaacctcatggggaaaaaaaaaaaatgaaatctgagctgaacattgaaggatggacaggaattagaaaagcacaaaggaggaattaaagcattcaggcagagactggcagaaataaaggccaagaagtgggaagaagcatgatacacacagaagagactgaggtgacctgcctggaacataggtgcatgcagaggcataatgggaaagagtttggtaaatcaagtggggtcagctcccaatagactgctgggtcacagagacatgctgttagaatattaaaatcatcgaatatttaaacttgaaagaatctaaaagattttctagccatttctttttcaacagatgaggaaatcaaggatctataggaaagctaatggctaggatagggacaaaggcactgaatagcagaacaaaactaagacccccgctaaggaactccaattcagtagaaaagtattgtgtcttgggaactggaagagattggtttccggggggagtggaacatcacagtggcattacaactaagcaatgaccactatgttttgccagaagtaatcactttcaagaaaacagcaatcaagcagaggcaggagctacttttcagagttataaaggaaatgggtggataaacagtagaggcggtgagtatctggcaacaacaacaacaaaaaagactggtccacagagagagagctgcaggaccaagtaaacgtctgatttccaagagaaaggaaatcttagcctgaaaagtgaaaagaaagcagccaacataaagactaaattagttcccagacagataaggtggaaagtgtaagggagtgcagagaactgaggaacagctggaagaaatctttctaaaggatgaattccgggccgggcacggtggctcatgcctgtaatcccagcactttgggaagtcaaggcaggtggatcacgacatcaagaaattcagacccatcctggctagcacggtgaaaccctgtctctactaaaaatacaaaattagctgggcgtggtggcatgcgcctgtagtcccagctacttgggaggctgaggcaggagaatcgcttgaacccaggaggcagacgttgcagtgagctgagatcgcgccactgcactccagcctgggcgacagagtgagactccatctcaaaataaataaataaataaaaatttaaaataacaataataataaattaaaaaattccgaagcaaagaataagcattattgtgctcgattcagcaccacatatactaaaattggaagaataagcattatttctcactcaccataaagaattcgtcaccataaaagagtactcattttcaactactataaggccttataaaaattacacaccaggcttgaagaatgaggctaggagatattttttaaatccaaaaagcttcagttttgcaaatctatttgtctaatcagtatgtggtttgtaatttcgaagatacttgccaatcattttatactgtgaatcactcaccgcatattcaacgtacattcagatgaacactcaatgtatgagaacaacaaatatgctactacaacctctaaaatcagagtttattccataacatattctttaaattgggttttttggcttttatgtactacttttgcttgatcagatatggaaaatataattgctttaaatgaacatatttacaacaaatcattttgggatggagttctttttaattcttttttttttttttttagttcaaatatccatagttttcccatacttcccttcagaaataaagctctacaggaaccagtggggcatacagaactaggggagatacacagaaggttctaatttgcttagaaactgggttaatgaaccacaattaaaagctacacatggccgggcgtggtggctcacgcctgtaatcccagcactttgggaggccaaggcaggtggatcacctgaagccaggagttggagaccagcctggccaacacggtgaaacccccgtctctactaaaaatacaaaaattaggcaggcgtggtggtgggcgcctgtaatcccagctacttgggaggctgaggcaggagaatggcttgaacccaggaggcagaggttgcagtatgctgagatctccccattgcactccagcctaggagacaagagcgaaactctgtctcaaaaaaaaaaaaaaaaaagctacacacctacaatttgtcagtttcaattagaaacttgctatttggcaccacgaaggcaggttaaggagagatgtaagatttaactgataacattcagctttctggctgtccacctgtgcaactgtcatttccctaaccaaggaggtgattacttctaaaattggtaatactcattcaacttagaccctaaatactaggtttagctgcaatattatcaggttaaggaattttatattacccacaagaatgtgagctcaaaatgtcaatatggcacacatccacttcttttaactgagtctactgcactaagttgctaagcgatacccatcagagtgcaatatgtctgtaatcagcagtggctagaaatgcatttctgctttaatcacaccgaatattagaaatccaaccaaaacagcaatcataaacagagttgccatctttagacatgcacatgctccctgggggcgttaagtggtccaacaggcaaactcttagctgtaataagaaggaaagcttaactccccctgggcccagtaaagcaaagtacagataatataatccaaaattcaaaagttttataaacagttgaaactattaagattctttttttttttttttttttctgagatggagtctcgctctgtcacccaggctggagtgcagtggcgcaatctcggctcaccgcaagctccacctcccaggttcaggccattctcctgcctcagcctcccaagtagctgggactacaggcacccaccaccacacccagctaatttttgtatttttagtagagatggggtttcactgtgttagccaggatggtctcgatctcctgacctcatgatcggcccgcctcggcctcccaaagtgctgggatcacaggcgtgagccgccgcgcccggccaactcttaagattcttatacaactatctctcagtacatgcagggctttttctcccctcaataaaaatgtaagcgatggctcacgcctgtaatctcagcactctactaaaaataacaaatgttatccaggagtggtggcaggcgcctgtaatcccagccacttgggaggctgaggcaggagaatcacttgaacccaggaggcagaggttgcagtaagccaaggtcgcatcattgcactccagcctaggcaagaatcatgaaactccgtctcaaaaataaaaaaaataaaataaagtcttctaaatatatttaatggattagaacaaattttatgggatacttaggaaaagtatctccctgatggtcaagcattcactacttttcatactgaagctcttattagatctatgtcacttaaccttcccatgcctcagttttctgactaaaagacattttcaaccgtaaggtgaactctaatttgaattaaacatttatcacttatataataaattaatatattaatttattttatatatatactatatataatatatataagtaccttatgttaaacactgaaaacccttacatttttgtatctcaaggtcagagactttaactttctaagagaaaaatgtgaggaataggccaggcacagtggctcatgcctgtaatcccagcacttcgggaggccgagcagggggtggggggcagatcacctgaggtcaggagttcaagaccagcctgaccaacatggtgaaacccccgtctctactaaaaatacaaaaattagccaggcacgatggtgcacacctgtaatcccagctacttgggagactgaagcaggagaatcacgtgaatgtgggaagcaggggttgcaatgaaccgacatcaagctactgcactccagcgtgggcgacagagcaagaccttgtctcaaaaaaaaaaagtgaggaataatctctcctatatatctttctcttaattacaacataaggaatgcagaaaaatgctgttttaaaaactaatgtccttaatttttaacagatggtggtgagtttgattccacaatatgcataacaaacaacgaagccttaaggtcttttaaagctagggacagaaggagaaacactttcttgctttactgggtatataatcaaaatcattcctcctttttttttttttttttttttggagacaagagtctcgctctgtcgcccaggctagagtgcagtggtgtgatctcagctcactgcaacctccacctcccggattcaagcaattctcctgcctcagcctcccgagtagctgggattacaggcgcccgccaccatgcccagctaatttttgtatttttagtagagacgaggtttctccatgttggtcaggctggtctcaaactcctgacctcaggtgatccacctgccttggcatcccaaagtgctgggattacaggcgtgagccaccgcgcccagcccaaaatcattcctctcttaagtatctttttccaatatggcaaataagcctagagatgaacaggtaagaagtaaaaaaataaaattaagaaaaaactgaaaaaaatttttaatttttaaaatttaaggagaattgcggcgtggatccttcaatttcctacatccagattctgctgtccacaaggttcagctttggaagtcttctatgtgccttttaaatcctttcttaaaattacagagtcttttctaccaagttttaaatctaacgctctatcaataatgtaatcttttatatgcagtaacattatacttcagatggattagtagtttagtttagatgcctttgggtctggaagcatacgaatggataaaacaattccttcaagtctctgacagcttcataactctattttatctacatagcttcttctcaacttcctctgtctattccaagatattttccaggtaggtctgaaacgctgagtcccgtaaagaaatgtttatgcatcaaataacagaagagctcttcccccaccccttcagctcccataatgttttaccattatatccagtaaacaaaataggttgactcaatcttaaacaattcccccatcacaggaagcccactgcacccacagctgcagaaagcatcccttaaaccatccccaactacctacagcaacacaaagttaaaccaatttccactgacaaaaggctatgtgtgcatttattctaatcagccccaggatttattgtgtgaaactcaggcgataaaaagtcacctcctcaagctacaaaacttttttttcatcccaaatattctcaatgaaagttctcttgtcaaccaggagagagtcaaaaacaaccacaaacactagcagaatgatccgctccaggaccacatcccagctggctttgctctgttgtcggtggctctgaagcagtttctcactttcctttcacccttctcccctttactccccaacattctcactcgagaatgcatcacatcctcagaccgctggcaaaaaaaaaaggggggggggaagagactgcaattatcaaggaaggggaagatatttcagaaccacggtttccactgcaaacggcaataaaaaaaaaaggcagtctgtgtcatcaggatatgggggacgacgttgtagggcatcacaaagatgtgcagtgagtgtgcacttgaagctctcggggcaggatgagacgatggagcagaaagtaagaaaacctgtgccttccttgctttcttctgctcttccccctccaggagaggaagctgaagaaactgggggaggggcggaatgttatcgttctcctattgagggtatataagacaggccttagggttcgctcgtccccagttaggagggtcacggagggaagaggaagagagaacccctaaacgttacccacctctgctcaaaaacaaaagtaagggggtaattattaaatccagatggcgcgcccctaaaggcgcccccaggtcactcatccccatttccaagcggaagggctgggataaaggggatggagggtcggaggctggtcagggacaaggccccaccccccgacttaggagggaaagggtgcccaagctcccagctgtcccctcctacccctcacctcccgccttggccacccccacttatccccccttcccttctcttcccttcccttcctttcctccagagcctgaggcagccgcgggggaggcggccgctcctacctcccctcacctactctgtccccacccccactccgctcccacctcccgcccgccacgggccggttacctgctcgtcgaagcggctgaccacggcctggacccattccaccggcctgtgcgcggccatgtcctccccgcggccggggggcggcggagggaagggtgggccggcgccctgggccgggaagagggcggggagcggaggctgaggtgagggaagaggcaaggagagggtctgtggagtgcaggctcccagtgttcccacgggggtggggatggggggtcagcgccgagcgggagggggagagggaaagggggcgttggcaaggaggctggggggagggggataggggaaggggacccggggaggggagggggcctcttggtcgctctccccactagcgccgtctccccacagccatcacagtccgagacgccgccatgacaccccaccggaagtgggatcctttccacggcccggggagagggagcgcgagcgagctagagattgagagcgcggctgggaaaggggagggggaagcgagagggaaggcggcctgccgcgcatgcgcccgcgccggccggtttcattaatgaaaaagcgagtcctcctggaggtgacgtcatctaactcctctgggccgtctggcgagcgtccctcaccgccgtggggctcacctagactggcgctgggctcagctggcgagtgccagagctgacccgggagcatccactcccatccccaccgccccctacagctgtcccctcccccgccggcctccgggtttggattgctcccggagttggaagttagggcgccctggggctagcctttctcccagcgcgcggatctctgccgctaatctcctggggaggctgtgctctcagcttaagctctcagaaaaaataaggtacacgacctccgattttcaggttcttcgtagcttggtagactgctgagaaacaaaaaaggaaggccaaagagagattccgtgattttttttttttagaggtcgcttaaatcccaatgctagacccggtggcaatcaaggtctagccaccaggtctagcattgggatttaagcccagctttcctctgcaaaactcatagccatccaagttaatataactattgcacagttgatgagagattcaagtttcaccaccctcaaaacacctttaaggccttgcattcattattaattcaatatattcatcgtcttatttaaatccttgaacaaaccttttcaatacatatcattaacttcatgaactgatgaatacgtcacgtccccacccccgtgggaacgctgggagcctgcactcctccctcagacctttgatttgcccaaggtctgagttgacaggtggcaaagtcaggatgtaaaccaacgtggtttaactcctagaacaatagaggtagactatgggtctcctaaaacaaagtccttccctatacctccaataccagagttgaaaggatttcatgtgtaattgggttgtgccagttttccaggaagaggattacatccaaaacaacggataatctatgtctgacattggactttggaatgactaattttttttttttttttttaagacagagtctcaccctgtcacccaggctggagtgcagaggcgcgatctcggctcactgcaacctccgcctcccggttgaagtgattcttctgcctcagcctcccgagtagctgggactacaggcatgcgccaccacagccggctaatttttgtatttttagtagagacggtgtttcaccatattggccaggctggtcttgaactcctgacctcatgatccgcccacctcagcctcccaaagtactgggattacaggtgtgagccaccgcacctggcctggaatgagtaattttaaaatttgtcttcctcgatacattttacctaggcaaatgtttttgtttttcagagacaaggtctgactctgtgcagtggagtgcagtggctcaatcatagctcactccagcctcagactcctgggccgaagtgatcctcccacctcaagctcctgaatagctgggactacaggtgagtgtcaccctgctttggctaattttttttttttttttttttttggtagagacacagtcttgctatgttgcccaggctggtctggaactcctggcctcaagtgatccccctgccttggcctcccaaagtgctgggatgacaggggtgagctaccacacaggcccctaggccaatgttaaaatgaatttacacattccaagcacgcgctaatcagccagttaagccacacagacactgggtgataagggagaacaaaactagaattttaattttcctacagaaaagccacaaagccagtagcccacatacagagagatatatccttgagaaaagtttccaatctctaggttggtggttgtccaaaatacatattaaattaatgttttattccactagaacagacagacagtttggacatgtcttttgtcccttcttctttaaggatgcaatgcagatactaatttcttttagatgatgtcagaatgatgactatgctggaaagaaatggatgaatattaaatgaatgtctatctatgtttctcccaagtaggacccctgaaaaagcactcactcatacccccaagatagtattccagtgccccctactgcactgctaaacttcagacctatgaccttcctctccttttctcatacttcctctgaaagtccctaactacttccttgttgccatggctttttgcctgtctatctccctgatcttcttccctacactggatgcaactgcccaaaccctcagctcccttgccttccctggcattccgttgctgaagttcctctgtgcctttctctcctcttcttctctagtttagtctaccattgcccactcttctttagctctgtggtaagacacccaaacttcaggccctggccctctgctcttcttcctttactcaagctcctgccagcatgtcattaattcatcctaatttgtactccctgttctgttgcctcccctcagtgccaaacctctcattatagtcagaggcctagacttcaccccaacttcctctccaattaaattcattcagttctgctgaaccagtattaagtgtccaaatgggccggtcgtggtggctcacacctataatgccagcacttttagaggccgaggtgggaggattgcttgagcctagaagttcagaccagcctgggcaacatagtgagatcccagcttctaccaaaaaaaattatttaaattagttaggcatagtggtgtgcatctgtggtcccagcaacttgggaggctgaggtgggaggatcacttgagctagagaggtcaaggctgcagtgagctgtgatctcgccactgcactccagcctaggcaacagagcaagaccctgtctctaaaaaataaataaaaataaaagtacccaaatgcctgttatgtattatgtactttgttagaccatacatagtacatatggcaggaatgctaaacaaaagtgccaaagaagactggacgctgtggctcatgcctgtaatcccagcactttgggaggccgaggcaggcagatcacctgaggtcaggagtttgagaccagcctggccaatgtggtgaaactccatctctactaaaaaaaaaaaaaaaaaaaaaaaaaagccgggcatggtggcacatggctgtaatcccaactacttactagggtgactgaggcaggagaattgcttgaacccaggaggctgaggtttcagtgagcctagattgtgctgctgcaatccagcctgggcgacagagtgactccatctcaaaaaaaaaatgccaaagaaggtaatgcatagagactgtggtgaattaagaagcatatacccacctccatttatccagataagagatactctctccatttaaagagtatctgtcactcaactccagttactgccatgcaggaatgttgacccagtgttgctagatcttctagttactcaagagaagctagagatctgaacttacatataaactcttccaatttttacatagtggcagccaatttacattttttaaatgctgtgtagccaaacaaaatacgtctgctgtctgaatgtagcccatggaacaccagtttgaccagcactagtctagtgaaaaggcatgagccttacagtagaacagaattagatttgtatcctaacttcccccattttgcactgtccaacagtattcagggaacccttagtgtttcgtattgttttaaatgcatctctctcattcagcctctgttttttggtcaggcaacaagctctgccaattttttcttcgaagagttttgttccaagctgggagccgtggctcatgcctgtcatcccagcactttgggaggccaaggtgggtggatcacttgagcccaggagttccagaccaccctgggcaacatggcgaaacctcatctctacaaaatttttttttttaattagctgggcatggtggcatgtgcctgtggttccagttacttgggaagctgaagtgggaggatcgcttgagcccaggaggtcaaggctacagtgagctgtgatggtgtcattgcattccagcactccagcccgggcatcagagttagaccttgtcttaaaaaataaataaatgaataaatataaataaaaaataaaaagcttttacagtagtattcccttcattctgcccaccacccccatctccactggcacaaccaaccatcccagcataccaaagagcacaccactcttcaggactaaggtgctcatttcctcagctgctgggcgcattacttgtcaacacctatcagctaaatccctttccaggagttgccttcagctgaagaaagctgcctctcaccaggtccgtctgcactgactggcagatgcagggctcagggtggggctgctctgaagggctctcctggcaccagagctcccttaggatccggaagctgaggcatttgctgtaactacatttagttcaactttttctgctcaatcctactcctttcctgcacggtgttgattccaagggcaattaaatccatgagtgtggccggacaccatggctcagacctgtaatcccagcactttaggagctgaggcaggtggatcgcgtgagcccaagagttcaagaccagcctgaccaacatggtaaaatcgtatctttacaaaaaataaaaaaatttgctggacatggcggtgagcagctgtcatctcagctactcaggaggctgaagctggaggattgcttgatcccaggaggtagaggctgcagtgagccatgtttgtaccactgcactccaggctgggtgacagagcaagaccctgtctcaaaacaaacggacaaaaacgtcccatgaatgtggtttgatccagtggagctgaatcattcccctggccagttagcagtaaggtccacaggggaagccctgacaggccccggcgtgccatagcagtacgatgttaaaactttcagcaatggtgaagagctggaatgggtgggatgtaacctcagtggaacaatgcactcgtaggtgcaatctatcaggcattttaacaatatagggcaaatagtagtttaagaacaatgaaattggatggctactgatggagtaaacctgtgctttggagaaagacaatgaaaggttgaggatgatgaatcaccaattaaaggctaaggaagaaagccagtgtgcctccttagcagcatataaaggaagtaggagctgcataaggcagaaaaagcggaagatgaagctcaggatttaattataagagcagaagaacgccaaaaaggttttcagccctagtgagtgtactataccaaggtcaggggcatagttgagaagtgggaccctgacactttagatggggcatctgggtcaatgcacttgagaaccttaaaaccccacatcaccttgagtgctctgggtttgtagaagtgtcccactcctccctcaagaaactagcaccccacccccttgcttgaagatcaagaagtattatctgccttgcaaggcaacacacgctctcctcagatctacctgcacttttccacctgtctaacagaccaataactaaggtcaagtcacacataaccccattaagaaaatgctagacctgctaagggaggagaggcactgtatcctgaaggagctaaaaaacctacccaacttaggccgggtgcggtggctcatgcctataatcccaacactttgggagaccgaggtgggtggatcacaaggtcaggagatcgagaccatcctggctaacatggtgaaaccctgtctctactaaaaataaaaaaataaaaaattagccgggtgtgatggcgggcgcctgtagtcccagctactctggaggctgaggcaggagaatggtgtgaacccaggaggcgggccttgcagtgagccgagatcgggccactgcactccagcctgggtgacagagagagactcctctgaaaaaaaacctacccaacttatatacacatctgcagaaggtgggagaactgggtaaagggtccccagtgtgctgaattggggagggaggagaaaataatgctaaataaagcagagcatattgatataagcacattcctgtactacagtatttacattctggcaaggactccaggagataaagctaacagattgctaggatggctctagaaagcttggagaaagcagtggtccacactaagcaaaatagaaaggccagagctgtcctggcaaacaatggaagaagggagcaaaagactcagaagtgggaatgacatattatttacatcctatcctgtcagctgtgttctgctgtttatcacaagcaataaggaatgtgctattgagagggacacaagcatcactgagaagtccaatagtcacttttctctgtagaccagggcttatagtggaagatgtttcaggagctagggtccctgatagcaatgggcctgctagagaccaggtagcagtgcataactagcagaagattaagtggcattgttagaagtggcaagatagaatggcatccaaggaagcctgacccacaggaagctatgaaggtagttagtaggatactgtgtgcctcaagatgtagtttttaaaacacaaggacagataaggaggcagctgagaggagctgccccaatagtcataatcccttgccctgtttctcaacctgagccaatttccagaacctaatgactgaggaagaccggattcccagcaagggtatatagtgatgagtccttgtcctctctgaatgggtacttagcatgggcatacttggtggttggcagaacctctatgatagttccttggcctgtggagcaagagctgtcatagtggggaaggccaaggccatacctggggaagcttctaaaactgcacccctctcacccagccaacagtcgacatttttaaaaagtggcataccctgggggaacatcagagaaaaggatgcaaatacagagtagcagggctcccactcaacaaggctgatccagctgctgatgccaccaaatgcccaacctgccagcaacagcacagatcttttgtcatttactctttattctttttcctgctgagaacgtagatcaaagcctagaagtgaagcagctattttgcaaaagatggaagctaaaggaagcttgggtccctgatacttcttcaagcagctgtacctgccctgaactgcctacctccagagttctggttacagaaagaaaaataaaacctctgttttgtgaagtatgtgcatccaggtttcagttccatgcagctgaatgtaaccctaactgacccccacagatactgagaaaagtaaagaaagaggggctttaagcagctgctgaatggagacctaaaggcatagaaagagaggtgattttcagaagtgttactgtgggttgtaattaggaaaatatacataggaattaacttcatttttggttgctaggttcttcctctgaatgttatactactccaaaactgggccaagtgatgtctaggacttatttggattatttattaagtaactaattatgtaattgtcataagtggtagtagtatcattagtactactataacaaaactttgtaagaggaacattccagaggaaggggcacaaaaggaaatcagagccagaaatggacactatcatgcctttgttctttttacctgggtctgaaataacttttcttttgtttctctttttttttttcaaggcagagtcttgctctgttgcccaagctggagtggcatgatctcagcttactgcagcctctgcctcctgggttcaggtgattcccatgcctcagcctcccaagtagctgggattacaggcatgtaccaccatgcccacctaatccgtgtatttttagtagagttgcagttttgtcatattggccaggctggtctcaaactcctggcctcaagtgatccatctacctcagcctcccaaagtgctgggattataggcctgagtcactgtctctcctttaaagcccacctaatcctctgatgctgaacttgctttggccactccagtccttattcccctgacttttttttttttttttttttgagacagagttttgctgtgttgcccaggctgcggtacagtggcatgatcttggctcactgcaacctccaccttccaggttcaagcagtcctcctgcctcaacctctcgagtagctgagattacatgcagccaccaccatgcctggctaatttttgtatttgtagtagagacagggtttcaccatgttggccaggctggtctagaactcctgacctcaggtgatctgcccgcctcagcctcccaaagtgctgggattacaggcgtaagccatcgtgcctagcctactccccggacttttaagcacacgtagtcatcttgtcttcatcacaggcatgctaggctcctagcagtatcaaaccacaggagaaccattataaatttgttttgattgattaatcaaaggggagcagctggaaacaattagtaacagactaattgttatcaactgcctaggtaaggaaaattactatgaggattcatcctatgtgaatgttctggtgtagccattaaaatggtaagttataaacagctgagaaagaaacatttctgtctttggtggtatagttagtctctcagtctttcagagaactctgcttctattaatatcatttatttcttcattctcacatacctattgcagctaagtgttccatgggactcataagagaagattcaatttctgctctgaagaagtgtagttatgaaagatacatcaggtctctaaataactatcagagatgatagaatgatagaaacttccttttaaggggtgcttacaagacatcaggcattatactatgcacttatatacaatattgtttttaaagtccatacaaccatatgaggtagatatcactatccccatttcacagataaggaaaaaagttcaaaaagatttagtaaaatgctcaggtcgcctagctagtataagatgagtctggtagttagctgaagtcagctttgtctgactccaggttcatgctcttatccaccatacagcatggtccaaagagggtttcttggaactttcatgcctccaaatgactcatggccagacgagtttgagaaatgccatgcactgtagttccctattggcagttcacagtgttgttctgtattacaacactgtagtagtttaagccagtggcctccaaacttttttgatggtatattccttttttaaaattaaaaaaaattttttgaaggcatattcatatcagtaaaagaatgtaagcacctctgcccagtataggacttacagaatctatatatttttaactatttttaattttattctgtttaatatattactttttgttctcactaaaacttccagcattagtaatatttgcaacatgattaatagtatttaatatattataaacataaaatgttaatattgtttataataatatttttagtaagagcattgtggttggacttgttttacatttttcagcatttttttttttttgagacagaatcttgctctgtcgcccaggctggagtgcagtggcgcgatctcagctcactgcaacctccacctcttgggttcaagtgattctcgtgcctcagcctccctcatagctgggttacaggcacccaccacaatgccaaactaatttttttttttcttttgagatggagtctcgctctgtcacccaggctgaagtgcagtggcgtgatctcagctcactgcaacctctgcctcccaggttcaagtgattctcctgcctcagcctcctgagtagctgggattataggcacctaccatcttgcctggctaaatttttgtatttttagtagagacagcgtttcactatgttggttaggctggtctcaaactcctgacctcaagtgatccacccgcctcggcctcccaaactgctgggattacaagcatgagccactgcgcccggcccttcgatttcagcatattgatttattgttcttttcaaagttctgcttctaaagttcagtttttttgtttctttgtttgtttgtttttgagatggagtctcactctgtcgcccaggctggagtgcagtggtgcaatctcaactcactgcaacctctgcacctggggttcaagtgatccacccaccttggcctcccaaagtgctgggattacagatgtgagccaccacacccggcttattttgttcctttttaaatggatatcataacttatacatttgctctaaaagagtacatacacacaaatggatgaagctgtcattagttctgcttactatgtaatgtttttctttttttttttttttgagacagagtctctctctgtcacccaggctggagtacagtggcacgatctcagctcactgcaacctctgcccctggggttcaagcaattctcctgcctcagcctcccaagtagctgggattatatagatgcccaccaacacgccccgctaatttttttgtatttttagtagacatggggtttcatgatgttggccaggcttgtcttgaactcctgacctcaggtgatccacttgcctcggcctcccaaagtgctgggattacaggcgtgagccccccgtgcctggcctatgatattaatgttccatcctgttcactaattatgcaaaggtgctgctgctcttgtaatgctgttagcgtctttccattttccctgatgggaaccagttgttcttctaaactaacaaatgagtacaaaatccactgaaacatttccttttaatcctaaatgggttagaaattttgatttccaagttttaaaagtatgcagctatgaggttttttgtttttgttttcgttttttttgtttgtttgtttgttttgttttgttttgagacggagtctcactgtgtcgcccaggccagaatgcaatggcacgatcttggccactgcaagctccacctgccgggttcaggccattctcctgcctcagcctccagagtagctgggactacaggcacccgccaccacgcccagctaaatttttttgtgtttttagtggagacagggtttcacatgttagtcaggatggtctcgatctcctgacctcgtgatccacctgccttggcctcccaaagtgctgggattgcaggcataagccaccgcgcctggccacagctatgagtttttataaatacatacttgtctttacaacaaaaccacataactatgaaatatttttaaagatctgttttcctaatgccctctgcttaacgtgtctttttaggaaaggagtttgtctttctctcaatcattgttaaataacacctttattttaaaggtcacattgtgtgtgtatgcacatgaatgcaggcatgttttgatactactgacagcctctggccttcacagaaaaggtcagcaaatttagtttattggaatccagttagtgtaatctatagaaccacttaattaggcacagacaagctgcagtgtatcaccatgcactgaaaatgaataaatgaatgagggtgtcactaacatgtcctctatggtatggagtcccactcttggagaaataagaacagcctgagaaaatacagacataaagaactgcctacctcccctcctttctctctgaccttatcctccttccaagactaaattatgaacaaagaaactgtcaaccaggagctcctcctggggaaggaaagaaagcagccttgattaaaatgtaacttctaggcagggcgggcgtggtggctcatgcctgtaatcctagcactttgggaggccgaggcgggtggatcacaaggtcaggagatcgagaccatcctgggtaacacggtaaaaccctgtctctactaaaaatacaaaaaattagccaggcatggtggtaggtgcctgtagtcccagctactggggaggctgaggcaggagaat

SEQ ID NO: 87 - DNA, 265718 bp, Mus musculus
tgtagaccaggctggcctcgaactcagaaatctgcctgcctctgcctcttgagtgctgggattaaaggcgtgtgccaccacacccggctgttattattattattgcatttacttgttgtactggctaatttttatgtcaacttgacataagcaagtcagtcattttggaatcagaaacctcaactgagaagatgccctcgctgaattggcctgtgggcaagcctgtggtacattttctcgagtgataattgatgtgggaaggcccagctcactgtgggcagtaccacccctgggttggtggtttggggtgctgtaagaaagcagttgagcaagtcctgaggaacaagtcactaagcagcacttcccatggcctcggcttcctccagctcctgccttctggtccttgccctgggttcctggcctgacttccctggatgatgtggtaagagaaataaaccctcccctcccctccccaccttgctgttgtcatggtgtttcatcacagcagtgcaaaatccaacagagatgcttacctacctattgatgtatgcgggtgagcactgacctgcaggctgtgtgctcctggagagtagaggaccaacttcatgagttatttccctttcaaccatgtgtgcctttcctgcccagccagctcattagccctgtgccagggtgttttttttgtttgtttgtttgttttgttttgttttgttttttgttttttcgagacagggtttctctgtatagccctggctgtcctgaaactcactctgtagaccaggctggcctcaaactcagaaatctgcctgcctctgcctgccaagtgctgggattaaaggcgtgtgccaccacgcctggctcagtttttttttttttattaatttattttcttgtgtgttgtatatatatatatatatatatatatatatataggagtttttacacatacatccacacaccagaagagggtatcagatcccattacagatggtatgagccaccatgtggttgctgggaattggacttaggacctctggaagagcagtcagtgctcttaatcactgagccatccctctagctccagggttttatgtagatgtgggggatcctcacacttggattgtaagccttttactcaccaagctatctcctcagttccctggccatcttggaactcactctgcagacaaagttccatgcccttgagactggtaagttaaatggaggcaataatgaaatgcagagacggatctcttcaggaaacttatcttggttctgttattgagtctgtacttcctgcccacgaggactcgaggtctgacctgagtttttcaggctccccctcctttaaacttctcttgggttttagttctaaagtgcagctatcagacctgggggagctccactgtgcttagaaatagcctaggaccgtgagcttgctctgagcatttgggacgatgacacgggagtgaagtttgggccaaagatgacccttttacctgagaaacagctgccccacagaactaattggacttagtgggttagagagaggaggagggggagggggttggcgaggaagtaggaagatgatgcagatatatacgatcaagatacgttaacttatggaagaatacaacgaaaagattttaagacagattcacactgtagccctggctagcctggatcctactatgtagaccaggttagtcttgaacttttaaagatcttcctgcctctgcctcatcctctggagtggtggaattaatggtgtgtaccaccacattcagcacaaaaaaaaaaaaaaaaaaaaaaaaaaaaaaaaaaaaaaaagaaagaaagaaagaaagaaaagaaaagaaaaaaaagaaagaaagaaagaaataggggctggggagaaggctcagaggttacaagcaatagcttttcttctagaggatccaggttcaagtcccagctctcacggtagctcacactccaggtccaaaggatacactatccttacatagatgcacatgcaggcagaactccaatacacatgaaataaaaaagaaataattaaatacaaagctttttttgcttttgtttttttttgtttttttttttttgtttgtttgtttttttttgagacagggtttctctgttgtcctggaactcactttgtagaccaggttggcctcgttcctgattaagatcactggctgttcttgcagaggacttaggatcagttcccaatactaacatggcagctcacaaccacctgaaacttcattcccagggacactaatgtcctcttttgtcctccaagggtacccaggcaatgcacatggtgcatatacatacatgcaggcaaaacactcacataaagtaaataaatacatggtggctctagtgttcaccagtgttacgagagtgctaggccagagctctcattccacagtatttttttctactagtacattgttttaatgattctatttatgagaaccttctagaagctgatatgctctccagttgcctacaaaccagacggagtcgcttgccaaaattactggccaaagcccccttttcctgaggagaatccctggagggacaggtcagtggaacacatgcagagatgctggcctgctttgtgtggaagctgcttgttttaggtgatctggtgttatgttacatgaacactagtgtttttccacaagtatggcttccttctgccaagaggatatctcagccagatgacggaaggggaaactttcatgtggcaagtgctgcagaaggacgtgagtcctcccaggaggagcctcttcactggcaacctgcagacacacttaatatttatgtattattatgaacaaagacatatgaaagctatctgattcactatccaccacatagctatgtggtagaatttttttttttaattctttctaacgtcaagacttactttgatttttaatgatgtgtctgtgtgtgggtatgtgtgtctgaaagcaggtgctgaaggaggtgaggctggagacatgggatgtcctgaagctgtagataaagcttgaaacacacagcctccggtcacttgtctggagaaggcaggtgatgaggacttggaagggtccagagtagcaaacacttccacaggtggtggaggcattcaggcatgggtaggtcaagccttaagtcttagatgtggagaagagagtgttgtctcttttgtgtttgccttctgtaagggctctcactatgtagaccaggatgcttgcttttgtctgtaacaccatgtcaacacctgtctcccctccccagtccctttgagacagggccggccatagtatgcctgctagcttcaaacttgctgtggggctggggctggggaggtggctcagtgcctgagaggatctgagttcagttctcagcacccacatagcagctcatgaccatctataaatccagactctccacctaggctgtaaccccaatatccttcccacacgctcccactctgtttagatgaactgcagatgctgagaccaagaacttgacatgataagaagatgcatgtgtttgaagccacagataaacctttgtcttccactcgtgaagatggataaaaatgttgacttctctgagacccctgctaggacggaactgtggtttcggacttgggtaacagtcatcttttatacacggcctaggagcagtgagctccaggcttttagtcagacctccagggctttgcccacaatggctccatccctggcaatctcctccctactctgctggaccagcttgaaactctatccaccctgtctgcttctttgccatgtttcatatattgctacccaaacattcctgcctctcccccactccacagccagttccttctaatgcaagggcacatggctttccgaattttaggtggtctgcaaatgggtcacaggactgtgaccactgtgcccatctctgcagagggcctcggttgtggctcatgaatgtggctcgcaggcttgaagacttgaccagaggtgatcagaagaggtggatcttgccctgggtcttgcccttctgcagaaccacccgaactgtgcagatggagcatttgacacagtctgctgggcatcgtggcacagctgggaaggctgcagagctagagagcaggagaggtgaaactcctgagagaacttggttctcagagtcctgagggaaataagcagagagttgggttttaacagggcaaggctagaggtttcttctgcagtctggccttcagcgtcccacttgagaacctgtaagacttttggggaaatttctgatgtttctgggaaccacaagaaagaatctgttctgttctgccctttctccctccaggctgggcaactctagcaggactcacagcatatctggtcagccaagttccgtcttttctctgggtaagtggggactgtcacgggctcaggctcagcagtctgtggctgaggattcatggcaccccttgtcctttcccctcttcctttcactgtgagaggtggcagactggacagcactgccatgctgtgccttctaagcctgggaactatgaggccaccggagaaggggcaaccatgatgaagagctggctgcctcctcttcctctgaccattgtctccgtctgtgactcaacagccgaccaggggctgtttctaaggagagaggttagccaggatgagacaatagctcccggggagtggtgcacatgcttaaatcatttcttacctgaatgatttaagtcagcacgccgcgcacgtggcagagcaaagctgctcctgtcaacctggaagcagagctgggaaggagctggagtcgcggagtttcctagcccaggcccctaataacctgaagacctcctacctcctttaccgtgtggaattttgggagacattcgaggcacagctataaagctgggcaagctacatggaaggctgaggcaggaaagtcatttgagtccagtgtctgagacctgctccagaaagataacgaggccccgcctcttgacttaaaacaagatccagctacagaacatcccacgtagctgcaaaggcattcacggagggaagaaatgaatgacagaattagggtcctctgaaaggaacatttatactccatatcactgaagactgaggagaaaacaccttcccccaaccactagcatacctggaggaaagacgtttctctcagctcttttaacacctagatcagaacactacacaggctgagtccgggtaatagcttttgttacctatgcattgataacaattagcttataagtagttgtttccagctgctcccctctgattaatcaatgaagacaaaagtattatggcatgcctgtgatttgctatctgcagagttagaaacttagcaagactgagccgagggcaagacgagtatgtacttaaagggtcaggggaggaaggactggagtgggcagagcgagtttagacaagggggaaaggcaaaaagagagaaattctttcaggcctagataacaggagtcgatgaccaggattctctttacatttctctttgtacccctcccagtggtcctgggggttgttggaggtttttgtttgctttgtttttgttttgacaaggtcttattctgtaaccacatctggcctgcaattcataatgtagcccaggttgacctcagacatctgacagtcctcctgtttcagcttccctagtaccatgcctgacctaagccagggctcttacagcgtctcattaaacagtgctaacgggaatcacgtaagcccttatgctaaacagtccaaatagacccttgccctcagctgtgcagctttggttctagacaacaaaactggcaaccttgggcaagagatgacttggtgggtggtgcggatgctaagcacatgtgtctctgagttcaattcctaccaccccaaacaaaacaaccccgaacaaccaaataagtcatttctccttccagtcccgagatcctccgttagcagttacttaagcctctgagcctttacaagtcgtagcacttcctggtatagttagggagggctttgattgccttgagtctggatgcacatgcttagcaggatggagggggtccttgttttatgtaacctgaactccaggtccagggtcagtatcaccacttgaaggatgagggcccaggcttcttttagctttacttggagatgttgggttcttagcaggaaggaggataaaaagcaaatgaccaaaactgcacgccctgtctggcagtcggattcccagtagaattagttgctaggtcagcgtggtgcgttggggactctactgctctgtgcttctctctcatttctgtgatttcctcaagatagccatgttgtttgttttgttttgagacagtttcctattccacagcttggctccaaattccctatgtaattaaggatgaccctgaattctcgatcctcctgcccccatctcctgataactaggctaacaggcttgtagcacccacccagcagcgggttagttttgaaaatgtacgcttttttggttgggatgatcaggaacaggttcaggggcctccacccgacctttcccactatgacagcttttgtcccacaggccaaaactgttgctgtagagttggtgactctatcagcaactaaatatgttcacttctacagccaggaggaccagtgggcacttggtttcattgactcgctaggaatacagtcttcttaaacagtgtggaaattgacttggatcaagaaatggggcaagcgattgtttaccagaagggagtttctctcagtctcttcctcctctatctgtgggttttaaaaattatgtagtggaactgattggttgcccacttatatttctaccagtgttctattaactatgtgcatagctctctgggagtctggctcactctaatcttgacatctaaaacaacactacttaatctggaatactgtgatgcctactgctcctaactcaaatactgtctatcagcagccctggcctacagagaacccctcttgccagcttgtgaaagaaggcagaacaccaccagctggagaggtgggtacattttatgcctactgtagcatcccgctcttctgagtcttttttttcccctttccttctttctttctttctttctttctttctttctttcttctgagtcttgtagttagcttcagctgttttcatacttgcttatgtattcaggctgccagcaactcacaatcctcctgcctgagcatctgagtgctggcagtacatgtggctgcttccctgtgactatgtctcttattccgttgtttttctatttcgtgagtccaggccattgctttctctaagtttcctagaaccatcctagtaacccattagcatcatttcctggaggcctggccaggatgtagatcccacagtacagggatgttcttacatcaataaactctgctttgcttagcattatgttttctcttcctccctcctttcccaaagcaatctggggacctgatcccatgctctcctagcttctacgcatgcgcgcgtgcacacacacacagggacacacatgcacatacacacacacaaacaaacggctggctctatcttcaatatacacattgcctttcctccattagtggttctaacatttccttggtggggttattttgtggcttgaccttagttattagtctggtaggcaggtgaaaaggggttggtagattctgagggcttgtttggtcttgcaaggtagatatacttatgggtgagagatgatgaggcaataaattgcccttaatgcagcttttgagtcctcaaggtgatatggatttctgagggttgtaaatgcgtggagaaagatgacctgccacacatggcctagtactttccccaactgctagtccagaccttggttcagcagacttgccagacctgagaatcactttggagttccactgctcttataattaagccgtagtctgtactcagctttgacttttatccttagtctttggtaattaatcgttctcagactttcattgtctttctccatggtatagatttactgcatccacagttacataagttcatcctcatgtgttgctgtcctgagacagggtctcactaactcaggttggtcttgaacttgccactgtcttaccttcatcttccaattacaaaggttacaggtatatgccctattcctgtccttaaattaccaattcccttacattaaaaaaagaagaagaaagcctgctagattgaacctactggtacactcttctatttgtattatattccaaccttcttcttaaaaaggctttaatttatgtgtatgcatgtgtgtctgtgcatgtcaaggcccacaaggctgtgaggtcctcactgccagctactcataggctaattcagctccactatatcaggctcccttcatggcacttggtgttcttgggaatcaacattgtgcagtacagagggagtagtattgaggagaaatagaagcagaataaaatgtagtcacagataaagctccagccagtcattttcttgggagctgacctgatcaggggagctctggagccaagaaagccttcagagtggatctgtcctgaacttaacatctagtctgaaaaggctctcctggaagtgctgtcatgtgtcatgcagaagctctcctcagcagagggcaattctggagcaggcttcagctgagggctactggcactggccattaaccctcccagcggctaggaaacaagtgtcttagttcaaaagagcctgtattctttggtatgtagggatagagggatggggagctgctgtagaggtggggagagggtagaattaataccttgagactttggacatgatccttgaggggttggggagatggctcagtggttaagagcactggccgctcctcagaggatctgggtttgattcccagcacccatagtgtggcttataattgtctgtacctcctgttccaggggatctggtgccctcttctggccctctcaggcactgcacatacacggtgcttagatacacacaagcaaaacagttatacaaacaaataaaataaaagacttgaagaacaattgacagtttttatctaatgaagaggggggatgaatgagggcgatatacattcaaactgtacataatctctaattcataatctcataaacacataatctctaataccatttacagcgcagaagaaaggaagttaggatataagccaatctttactcagaagtgtatgccttttgccaacgagactacagctagtccactcagtttctacaagctaaactcagacagctaacttactttggctgcacaaaattgagaaatgtgattggctgtcacagtgtaaaaattagagacatctatacataagtttggatttctagcttctcttaagtaactggaagttctagcaacatgaggtcaacatccctgcatggcaggaattgtccggagctgagtgatatctgccctttaaacatgggtgggcatgggcagggacactccttagttaaccaggtcttcctttccatgatgacttggtttagactccctgtcacaccactatgcatggcttagcaaagtttacggtgtggaatgggctgatggatacttaatattggtttacaagaactgactgagttcattagagaggaggctgggtgaaggctagaacctccattggcaatgagaggcttggggtgaagggggaaaaaataggactttgtacacaggcgcacagtcagatgaattaatgctccagtggctggagcctgagcaaagaaaggagagcaagaagccagcagtgaaggttagagagacaaccaggaaggagccagtcaaggggaggaatgagacagaggctatttagtaatggaatggtgatggtgtgtgtgtgtgtgggggggggcagggctcagccacatctaagtttcaaagataaagatggaatgccagggcaaagaggagctaatcaggggtttcagagccggtgtgagaaagggaaagggaggtagtggttctagctgtttagcagtgaagtagacacgttgggatgctatttggggcgatgtgctgtgagtaaggactttttccagggtcctggatgcagaaagcaccaaaggccctttaatcttctctcatttctcttcagcactcccatcaccgctgacgtcatctaaagaaaccagtatccatgttgcagctttcaagaagggatcgtagaaacagccaatctctgtccttttgtttcagtggaatgaaacattaacttaatttgcatcttggaagatcactaacctacctagacttgagacttcttttacagctataccactttgtccgtgggctactagctctgtggattttctgtggtgaaatgaaaattgtggttttgtttcatcttatcacccagttggtatcttcctatgtggctaatggttgatggctgcaggctgttgtctgagtgcgcgtccacacttttgtttttgagacaaggccacactatggagcagtggttgactcaggaggatttgcttgcctctaatgaaagcgagcatctccacatcctgcttctaaacacattttaacactgacttaattcaagtgcattgaagaaaactcatttcaaagtccagtgtcagagcgcctttccctccccatccgatgagtagagagcttcaccctgtagctctgcttggcctggaaatccccaagtagaacaggctagccccgagcaaactatcttttgggtttatcctcttttgtaagtgtgcacagccaattccacacaagtccttcaaactctggttctgggcattgggaaggcccttgtttctggagagccatccttctcgatttgttcttagagtcaaaccattttggtacttatcagcccttgggcatgtatcctggaacctccagtgctctgttcatcagataggtcaggctactgagtcctactggaaaggtttgttcgaaaggctgaaatgcataaatgttaggccttttaaaggtctttacagtatggtgaactagtcttcaatctgaattatcatccgtgcaaaaagttttattaacttggttgtccgtcagtttagttgaggaatttcggattggggaattctagtctccaacttggatcaccactgggccttgctttggaatttaagcgacattaaaaagaaaaaaatcacggaatctctcttggccttctttttacccgttttcagcagccttcagaagccccatcgactgcgtggcggtgtgtgccttacatttttaagtgaagaaagcggagagagactgactccagcctccgggacagatcagcgacagagatcagcggtcggagagaaagcctagcctcaggacaccctaacttctaaccccgggagcgatccaagcccggaggccagcgggggaagggctgttcgaggcggcggtggcaatgacagcctacgcaccggagtcggctcagattctctggccagagccccgcgccagtttaggtggggagacccgcggcagcgagggacgcgcgcctccgggcccggaggagttaggtgacgtcacctccaggaggactcgctttttcattaatgaaaccggccggccgcgggcgcatgcgcagcaggccccttccctctcgcttccccctcccctttcccagccgcgctctcaatctcaagctcgctcgctctccctctccccgagccgtggaaaggatcccacttccggtggggtgtcatggcggcgtctcggactgtgatggctgaggggagacggcgctagtggggagagccacccacaggcgccctcccctccccgggctcccctccccacccctcccccagtctcctcgccaacgcccccttcccctgtccccctcccggcgggccgcgcgggcccccgtccccacccccgtgggaacgctagctgcccgcactcctcagccgctcggctcgccgctgccctcacctccgcgccggccgcccgcccgccctcaggcgggccccggacgccggccctccaccgcccccgggtcgccgggaggacatggccgcacacaggccggtggaatgggtccaggccgtggtcagccgcttcgacgagcaggtaacgggccgcggcgggcaggaggtgggagcgggtgggggtggggacgcggtgggtgaggggaggaaggagcggctgcctctcgggctgccgggggctccgcagaccgaggaagggctggggtgggggggcgacgctaggggactgcccggggattcggctgtgagccggggctctccttccctcctaaaccgggggggtggggccttgcccgtgaccagccctccatcccctttatcccagcccttccgcttgctcttggtgcggggatgagtgacctgggggcgctttcagggccactccatctggatttaatggttctctcttaactctccccttttagaaggaggtagataggggttccctcttcccttaaccccctcccccccatcctcgtaactggggataaccgaaggaacccccagtctgtgtatgcatccccagtaggagcaagataatatcctgccccacccccattttctgtagctgccccttgggggcaggagtagggaaagcacaggttttcttacttttctgctcggggcgtcagcttgcctggatgatgttcacaccagcatccttgatagccggatgacacaaggttgccttttgcgtttgcaggggaaaccgtagttctgaaatgactcccctcccccttccttgcttgatgatcacacccccctctccagtccctgcttgccagcagccccagaatgaatcttggctttcctaagtgagactccaagagtaaggggagaagggtgaaagcaaagggaaaatctagctacagactagacagcagagacagacagctaggatgtggtcctagggccaataattgtgaccatggtttgttgttgtttgacttgtttttgactctttgaaccctcattgagactacttgggatggagggaaaagttttgtagtttaggaaggttgctttttattcgctgagttttccacacataaaattctaaggctgatgagtagacaacccacacatagccttttgtccatgagaactagtttaatttgatgctatctacagatagctggggctggtttaaaggatggttgctttttgttgcagttctgccagggggtgtcctctaatgagagaattgtttagaattgaaccaatctcttttgtttattgggtttaatcacaaaactgattatgggagctgacaggtaggggaagggtttcttctttaatttgaccagcagacatttttttataggactcaatcttttgacctatccgacagaggaagtctacccagaggacactgggaaacctacacagagctgaatgtggtggttatatgacttttgtcccagcacacaggaggtcagaggcaggtagatctctgtgtgttggaggccagcctggtctacagactacatgccaggatgtcaaggttactaagggagattctgtctcaacaccccccccccaaaaaaaacaaacctacatagataaaattttgtagctatcagagacttcattcatttggtttccagaccaaaaggcatcaaaacaaactgttgttgtaacccgcctgaagaagtaaatattactgtgtaaattggtccagttatagagcattagatttcagtagaacattaagtagaatgttagattctaaacttgatagaaaagaattgctgtgtagaacttaaaaaaaaaagggatttaaggggctaaagaggtgggtttagcagttaaaagcacttgttgctcgggcagaggacctgggtttgatttccagcattcacacagtgttcacagtgtagttcacaattgtctgtaactccagtcccaagggatctaatgctcttttctgaattgtggcaccaggcaagcatgtggtgcacataaatgcaaacaaaacactcatacacataaaattaaatacatttaaaaacagatttaaaatgtgcctagaccagtggctctcagcctgtgggtcgagacccttttgggattgacagacccttttacaggtgccacctaagatgattgtaaaacacaagatatttccattatgattcatagcagtagcaaaattatgaagtagtaatgaaataattttatggttgggggtcaccacaacatgatgagctgtactaaagggttgagcatcagggggcttgggaatctgctggagacaaaccaggactgaactcacagagagcagcatcttaggggagggctgggaaccactcactttaccatttaccttgatttctaaaaaaaggctatatttttatttatgtgcacacatgcacacatatactctctcacacccctcacacacacactttcatactgtcacacacactcacacacacacacacacacacacacacacacacacactctcacgaagtcacacactgtggcaacctgaaaagtgccagatcacttggatctggagttaaaggcagctatgtgttgcccgacatgggcgctgggaagaaaacttggaagaacagcaagtgcttttaactgctaagccctctctcagccccaacttttgctaagctttaaaagttaaattcaaattttcttttttctttgctttgtagctcaggctgttgtggaatttgctatccagctgatggtagccttgatctgctgactcttctgccactgccctctaagtgctgggattgcatgcatttgctactcctatgtctggctttttccttcagctcttacctttggtctctagaccatatttatcatataaggaaaagaaaatgctctgaattttaaaattagaatgatgaatggtttaataccatatattgtttatatatgttgtagtatcagactcatttccatttattaaaagttaaggacattagtttttaaactgccatttttgccatctcttatattgtaattaagagaaagatacataaaataaattattcggtacaatgttttcttacaagctttcaagaaatgcagtaagaggcgggcttggtggcacacacctttaatcccagcaggtggatttctgagttcgaggccagcctggtctacaaagtgagttccaggacagccagggctacacagagaaaccctgtcttcgaaaaaccaaaaaaaaagaaaaaagaaaaaagaaagaactgtagtaagaagcagctggccgctccttgaggccagtgaaacaactatagacaacaagaaaactaaaaactttcaatatttatttatttattttatgtatatgagtacactgtagctgtgtagatggttgtgaaccttcatgtagttgttgggaattgaatttaggacctctgctcgctgctccagcccaaagatttatttatcattatacataagtacaccttagctgttttcagatgcaccagaagaggatgtcagatctcatcgtggatagttgtgagccaccatgtggttgctggaatttgaactcgggaccttcagaagagcagttggtgctcttacccgctgaactatctccccagcccaactgaaaactttaaaacagttgaaataactaagattctcatatacaaatgtcagtacacagtagacttttttcatccttggtaaattataaattctggctgtcaatagtggcacatgccttccgtcccacatgggctctctgaatttgaggccaaccagatttgtatttggagttccagagcagtcaagacattgattttgagatgcaaaacaaggtattcaaggtttaccttcagaaatttttgttaatttattatagaagtgataaatggtcagttcaaattaggttcatctaaaatattttttattatttgtgtgtgtgtagtaccctcagaggtcagaagaaggtactggatctgttggacctgaggttataggtgggtatgagtgtcccacttgggtactggaagcaaactctgggactctgaaagagccacaagcagtcttaaccattgagccatttctccagcccctctcccactcaagtttagctaactgttgaagagtccccccccccccctgccccctttgtttttagtgaaaaacagagagactaaatggcatagcagacgcagagagccttcctgtgacatgtgtcaaatgctagatcattagagaatgctatttctaagcatctcatagactttgttttaataacccatgaagtgtagttagaagagtttactgttctgttttgcttttgaggcaaggtttcactatgtagtcctgagtgttctggtgcctgcctttagtctcagcactcagaggcagacaatctttgagtttcaggccagcctggtctacaaagtgaggtctgggacagccacggtggttatacggagaagccctatcttgaaaatttttttttagttatgagtatgtatgtgagtgtgtgagccacctaacgggttcagtgactcaggtccttgggaagagcatatgtattcttagccacttggctgtctctccagctctaaagctgtagcttcattcagtgagctgcccagcaggtgaaagcacttgttccaagcctgatgacctgggtttggatcctcaggacccacttggtggaaggggagacttgattcccttatatttgttctgtgactgctacaagctgcactgagccactcgagtgccccaaagtaatatcaataagtgtaataaattattttccatatttaggcaagtgaaccaattatggaagtaaaaaatacttcgacaactttttacataataaaatccagttattttctccgataaggtctcactttgtagctctggatcttctggaactcagcctggagagcagcctggtcttgaactcacagagattcatctgcttcagccgtctcctccccccaggactgggattaaaggcatataccaccaggcctgattgaagaaaacctaattattaaatttataatagcatgttgttatcctcatacattgaatactaatcagactattctttgaatacaacgtggtagagagttcacagtataaaatgatgagcatgtatcttcaatattataaatcccatgctaattggccacaaagatttgtaaaaattcaaacctactctgggttaataaaaaggatctatcctccctaactcctggtctgcaatctttattaggcattaagaacattgaaaaaaaataaaaaatataatctgttatgttgaaggcatagtgtttattcttttggaattcctcttttagagtaatttcttcttgctgtttctcatttggcatcccagtcttcctctttatttagattttattttattttatttttacttttaaacttaggttttctttgggaaggaactgtgtccttggttggctttctcctgtgaactctgcttcccttcccttccttgccagacactgcctatctatctactgtctgctcactcctctctatatagctgtgacaactggctctgcttcatccctcctagactgctgcgtttttgaaaaggatttcttttggagaaacacagtggtcttttcacagttgtaataaccactgtaatgtacctctccctcaagttcccaagacacagctctttctcatatgtacaaattcagatccttctgtgtcagtatgataatcagcttgagcagagcttatccccttcctcttccttccctttccccttcctcttccttctttgagatggttttacttcgtagcctgggctgactttgaactcactgagtagcagaagctggcttctaccacccaagcttccagagtgctagagtaacagtggtgggctgcacctggccagatgcgctctttctttttctaacaggtttgcctgtcactgaactggagattctaaataggagcctgagttttgctgttagtcaatgtttctcttcatatgccagctggtgggtctcacaaagatcctatttgtcctcatttattgaaagggaatccagcagaaaagcctttaaagttctttaaagtttaaatattggatgatcttaatatgctaacaggatttctctgtgtagctccggttatcctggaacttgctctgtaggccaggctggcctgcctttgcctctacatgatgggattataggtgtgtgccaccaccaccactctgctgtcttttttttttttttcttttttttttttttgagacagggtctctctttgtggccctggctgtcttggacctggaacttaccaggtagactaggctggccttgaatgtatagattcacctgcctttgcctccatgctggcttgaatctatatcttactagcatagtcatctgaatagagaatgtgagcactttgaaagtctataatggtaaccaaatataagcttattatgcattttccttacatcttattgtttattgcattttcactaaggagagtgactagttagtctctattccctggtatgcttgttggttagaatattatacgttattttttagcatttattaacaaatatttagggtactggtaacatcttttgtaatttttggattccagtaattgatccacttttttctgttttatcacctagtttgtggcatacatataatatggtcttcaagtttgagaagtaaagcaaggctgtgtgagttaggccggcattgagccagttgtactttattttaaatattccagtttggttttttacacaatttttacttggctcaaaattattattattatcgttatcataattattattattatcatcattactattactactactactactattagtgtgtgtgtgtttgtgtgctacaacatgcagaggtcaggacagcagttggttctcttcttctgtcgtgtgagttccagggattgaactcaggtctgcactcttggcagtaagccactgagctaccttgacatcccaggattattttcttcagtctgcttttgaaaaaaggtgcttaacatgaagaattctgttcttaacttgaaagcttagtgctatgatacctagtaagccattatcatgccttgtttttacatcttattctttaacttactcagactgcaatgggcatgtgttgtcactgtagtgttcaggttggtgttgtgaccttctttctgtacaagccatattactgaattataacagcatgcttcttaacgatatggtgtttcaattgaaaaaaggtttttcctgtatatgtcatgcttatttttcattgggagttttgtgtttatgtataagacaaggaatgagaggtataggaaggctcttgttttaaatggaagtttaaggaggagaatgttctataaaagaagtggaagggggaggattgtggtcagcttaaactgttaaaaggcttaggatcaatactgaagtagaatatgagcatcttaagctatttgcagggattgacttgtttataaaagcgctgggttgtttcatccaccttctcgtagaataccccattttgttagggaacggaaagatcagacaaagcttgtccttgagaatagaaaagttgtagtgaatgtgaattgttgggtggtttcagcaacctgtaaatcctgtattgttatggtatagtctgtagttgacagtagtcagaggtgtgctgaagagctggcttttagtgcaccccactgaagtgtcttagagtgtatgcagtacactggatatatttgaccacttaaaatgttacatgtaagttggttgtggtggcccatacctctaatcccagcactccataggttgagacagatggatctctgtgagttcaagactagcctggtctatatggtgagttctgggatagccagggtcatatagaggaaccctgtctcaaggaaaaaaaaaagttatatacctaagatatgcatggtttgagtgtatgtaaaagtgacttttgagccattggttatattatcaaaagaactgttgagacagatagccccaagctaatttgcaattgcacctatttttaatgaagacttaagtgttacattcccccacccccatagattgtattgattcccttgcagtagcaatgacttcggatgctaactgaagtttaagtgtatctttctatagcgcacagaccatagtccagagcctccaatttggttgaggtttgctactacagccagcaagctggtgcctgcccttactcatggcttgcagctttggatgtcttatcctattaaattttagagaattttctgagaggaaatagttcccttacttcaccctcccctctgcccaacaaccaagtaaggttgtatatctagtgtaaaaggtatgatgttaatttaggcaatgacagtacaattctaaataaaaagaatggctaatttttaatcataattgtatactgagatagtgatcttttcagtgattatgtctcataacattttcaagtgatgcttttctgcttgttgacagattttcttagattgtcctcataaggaaatgattctttacaccttgggtttaccttcactgtgtgtagcagtgtgacctcggccactttacctctgtatcagttttctattctttcatctgtaaaatgggactaacacctgtcttagtcacatcttgggctcatttagtgtcctaagtgtgaatcttgtacatggtaggaagttttagtcacaagaatgtatcaatttatatagtattgtatctctcctttcaagtttggtaatgatcatttctgcatataagatataagatgagggataccttgaagctgcttctctctcagatgtgtgctgcacagtgagaatatttattcttgtttgtgtggatgagcacgtgccacagtgcatgtgtggagtacagcggacagatttgcgggtgcatttccttgcttccacctttgtgtgtctgaacttaggttgccaggcttgcatggtgtgtgctttacctgctgagctgccttacccccaccctcttctgttgagttttgaggtaggtctatgatagcctaggatggtctcaaccttgacctcttgcttcagcttcttgaggctgaggttataggtgtgtatcaataagttgattttcttctcatttttaagatatggtcttaggttgatgacctagaacttgtgattttcctgcttctatgtcccaagtgttgggggagggtcacagatgtgcaacatcacatctggtttgtatagtacatttcacttagaatttgatatacttggagcagctcttcaaaatttggtagtactaaagtggtttctggtgagttctggggtggctttgcttttatctctgattctctgcttttttcagtttctatttttttgtttagcaattctctaatattcatttgtaattgttacatagttgaggataacgttgaacttctgatccttgtatctctaccaccagagtgctggggttataacccgtgcggcaggtacccctggttttatgtggtgtgacactgcttctctagtcatgccaggccagtgctttgtaaactgggctgctccccagctcattgtcttgatttttagagtattatttttattctattttacttctctactacgttggggctagaaaatagtttttatgtgtcaggcagatctttctcttttcataattcataagggagtagggaaagaggaacatttgtgtttcttgttttggactcttgtaagtgaatgatcaggaaatggggagagaaaataggatttatttatttatttatttatgttttttttaagatggtttctctgtgtaaccttggctaccccggaactcattctgtatattcgaaacgtatgcctggcttatcacttttattttggtcaactgttggtagcaaaaatcattgaagaccagagttctcatttctaccacagctcaaatgctgtataattctttgaatgtattaatttttgtccctattttgagctagccttctgattgaaaaagtatcctcatcactaataaattagtcatagagctgtagtttggactctgaaattatatgttatgtttctgctataactttaacagatacttatctgactccttagattaaaagcaaagtagtaattcatagctaaggatatgggaagtacagggcggtaccgggggaaatgagttatttgcagtaccacaacttagaagcattgttgactaattgttttttttattttattttaattaattaattaattaatttttttagagacagggttttactatgtagcccttgctagtctggtctagagtagactggtctcagagtcacagagatcctcctgcctctgtctcctgagtgctagaattaaaggtatgtactactagtggccctacattgttttgtaattcattttttaaaatttacaatgttaatattttttaggattacttttttttttttttttttttttttgttttttcgagacagggtttctctgtgtatccctggctgtcctggaactcactctgtagaccaggctgtcctggaactcagaaatctgcctgcctctgcctcccaagtgctgggattaaaggcgtgggccaccacgcctggctggattacctttagaagttttaagggattacatgtagtttaaaaaattttttaaaaaattttttattatttatagattatttttttaaagatctatttattttatgtatatgagtacactgttgctgtgcagatggttgtgagccatcatgttgttgctgggaattaaactcaggacctctgttccatccagccctgctcactccggcccaaggatatatttattatatgtaagtacactgtagctgtcttcagatacaccagaagagggcgtcagatctcgttacagatggttgtgagccaccatgtggtttctgagatttgaactcaggacctttggaagagcagtcagtactctttactgctgagctatctctccagccccagatttctttattttttatttataagagtatactgcagttgtcttcagacacaccaaaagaggacattgaatcccattacagatggttgtgagccaccatgtggttgctgggaattgaactcaggacctctggaagagcagtcagtgctcttaacctctaaggttaagaacctctccagccctaaaaaaaattttcaaacacatttcattttttctatactgaacatgaatttttatcttgaactagagggtatagctcagtggtagaggatttttgtagtatgcacaaggctcagtgttactccccaccccccaaaaaaattcaaatttaaattccagcagtgtaagtttaatgtgagagtgtgatttcagtgagatgtataaataatgaaatgattagggtgtagatggctgttaccatggctttggcactatctagaccagaagctgccactagagatgcttagtgggtaaagatgcttgctgctaagcctcaccacctgagcttggtcttctggatccacatgatggggagaaaggactcccccaggttttcctgtgacatacacatgctcatggggtgcttccacatatgtgcatagggtgaatgtacagttactcacacacacattgttaaaaaaaaacaccaaaaagattaagatgaagccaggagctgtggtacctgcctataaccctagcatttgggagctgaggcaggaggacaagatttcaggatcaggatgggctagttaaaccttgtctccattcttacgtgtgaggtgacagagatggagggagcttgcttaaagtagttagggaaatcatggcctggtgtggagggaggaaggattggggaagcagatggaacgggttaggacttgagcagtgtggacagtatggaggcttttaactgaatgttgaggtcctatctttgttaatggtcatcaactagagttgagataaggaaagctgaggacagtgttagatagctgttcagttaacaagtaggggtagataatgtctactttaaaagaaaaaaggttttggcaggttgacttcaaattcagtttgtagtccaggctggccttcaccttgtgatcctcctgcctgagcctcgtgagtactgggttctataggcataaaacactatgccttgctacccagttaaaattgaatgttatattaagtaataaaattttagtttaagtatcccttagctatggtttaaagctaaacgtacacagtactcatgtttatctgagtattaggaacaataatttaggtactacctaggtggtggtggatgtgggacagagaaactgagccaggacatagactttttttttctgttgataagaaagtatctgggggctggagagatggctcaacaggtaagagcacccgactgctcttccgaaggtcctgagttcaaatcccagcaaccacatggtggctcacaaccacccataacgagatctgactctctcttctggtgtgtctgaagacagctacagtgtacttacatataataaataaataaatcttttaaaaaaaaaaaaagaaagtatctggaagattgctaggtgaacgcaacagtgttagtgggtactgtgtgagacatggaccttactaagagggggtttttaaaaagagaagaagagttggaattttaccttctttagtcttctatttagtgtttctaatttaccctctacaacttaacagtaagtttgtttactttaaaaagtacttgagagtaggtactaagcatttgccagatctcctcctccattctcttgtgttcttcagccattttatagccatttagttatgtcaccatcctaaagttttgtctgtctgtcagtctgtcagtctatttgtctatttttggtgcagtggaggtcaataattagcatctgtgtgtgtgtgtgtgtgtgtgtgtgtgtgtgttttgagacagggtcttagtatacagtttggctgagctggaactgtgtgtgtgtgtgtgtgtgttttgagacagggtctcagtatacagtttggctgagctggaactgtgtgtgtgtgtgtgtgtgtgtgtgtgtgtgtgtgttttgagacagggtctcagtatacagtttggctgagctggaactgtgtgtttgtgtgtgtgtgtgtgtgtgttttgagacagggtctcagtatacagtttggctgagctggaactgtgtgtgtgtgtgtgtgtgttttgagacagggtctcagtatacagtttggctgagctggaacttgttatatagaccaggctggccttgaactcaaaaatccacctctgcatcctgagtgttaaaattaaagatatgtcacaatgcctagcttcttgccagtattttactataagaggatgttatgagacttaagtaaaattaatgacttaaaaaatactgaggcaaaaggtgtagtggcacaggtgtgcaataatagaccagcagaggtagagagagaaatcctgacttttaggctattctggggttaatatagcgagttcaagaccagtatttaaaaaatccaaggtgtgctgggcggtggtggcgtacgcctttaatcccagcacttgggaggcagaggcaggcggatttctgagttcgagggcagcctagtctacaaagtgagttccaggaaagccagagctatacagagaaaccctgactcgaaaaaacaatatatatatattcatatattccaaggtgtaatagtattatagcttatcagtagagcatttcacttgtcagccggcacaggatcttggcttcaattcccagtgctatggaaaagacaaattcaggtaacattatgtttttatatttgtctattgctagtacaataaaactataaagtgtcaactttgtacattatttatttaaagtttattataaaaatctataaaattaaaagcaagggactagagagatggctcaggagttagaagtgtttgttgttcttgtagagatctgggctcagttcctgatggctcataaccatctgcaactatagatctagagtattagacaccttcttctggcctctgagggtgccaggaatgtccacgacacacagacattcatccaggcatacactggaacacatacatcttaaatggctgtatatgcactagcattaagccccataggtatctttacttagcttttacccagtccaaagtggtttcttccacattgctacccatttgctgctcgctcacgacctctccattgttttgaagtgatcctgtatgtgatttcagcatagcttagccttccctcatgctcagttagcagttagaaaacttcacttattttttgtgctctgtgtgtgtgtgtgtgtacttgagtaaatattctactgtggaggccagaggttgacttcaggtacctttctctattggtctttacctttttaaggcagggtctctgactgaacctggtgtgctgttttggttagactggcaggccatgtaacccacctgtctttcctctttagtgctggagttacaggcacatgtcaccatgcactgcttttctcatgagagtgtttggggtctaaatcaggttggcgtgcttgcatggcaagcattttacccactgagccatctgcctcatctcggttttcctgattgttttttaatgggagtaagttataccatggtcagtcaagctgtttgagccctattgactatgttgaaggatgtgctggttgtagaaagacttagcccttttttatagatcaggctttgtgagagtcagagataggaatatatgtgaagatactttataaactctaaactcaaaacaaaaatgctctgctcataactgggcatgatggtgctcactttcaatcccagcactcaagaggtagaggcagctggatctttgtgaatttgaggccagcgtggtctacatagcaagttccaggacagctacaactacataagaaggggtggagagaaagctctacacatgtaagatttcattattagaagtaaatggcaaattcctgtagacatgccaagaagtaatctgtgtaatgaacataaagcccacagtactgaaagcaccttgtcaccattacccgcagcatttagacatttgaagcagccgttgctcattccacgtctggcctgctttttctgcatgacttctcaaagttcactgacatctccctcccatattttcaagtttcttttatacccttggattaatttatgtagacttgaacttagataaagcagatagatgggctctttgtgctttatgtaagcattctgttgctgtttagcaatgattttccacatctgaagatcattttgtttctgttagaatagatcagagaaaaatacaatagttatgtgtttgggtcacctagtttatgtgctcttttggggatcgaggtgctctgcacatgctcagtgagtgctgccatcattaatatatatatatatatatatgatatatatatattatatatacacagaagccaccaagggctcgcatttgtcttcacgtctgtagtcactttgaaattttgagcattttaactcgtctgcctctttatttattgtgtgtagtgtattttcttttaaaaatatccttacaagtactgagctttggagggggagcaagaagtcatggatgtaggcccagtggtttctttagaaatgctaccattaaataaattctcttgtaactttaaaaggactggcttcctggatccactagacacagtatgagttctgaatgcttggaagtggttataagtctccctaggtagtttttttttatagcgctgggtttataaaccattgttggatttatatatgcaggattcctagcttctaggtagtatttatttaacagacaatagcacaaccatatacaccatggcaacaagttcaaagactggatgaactttaagaaccaacgttttaaaaaacactggaaggctgttggaacagtgacgaccaaatgaattaaagtttcagggatgcaaagacatttgtagtgggctgattatggacacatgctgaaggaaaaaggtaagccagagatgaacagaatcttattaaaagtgtagcgtagccgggcgtggtggcgcacgcctttaatcccagcactcgggaggtagaggcaggcggatttctgagttcgaggacagtctggtctacaaagtgagttccaggacagccagggctacacagagaaaccctgtctcgaaaaacaaaaaagaaaacaaaacaaaaagtgtagtgtatccctggcccacttcaaccactggttggattacagagatcatctttctcaaccctttttgcttaatgaagaaatagtaattctcactgtctaagaagatacattctagagttttaagatttttttatttgcaatattcagagtagaaccgtttctgtggatgtaaaatgatgaaaaattgtggtccatactcaaaaatcaaaagtaaactgtagaagtggattcagaaagttggcagcagacaaagacttaaacaacaaaaacaacaaagaaacaaacaaaaaccctgcagtgtggggctggagagatggctcaacagttgctgctcttggagaggatccagatttggttcccaggacctgctttgggcagcacacagctccctctctgtaactttgattccaggtgattcagtgtcatcttctggcctcaaggacaccggttacacacatgtggacacttacagataagattatttttaaagataaaacaaagtcatttgctgagaaaataagggaaaagacaattgtgatgactgggaatttctttgaagagctggaacccatagaagggaatagagaataggtcatctaggaagcagtaacacagttacgagttgcttaaggtctttcatccgtgttctttttcttgactctgcctcttccctgcccctttttatttccttttgggaaacagttcagttgagtacaggctgtttaaacagatccacgaggtcttaggcttctgtcggttttgtttgctgtattggtgataggtaatgggtggatccctgggcctctctggctagccagtctagcttaattatgtatctccaggttctagtgagagactctgtctcaaaaagcaaggtgggagctgtggaagatagagaaatgactcagcggatctgagcagttgctgtgcaggcatgagggttagagtgtggagcccaaagctgatgaaaaggccagggtggccacatatgtgcctgcaactgtaacttcagcatgataggggagtggagacaggggattgttaggtgtaatttctttctattgcttcctgattcatatattcttgaccatcattttggacctcagctgttgtggtaatccaaacctttatcacggagaatatgagtctgtcctgggtgcctgctgcatgtgtatgcatgtagtatagtatactgcaatgcagtgtagtgtagtttactgcagtatagtgtggtgtaatatacagcagtgcagtgtactgcagtgcagcatagtgcagtgtagtatactgcagtgcattgtactatagtgtgctgcagtgtagtgtagcataatgtacagcagtgcagtgtactgcagtacagaatagtgcagtgtagtatactgcagtgtagtctactgaagtgcagtgttgtgtagtgtactgcagtgtagtgtagtgtagtgtagtgattttcattaacttttggtcttacacaatatgaggttagagacatttcttagattcaaggttccaatcttctatgtttcctttatatggtagcagtgctttatctccttggttatggcataggttacaccatttaatggagtgacctttgactatggatatagtgcagtgattctcaaccaggagtttccagaggacagttgacaatagttggacatatttgtaataggtacaagtttgagaaggtgaggcttatggtatcacgtgggtagagtgggtagaggtcagagatctgacctggatctgacagtgtttgggggagtgaagaacagaattaatccagtcaaaaatgtcagtactgctgaggttgagcaagcctggtttggtggctaagcagtgtcatctttcagtgggttatgctggtactgtttctttctcaggaatcaaagcatgtaaactacagatgtctaagttggaagtattagaagcctaactgccaggagcgttttcagactgtgtgagaacagctcctgctcttctttatttccaggcttctgttctctggctatggagaaagcacgattgattcagagagtaagtgcgctctgttagataggagcgccagccctgtggaattatctctcaactcccatttcctactaggacacttgcttttgggggatggcccatgccagaaaccaggtcatcttaagtccagagcccagctgcattccttctcgtaggaagggagtttgttcaggggcactgttagcagtgcgtttagtcacaaacagtgtgtctccgaaggcctttaatgatgctggcagaagcatttcaggaggagatgcaaagctgtctagaacatgtttatatgaacatatatatgctagttctatgtgtatgtatacatatgacttattttctccctaaaagtatgttactgccgggcgtggtggcgcacacctttaatcctaacacttgggaggtagaggcagaggcaggcagatttctgagttcgaggccagcctggtctacaaagtgaggtccaggacagccagggatacccagagaaaccctgtctcgaaaaaaccaaaaaaaaaaaaaaaaaaaaaaagtatgttactgtccactgtaattagtagttaactttcattaatattttgtgaacattttattttttaatttaggggtgggagcaagacctggctggttcctcgcccatagtctcagcactcaagatgctgagttctggagggttggactacatagtaacaccctgtctcaaaaaaagaaagaaaaacaaagtagttataagttatagactttaaaaaaagttaaattgccctatgaacaacatagagcagagcttccaaaatcttttctccttgttaacatggccagagaaaaatttacacagcccattcatatatatgaatgaaacatttattcctagtaaataaaaaaattattttaaaaacaattctttggcatacatgtgattttaccatttatttaacatgaatgcaaggggctggggagatggcttagtggtaagagcactggctgttcttctgttggacctgggttcaattcccagtatccatatagcagctcacaactgtctggaactctagttccagggtatctgacactctcacacagacaaacatgcaggcaaaacaccaatctgacactctcacacagacatacatgctggcaaatcaccaatgcacataaaaataataaaactaaaatcatttaaaatgaatgcaaatatgcatgatagtgcaatggatgtgtttatttttatatcaaagtaaaccttggagtatttgataagcagagcatagaacatcttcattgtgtttcagaggtaattgacattttgatttataattgtcatgttcaaaatgctgatttgcataaacacatatgtagttcaaaatgacagagatatgtttagggtcatttcagaattgttggaaattctcttgtaattccaaatggaattttgtatgtgtgcgcatgtgtgtgtgtgtgtacgtgtatgtgtgcatgtatgtgtgggtgtgtgtctgtgtgtgtgtgtggggatgtgtgtgggttaaaacagcaactcaaagaaaagttgtatgttagaggaccaatgtcaggtatcttcctcaattgctctcagccttaatccttgagatagggtctctggcttaaacttgtagttgatcattttgagtagcttggctgtagtaagcctcagtggtccaccttcttctccctccccaacactgggatttttagatgtatgctgtggctggtgggatagaattctattccttacattttcatggcaagtgttttaccaactgagccatccgtagctcactccaagaataatttttaaagtcaaacattctaatataattcaatccaaagatatgctgatttgatatttgcatgatgagggatcatggtagaaaaacattgcaagccattgttttttataattaaaccattgcgtttctataagaacagaaaactttgtatgtataatgaaaagattacacttaataatgcacagtaatctagatcctgtccaaggtattctaagtgtttggcatgatggcatgtgcactttgtttcaagactgcagtgaagttccatgatgcaacaggagtgagtaccaccaattcatttttgattgttgcacctgagaaaattttccttattgccagcattttcatgatccccatgactcatagttgaagaattagtcgggagctacagtaagtgtaaactagtgaattttgaattatattttacccatacaaatttatctttgttacctttctccttccttccttccttccttccttccttccttccttccttccttccttccttccttccttccttcctccctccctccctccctccctccctccctccctctctttctttctttctttctttctttctttctttttttgagatagggtttctctgtatagccctggctgtcctggaactcactttgtagcccaggctggcctcgaactcagaaatccgcctgcctctgcctcccaagtgctgggattaaaggtgtgggccaccaccgccaggctctttgttacctttccattgtttcaaattttgtagacctctacctgttaaagtccattgttatgaattacattgttgatactattatagcttgccaaatctaattttttgtacttatatttattagcctgtgtatatgttaccatgtatgtgtgtgcttgatgaatgcaaaggtcagaaaagggcactgaatactggaactggaattataaaagagttgtgagctgtcatgtgggtgcttggatctgaacccaagtcctctgtaagaacagtaactgctcttaacagctgagccgtctctctaggccctaccctaccaaatctcaaaaggcttacttttttattattagtcctagtcattttcaactgaagagttgtgtatgtatttcagaagaataatataaataattgggctctgagcatctagctagttagaacctatccaccttgcctgctaaatcacagtggaaatcttgagagagttggaacagaagaacttaaaactataaagttctcttcaaggatctattaagacataaccacttataaaaccgtacttctcattagtgttagggaattttcattttagaactctaaagccatgtttgctaattatcttctctactaaacatagtccagaaagacaaagatttgtgctcccctctattgtatatgtggcatgcacatagaagaaactaaaaatttactgaatgaatttatgagaaatgattttctgtgcttttaagagaactgtctggcacatgtcaagtcttaagagattaaaaaatggctcttaattttttagagtttatatttttatttactgttttgtattaattattataacatgtgccataacgtgctagtggaggtcagaagacagctatggaagttggtcttttggcttccaacatgtgatccctggattgaactcaggttctcagacatgcacagtagcacattctcccactgaaccatcttgctggccctagactggccctttcccccattctcatcttgttctaatcaaatcatcataaatacagtcatttgacatttaaaataaataaaagtttgtatcaacacttgtagactagaatttggttgaattctaaaaaaaaatgtctttcaaatatggtacatctgttaactaatatgaactggtttttactatttcaaactaagtaaaaataattttattcagtgttatatgtttttaatctacatgttgtcttatgaataaatgtttctaaatgcagtttgggaactagaatttgaggggaacttttttctttagctttctggataatcacaaaataaagtggattcttaaaagtgtcagtggacctggtaaggtggaagtgttccagccgcagctcagatagtggaaactttctgcgaacaatttattttattttccttatcctacagaaatcactctaggtctgaagaatgcaagtttttaatagtgccctattaatctcgctagacacagcacaattctagcttagatgatttgtgacaggcagtcaactgttgaaagagtttgactttattgtgtgtgtgacagagacccattgaaaggctttaagtatgaatgccatggtcacatgttttaaacagtttctttatggttatactggagatggatttgaggagacagtattaaagacaatgagaataagaaattgtaatgggaatggagttctgaatgccatggtcacatgttttaaacagtttctttatggttatactggagatggatttgaggagacagtattaaagacaatgagaataagaaattgtaatgggaatggagttctgaagtagggaattgaatgtaggaatttagagagcctaaatgtgagatttgtgtaggagatgatattggaaggcttagatgattaaataaggaaaggaagaaactaatgggagtaagctagttgaaaattgggaaaagttgtgaatgacaggacttaaaaaaaaagttggtgggggagcgtgtgggcgacttttgggatagcattggaaatgtaaatgaaataaatacccaattaaaaaaacataaaaaaaagaaaaaaaaagttgtggtggtgcatgttcgtatatctgcagatgtgtacatgtgcacttatgtgtgagagcagaggtcaacctaaggtaccgttcctcaggaactatacaccttttactttatttatttattttacttattctttggtagttttatacctgaatcctccaactcatgcctaccttcatgtcctgcctttaacctcctgcctgcctgcctgcctgcctgcctttctatccccactgagtctaattagtactgcctgtgtgtgatgtaagaccaaacattggcttatagacaacataccatggaccatactccaaaagaaaattctccctctctatcttgttagtcctggttggtttttaattattaccatttgtttgtttgtttgtttgctttgttctgtttttgtcaccttgacacaaactagatagctggaagaaccttagttgagatgcccctccatcagatggcctctaggcaagcgtggttagttgatatgggaggatccagcccagtgtggttggctccacccctgggcaggtggttctgaattgtataagaaagcaggctgagcaagcagtgagaagcaagcctgtaagcagctttcctctatggtttttgcttcagttcctgccttcaggttcctgctttgagttcctgcctttactttcctcagtgatggagtatgacctgagagttgtaaaatgaaagaaattcttccccaagttgcttttgtaattgtgttttatcatagcattagaaatctaattaagacatttggtttttctcaactgggtctctcactgggacccagactggtagattgggataggccagtgagcccttgaatcttgcttgtctccacctccgcagtgctaggatgcaaatgtactccttgggctagagaccctttccctttgattatggtgctggagatggacctcagaaccttgctcatgctaggcaagtgttctttcattaatccacatcccaactttcaacttgttcagaaagagtcttgataattgtgcgttgttttatttggcttgactacatattaacttcagttcacaatttcatcctttcctcttcagtcgttgaattgtttgcttatggtctctagcaatggtcctttcttaacttgtgggtcatgaccactttggcaaacctctgtctccaaaaatatttacaatgcagttcatactattatatttatgaagtagcagtgaatgtaattttatggttgaaggtcaccacaacatgaggaactgtatttaaagggccacaacattagaaaggttgagaaccactggtttagaggaatatttatttccttttcaatagtttcacttggttagttttcaggtaagttaaggatgaatgtcttatataaaacatgttttctgagatagggatgtagcttagtagtagagtgcaagggtttgattttgatctcttgcaccagaagacagacaggcaggcaggtaggcaggcaggcaggcaggttaggcaagaaggcaggcaagaaggcacacgcgcacacacacacacacacacacacacacacacacacacacacacggtttattttttatgctttgactttgagtcatgtccttgaagttgaagatggccttgagttaactgtgtattggggattcctgtgactcccgattctcccgtctgtgctcttctcaaagattacaggcgtatgctactgttagagaaagaataaatcatctgtgcactgagcttagtgaggtgaaggagaggcttcttaatagcacttggctgactctggctaatgcccaaagaccggccagcctcaaatagaagatgtcactagcatggacacattaggcttatgcattccacacactcatccttaagtccttttcaggtctagccccaggttacacttggaacggatgagagatattgtcagactcgtaagtacagtagtgctgtttttttattttattattattattattttattttatttttttagtagtgctgtttttaaaaatagttgttacccagattcttctgacccacctgcagaattatgttttctctgtgaagcggacaggggactcggtggctgaccaggacttaagatagctgtgatcttgagctgctccccagagctgtcccttagaattatgttctttgatacagggatgggcctaatggctgtttgtaagtcagaattgtctctttgttatgggaatggagcctctttggagatcaatcttggtgaataaacttcgacagaaacattcttagcaaccccaaacttcaattacagtacaaagttttctttctcacattgtctaacaagtctggtggagtacaccaatcttccagtcctgctggaggcagcagtcctttagctaaattctttgttctgtaacataatatttcctaagcaagtttattagtaattttttttttcaaaacagtgatttttctctgtcgcccgggctgtcctggaacttgctcttgtagaccaggctagcctcaaactcagacatctacctgcctctgcctccagagtgctgggattaaaggcgtgctgggtcactatgtatatgtatatctttttaaatgggtatggggcacataagttctcagtatttcctggctcctaacttgtaatccacctgtttcagttctttccagtgttaggaatataggtatttccatggatcccagctctcaacacctctctctccccgtccattgactctaatggtattattttagcattggggtgttaaaagtagactagttaaaaatagactgagtgtgaagttgaaagggcttccagactcaggcctggaagttaaacttgttctggctctgttctccgtgattattccaagtttattttaatctgcatcttgccgttttatgaatgaagttctctttcattcagtccaataaagaaaatggccattaacacactgctaaatagctccagcttctggtttgaactaagttataaaaattagcatagtggcaggtgcttcaactgttatatatgccatgttacaggtaacacatagcatctttgttaatcagaacctactttctcggctactgtgaaggaggtaaaatctagatgagaatcttcactgttgccttttgttattttagcttattaaaattgataaattgtgaactttgccagtgtattttattatgtcttaaaaatttgaatcccaccgggtggtggtggtacatgcctttaatcccagcactagggaggcagaggcaggtggatttctgagtttgaggccagcctggtctacagagtgagtttcaggacagccagggctacacagagaaaccctgtcttgaaaaaccaaaaaaagattttttttttaatcacacgtgttagcttcataaacattgaactgtccctgtttggttttgtggtgaattaacaaagcacacttataaatctgattaaatgtggttagccttttagtcattctttttaaaaagttctcttccagccttcctctctgctctttcctgcccgtgtgggaggttagaggtgacctcactgagtcccccacgtcatttgtgaggtaggatgtttacctgactaacagtcgagccctaggcgtcctcctgtccctgcttcccaagtgctgggattctcggtgtgtgctactttactcagctctttgtaaagattctggaagaagcaactcaggtctctcgggcactgcactaacggagcccctccccagctctccgtcttccttttaacctcagtgacagacagggtgtcttatgttaatgtgaccagaagaggaatgattttgaaatttgttggctggctttttaaataataatattaggaaaatatttgtttctgagtgaagataatgggataattaactaaactggtagttttggaggcagttgttttggaaagtatctttgtctatttatttaacgtgctgtagtaaatttagtacaataggaagtagaaattcatccatcacactcctggtggctgagaagggtgaagagtaagacacagcaggtttggtgtcaaagggcttgtgcctcctaaatgtcccttcttgtcctttcttcacacaggcctcatttgtattttccatggttctggagattaagccccggactggcctttacatacgctaggggagccttatcccactgagcacatctttagctctcttttatttatgtctttttgaggtaatgttgcttaggctggcttcttgaacttgctgtgtagcccaagctggcctttaattcacagttcctcttcgttctgcacctccatgtgctaaaattcgaggcatgggccatcatgttcatttcacttgggcctcttaggacataatcattctttgagggctctataacctgatttccattcttgtaaaaccttcaatgagggctaagtttcaacatatgaatagggtgtctttgttatatgtaggtagagtatgtttgctctattccagtagcaccatatgtctgaagtctagagtcgtttcattctcatctaagtgagcataggcgagagtcaagatgctgttcatcttgaggcaagttgcccagctgtgaatttgtgaaattaagttatctgctcctaagatgcaagtttggggcaggcagaagataagcattcctattcctaaaaggtgagaaagaggaaagaagaaagggattgtaggtgttgcataaggaaatccaaagcccagcagtgtaaaatagtgtatcttaaggctcatgaataacgagttttactccacatcttgcctttcacaccccctggtgtagaatttgagcttttaaaactttggcagtcttggtgttaatagctctgctgggtgggtgcagcctgtgtggcatgggttggaatgctggtctgtggctcttccaggctagagtcaaaagtttggccacccaaacccttcttttgacaggatcttttccaagctatgggtttctgagcctgacaggaggaggagtacccataacttcctgaatgcctttgtggctatttctgttaccttgatggcttcatctctggcccctacgaatctgttaaaaaaatcgtcatagatctgtgggagttgctttcccagacatacattctcattctttacatcatggccaggaagaagctcccaaataacatgtttgctttccttttgattgtaaatttcatctttaagtcacttttctatttggatttactcggatgctgtcaagagaagccatgctgtggttcctgcttttgtttacatagttcatcagccagacatctaattttaccactcatgaatcctatttcctgtaaaacgtcaggataggactcagttcataatggctctttaccactttttatttttattttcattgctgtatgtggaacccggatcctcgagcatgctggactgttttctgctattgcacagtagtccttgcttctctgtaacaggctctgtgttcttcccgttggcagtgacatgttcctcatttctgcgacctcatcggaatgacctttactgttcatatttctatcaacatttcattcaaaagcatctgtgtaatctctgagaagacagaggcagtctgtgtagtgagcttctgtgcggtcgctttagaatcatccagaaggctctgttcatagcgacaaggctttttttacacacatgtctagattcttccatcttgtacctattacccagttccaaagttgcttctgcagttagatttatgttataacaacaactctactctttggtcctagcttctgtctttgtttgggctactataacaacatatgcagatgtgaaggctggtctgtataggtggtgctttcttgggctactataacaacatatgcagatgtgaaggctggtctgtataggtggtgctttcttggtaccttaccctgatagaccagttgtctacattgtttttgttattttggggaatattttttgagattggctttccatattttactcagagtgacttcaaactcaagcttatccttttcccacaccctggagagctaggattataggctcagcaccacagtgcttttctacttctatatattttcatttattctccctgccttttctttgtccatacatacatataattggggggacatgaagagaaacatttgatgcttagttgcagtcatagtgccctgtcccaggatgcctcagggtacctttaagagtaagagctaacatctttaagtggtaatataaattttaactctaggacacttaacatcaaaatagtactaaactatactccatgcctatatttaaagtttgctagtagtagttgctcaaataattcatgtatatttttttgtttgcttgtaatttttatgattgctcaactgtatctacatctacttgcatgccagaagagggcatcagatacccattacagatggttgtgagccaccatatggttgctgggaattgaacttaggacctctgacagagcagccagtgctcttaattgctgagccatctcttcagcccccaattcatgtattaataattttcaaagtggtgctttccttatcttctttggacttaagtgtagggagttttcaatactttaatcttcgtaaattgtatattgtgttttgtatgctgaggcatgtatatctcatgtctaactcatttgagttgcttggttttcagtacatatttacaagtcttttctagaaatatattttaaaaatgtttttggaaaatattgtaaaatttaagctcatacagatatattatagaatgatatggaaaaatttcatcctatggaagtataccataggatttaaagattattttacctctcaaatatagagataactggtccaaatttgttcccatatacataataaagtggcatgcctctttattgggttgatgttttggggaaaatcaccacagctctataataagaaaactacccataactagtgacggttataataatgaaaatgtcaggagttcatgcctgtcatcccagcacttggaggatagagacaggtagctctcccggtcaaccgagtagtctaaggccagcctgggttacgtgagctcgttaaaaaaaaaaaaaaaaagattacaatcccaaaacaataatagtaaaaggggtagttccatatgcatttttttattttttgataaccaaaagtatttgtctaaattgtagatcaaattttgtagcgagtaccccttcccctttctgttcagttagagaatagtaatgtatgctcaaaatagtaatatttgatttagttgatgtgaatcaaaaattggggagttaatgtttttaaaaactgacattcacttttaataagttgttagaagctacattcatgtttgtatggtacaagtaacttccatgtggggtggcatttgcttttgagaaaaattgtttttctttggggacagagtatctctctagtttaacttctggagggtgtcttagttactgttctttctcctctctgtgagaaatcatgagagagggcatcagatggtcccttagagtgtgttacagacagttgcaagccaccacatggatgctggggagggagcctggggcctctggaagagcagctggagctcttacctgctgagcatctctccagactagcattcttcttctcagtgagtgtgcaacctctgctaatggaatggtggtgttcacattcagggcgggtcttcctgccacctcaaacccctctgagaccctcccacatgttggaaagggttctgtagctttcagtcttgtcagcttgactataaagattgactatcacagacccgttcattattttgaaaatgggtctgactgtctaacacaccctgtctggaacttaatattttcctgccttagcctattcaatgctgggattatgggtgtgttccacctaacctaggtaataaaagtatttttattttataaaatgttgtacataaagttcaaggtttctttgtaccctctgatcccctttattcctctcattttaaccactggcctgaagtttatttgtattctgtgtctccagccaggtatggaagtacataccttttttttgggcggggggcaggggttcagggaacttttattgatggtattcaagagagtaggatgggggtctaggatgaaaaatgtgagggaggagatgcttactgctgggggtcgagttaggaaagggactcctctgcaactgagagcctctctcttgctctcagtgtccttgctggggtgggtggtccaaggtttcttactccttggaggccatggaggccatgaggtccaccaccttgttgctgtagctgtgttcgttgccataccagaagatgagctttacaaagttgtcattgagaacaatgccagccacagcatcaaaggtggaagagagggagttgctgttgaagttgcaggagacaacctggtcctcagtgtagcccaggatgcccttcagtgggctctcagatgcctgctctaccaccttcctgatgttatcatacttgtcaggtttctccaggcagcatgtcagatccataatggatacattgggagtaggaacacagaaggccatgccagtgagtttctctctcgttcagctttgggatgaccttacccacagcctcggaagcatcagtggatgcagggatgatattctgggcagccccagggccatcatgccacagctttccagaggggccatccacagtcttttgagttgcagtgatggcatgaactgtggacacgagctcttccacgatgccaaagttgttatgaatgaccttggccaggggggctaagcagttggtggtgcaggatgcattgctgacaatcttgagtgagttgtcacatttctcgtggttcagacccatcacagacatgggggcactggcagaaggggtagagataatgactgttttggccccacccttcatgtggccttctccatggtggtgaagacccagtagactctactacatactcagcaccagcatcattccatttgatgttagtgggatctcgctcctggaagatggtgatgggcttcccgttgatgactgcctcccattctcagccttgactgtcctgttgattttgccttgggtggagtcatacatgtagttgaggtcaatgaaggggccattgatggcaacagtctccactttagaaggcagccctggtaacttggcgtccagtatagccaaatctattcacaccgaccttcaccaacttgtctatgggacaagactgacacagctgtctctggaacagggaggagtagagagccaaaagtgtatacctttaataccagcacacgtggcagaggcgggtgatttctttgagttttttttttttttaagatttattttttattttatgtatatgagtacaccattactctcttcagatacaccagaagagggcatcagatcccattacagatggttgtgagccaccatgtggttgctgggaattgaactcgggacctctggaagagcaaccagtgctcttaaccgctgagctatctttccagccccattttttttttttttttgagtttaaggccagcctgggctacatagtaagacctgttttaaacacacacaatgaaaaaaaatttttatatggaaaatatatggggaatatttttttaaatgctttaaaacctttttgtatgttcttgtttttaggcatagatactcacttgatttaaatttagctgttttaataatgtcagtttatctattacatgaattcagacagaatccaaactcactgcggtcctcctgcctcagctcccaaatgctggtattgtagagcatgtgcttctatgttcagcaaatcaatttttgttttcaactacagaggatcagttacacttctactgtggaggatcatagtatacaagagtatataatggggtggagagatggctcagtgcttaagaccatttgctgctccttcagaggacccaggtttgagtgcatccacatgggagcttacaaccacctgtaaccttttctggcctccgaggactccaggcatgcaccttgtgcataggtttacgtataggtaaaacacacatacacataaaaaaaatcttgtggggctgaagacatggcttagtggttaagagtactagctgttcttttagaagacccagtacccacataaagacttaacactgaactataactctagctcccggggatccagtgccctcttttggtttccatgggcattgcatgcacgaggtgcacagacagaaacttgtacacttaagaataaatacattttttaataaaagattatgtgaagtgtgtttgtacagttcatagctaaacagtaatactgtggactcttgtattgaggttagggaagaacattgctggtgtcttcaacttgttgataacctaaatcacactggttttcttagcatttactgttatcctgaatcgtgtttagaaaatttccctgctttctagtgagtctctccaaacacgtttgtttacttgtcttcgacattttttaatgatacagcaatactataggtgttgtctttcacatgcatttggagtgtcatttctgttctttgtggagtccattactgctacagattatttcatacttcactatttatactattgataataaacagttagtacatacactctctccttcccttctttttttctggtagtgctgggggtcaaaacctaaggacttgcttgttccttctaggcaagtgttccatctctgggctacaccccgtgttgcatgtttttgctgtaactaataacgctgcttctgaccattggaaatatatgtctagtagtagacctgctcagcgttagcgtatatgagaatgttcagttttaccagaaaatgccacattgtctttaaaagtctttgatccccagtgctgcccccttcagcatgtcttcctgttgctcactgtccttgggttgtgtatgtaacatttgtatctacccgcttagtgatacatcacttcttcctagcagatagtaaaagattactttaaccatattccatatttgaaatttcattatttttttatttttaagttgtattttattatttcacatgagtatgttgcttgtatgtttgtatgtatgtatgtatgtatgtatatgtatatgtatatgtacatgtacatgtacaatgtatagcacctgtcgaggtcagaagagggcattagatcacttaggacaaaaattatagacttataatgtgaattatatagctgtcatgtgaatgctggaaattagatcctggtcctcttgtaagagcagcaagtgctcttaaactgctgagctaattatctggctcccagtttttctttctttctttcttttttttttttttaattataaatgtgtgtgtgtgtgtgtttacacagatgcaggtgcctgtagaggccaaaagtggaagttggatcctctgaggctgtagtcatggcagtttgttagctgcctgacataggtgctggaaactgaactcaggtcctctaaagactaagcacatgtttgtaaccactgagacatcttttttgccaggctttttattatttttcaattttaggtgttttcgttttctggttatgattttcctttttatccaggatgttttattgtctttgagatgttttcctagctatctttatttgtgtgtttgtttccggttttcaagacagggtttctctatgtagtcctggctttcctgggaaaaactctaggccaggctggccctaaacccagagatctgcctgcctctgcctctctagtatgaggattaaaggtgttcaccaccagtgtctggttttatttattaatttatacttcagtgttgaagatcaagccattcaaaatttcagcatagttagggaggaacttgagaggccccactgctgacaagggagctatttgttggtagtggatagctactgtgggagggaaagaccatcgaaggtgtggccagtgttggttgcccgtgtttcaatagctctatagctatgcacatatggtctgcattaaatggacttagtagactattttttaaaaaagggctggcgagatggctcagaggtttttttaaaaaaaagtcataaagttgggaggcagacatgtggagatctggggcattggagggggagaaatggggctggacataatcatatttcattgtaaacacatgaaattctcaataaaaattaaataaaagtatttctattttaattgtattgtcagcaaatatggttttcatgttactagtactttcaaatttgaccttaactttttatagttgaatattttattacttactgctgttgcaaaaattttcaaaatgtagtacatgttagaaaagtactgtatcctgggcttattcctgatcctctttagcttttacattttatttatttttatttatttatttatttatttatttatttattatttatttatttattgggtttttggagacagggtttctctgtgtagccttggctgtcctggaactcactctgtagactaggctggccttgaactcataaatctgcctgcctctgcctcccaagtgctgggattaaaggtgtgcgccatcactgcccggctattttgttatttttaaaagaagatttatttttaataaatttatacctagtagcacaattacagatagttgtgaactgccttgtggggcctagggattgaacctaggtcctttggaggagtagtcagtactctaaactgctaagccatgtctccaactgtactttttactttgtaattttgaagcagattctctctgagtttcttgggcttgctttacactctcttacacaggctagcatttgagtcatgagtctgagcctccttagtagtgggattacaggttcatgccaggttcagtttaaaaaacaacagacaattttaatatctcaaagttctgcttttctaaaatccatgagcggctttatgataatagcttttgctcactgtttttcaaaagattgcagatgagcagcagtcatctaaagatttgacatgtactaattattcacttccagtgacatcatttacatagctataggggggtggcttcaatatctatatctatatctatatctatctatctatctatctatctatctacttcaatatctatatctatctatctatctatctatctatctatccatccatccatccaatcatccatctatctatctatctatctatctatctatctatctatccatccatccatccatccatccatccatccatccaatcacccatccatctatctatctatctatctatctatctatctatctatctatctatctgtctatctaatctaacctatctaatccatctaatctatttctagctgcttgcaaaagggctcagttcctgttgctaggccttcttgaacacatgacaattgacattgtggaaggtgaatgttttgagagaatcagaagctatgtcttttttaaagacccttggaagttgatacaccctcccttctgctatcttatattaattacccatagagaacagttttcatatagggtgcaagaactacacaaagatactacaacattggaataattatgggccatcttggagtctagatagtcatgaagttcattttataaagtttttatatgttcttgaaaataatgtgtaatctctggttcttgggtataattcttatgtgttgttttggtcaagttctgcattctaatttttcccccttactacaatgtataactgaaagaaatatatgttaggcagtcttgcactgaatttgatgtgatttaatttttttacttttattgtgtgtttgtgtacatgtggtatgtgcacacatgcttataccaatgcatgtgcacacacatagaccagaggagggtgttgaatgtcctgctctgtcactgctttattcttttgacacagggtttctcactgaacttagagctagactggtggccagcaaaccccaacagttctccattctttatacccctaacatcattgaggttgcaggtacttgcacagccacgcccagcttgttacctgagtaccagcagcagaactcaggctcccatgcttgtatagcagccatctctctaggccaaagtagtagatatgccagttttgttatgtgtatataattaggtgctcagaagtcagaatctcatgctgtgaggtcatctttttcaggtcctccctccctccccctccctcccctccctccccctccctccccctccctcccctccctccccctccctccctctgccttgcacgtgttggacaagccatctgctatatgcattccacttcttgttgagtttctttagtatctgctgggtcttcttccattcactgaccatgaatctttgtgtatgtttgtggtttaagtttttcttataaatagtacaatggagatagtttgactttttcttccaactggaatgtttattttatttacattaatcatgattactggcatatttgaacttatttctgttactttataagacttttattttcctttttttcactctacccccttcttgaatttgactttttgttttgttttattttattttattttattttatgtatatgagtacactgtagttgtttgccttcagacaccctagaaggcggcaccggaccccattacaaatagttgtgagccaccatgttgctggaaattgaattcaagatctctggaagagcagtcaatgcttttaaccactgagccattactccagcctgaatctgacttttcttttaggcttatttttcttctgcttgaagcatgttctttagaactattttaaataagggtctattgcagtaattgctctttttcttttcttaaaaatatcttaatttcctcctcatttctgagtcataatttcaccagtatgtagaaatctgggtagttgtttgcctcctaagtctattaaagatacccttttcttacttttctgctgttgttgagaactcagttgtcattataattgccattactctataggtggtatttttctttctggctgctttaaagtctttttctttttcaccttttgtattttccctctcaccaaaggtaattatgttgagtaatgaatgcattaattgacttgattattgtcatagttacttttctattgctgtgataaaacacagtgacgaaagcaatttataaaaaactgttcaggggtgggggcagtgggggtggcggggatggcggagatatcagcagtggagttggtggcagcacacgcctttaactcctagcacttgggagacagaggcagggggatctctatgcattcaaggctagcttgggttacaaagtgagttccaggacagtcaggactacccagagaaaccctgtttcaaaaaaaccaaaagaaaaaagaaaaaaaagtttagtttggcttatgctttcagagggttagaatccatgatgtcggagcaaaggaatagctgagagatcacatcttgacccataaccatgaggcagagagagagagagagagagagagagagagagagagagagagagagagagagagcgcgcgcgcgcgcgcgagagcgagcgagctagcagcactgggaatctcaaagagtctttttgaaatcggaaagaccaccccaagtgatgcatttagacagttctaccagctgggaaccaagtgttcagatatatgaaccatggggataattttcattcagactatcacaattgtggttatgatttcacaggatattgaaatcttgttatgtaagttaaatatataaaattttatttgctaattatgcctaagtgggaaaacaaatgtaaaagtctgcttttaaatgagggataattgggagttcttgtacatgcgcctttctgtagggcaggttggtagggagctcacttcatggttgttgaccctccagatgtgtttcagtggagatccactttatctggacgaatattgcctcactggttgcctgggtagtaatgcttgattaaaggattaagccaagagcctggtaggtttatattatggagattgtcacctattaaggaagtaagaggattatcatggaaaggttattttatagttcaggttttaaaatataggcaaaggaaatggtcattgtgtctttacctctgaattcggtgaactgtctgtactttgtctgtagcctagcaggggcaacctgttgctcctggaccacagtctcaggcacattgctccaggtaataaaaggtggttgttaaaggcaattggaaaggcagtgtaatgttactggtttattctttcattcaacaaacatttattaattgcctttataaaacctcctaatcaaaggataaaacgacttttgagaaagatgtctttcttgctaccatggaacttaaaatgcaagagtgatatgcattaaacagtttatcatgtggctaattatatttgttacaagaatcataaacatcctggggatgtggcttaattgatatagagaacttgtttagcctccatgaagttatagacatctgtagcactgtatgaaactgggcatggtggtacatgctggcaactttagtaattagggagtagaggcagaaggatcagaagttcagggtcatctttgattgcaatagagagtttgagtctagggtagatgagacactagagaaatagagaaaaatttttttgagcaaaataattgtatttgagagttttttttttttttttctttcatggctttcttttcagtgagcgtatattactttcacaattggggaaaagtgaattaaacttcaaaaatacgctatattacaaatatctttagctatagtagaatatagagatatctttggacataatagaatataaagggcttaggttgcctgaggaaaaaggaaaaagaagcacctttgaattatctctatttaaagcaaaatatgatctactataagatctcaacaaatagggagttatttagaagaaagcataacattaaacaaagaactgtgaacaatgagtagtttgtttctattttcactcagaaattctttgaaaggtcacagactaaaatgtgtgcttctgtgtacattctaatgagtttctaaaaggcctctcagactgtaatggaagttaggggtgatgttacatttcacttagtgtacacacaggaagaaagcaaaggaaaaatagctcatgaggaggaagaacaccccgtatgtcatctttaggtattaggaaatacacacattaaggaggtgtcttctctgctggagcacaggctgactgatgaaaagcaccggctgcttttccagacgacccgtttgattccagcagccacatggcaggcaggcagctcgtgaccatctttaaactccagttctgggacatctgacttcctctcttttggcctccaagggcattgtatgtacatggcacatagacacacacattattattaatattttttaaaaaattaaactacccttgactattgtagcttatattaagcacatctcccagaagagtctgtgttattggttacgtattacatatgtaatagtcctttatgtagtactcaatgaacttaaaattatgaagtttgtttttattttaatgtcattttaagtctataattggcaatcaaacaaagctattattcctttagcaaagttaaatgaaaaaggtgagctaactgcagattgttaagccaggaatccatgatacaggatatggctaagctaataatatatgaatcactaaagttgggcagagtggatggataagcctgaaatttaatcctgagctcataaaacaggtattacataattaccatttttaaaaccatacagatataaaccatctgtaggcaaaggtatttgcatggagccaaactagttttgccaagaagcgaatttccttgaattcacttttccttgaaagcttgagttttagtttattcttttcctgctattctgaatagccacctaagttttcatgcacagaagcattaagtctttttttttctttaaagatttattttatttatatgagtacactgtagctgtcttcagacacaccagaagaggaatcggatcccattacagatggttctgagctatcatgtggttgctgggatttgaactcaggacctcttgaagagcaaccagtgctcttaaccactgagccatctctccagcccagaagcgtcttatagaacctatttatactcacttcacccctatttatgcaaccactattgaaactccaaaagctaattcccaaatgtcttttcagcaggagcccgcttcttaccagcctaaactacagttgtattatttgcacagaaaatgctggctccattatttccttctctccctctgtaaagttcaaaagccattaggtaaaacagagcaagtaggcatctctgtacatgcttgggtaaaagagcctgatcagagtgaaaaaggcattgctgtggaggagagcagcataagacagaaagagtgtccacaattgccaggctaggcagagtcagacaaggagagactactctgtagagggtggccagacagaacattagttcacacagggaggaggggacaataggccacaggatgacaaggccccagtgggataaggatagaatttataagaaagatatccctagataggtgtcagtacctgagtgggcctagaaggtgctggtgggctgtggccagagcaggcgtgtactagctctagcaggtgcatatggggaagcagtgtagcacaagcagagtgtccaagcctggcacagtaaaggaggagggaacaagagagtccagggggacagtgtgctgctgactgagccgcagaggcgctcgccacctcagctgggtttctgtaacccagctggtgaagttaaagttcataaaattaaaaacataagatggcttcattcttttggagttctcttggcttccttttccttactcctttatttaatcccattaattgtctacttttcaccctatggtcaatttggagtttaattcagcattttcttctcaaaataggctgcttttggattaagtgattcttcagttgggtggtttagaacattgcctaataggattagatagctgcatcttatataactattaaatttaaataaaatcaaacatttgattccttatctggactagccatactgcagatatttacaatagcaaggtagagctggctagtggccaaggtactgatcattgcggatacagaatatcattgcagaaaattctattatttgttatttagaatatgccacagttcttcggacttgtgcatagtcctgttgtgtatgtctattccaacatccctgttgtgtgtatgtgtgtgtgttttcctatataagccttctgtgttttcattgagagtgcattgtcatttgggaagattgttcgttcatcaggctttctgtttcctgttgtgtgtatacgtatactcccctagtgttgtgttaagtgggtcctatttgtacacacatacacatctgtgaatgtgtgtaagtttgcagctttattcttctggattttctattgattgtatggaagggctggggaaatttagatttacaagctgtattgttgttgccttagttagggtttccattgctatgaaaagacaccatggctatagtaactcttttaaaggcaaacatttcattgaggctggcttacaattttagaggtttagtccattattatcatagctggaagcatggcagcacgcaggcatgcgtggtggtagaggagctgagaattctggcgtcctcaggtagctaggaagctctcctctgcaatgggtagaacctgagcataagagaagacctccaaagcccacccgcacagtgacacacttattctaacaaggccacacctcctaacgtaccatttcctatgggccaagtatacttaagccacagtttcacttgtgtgaaaatggcacagttgacattttcaccttctaaaattatctttttttgagttttcaatttttttcctccatagtcttctttgtttgttttttgtttgtttgtttgtttttttgatgcatggtttctctgtgtagccctggctgtcttgaaactcattgtatagaccagactggcctcgaactcacagacatctgcctgcctttgcttcctgatttaaaggcatgtgctactactgttcagcttcctcctctttatggtcagttatgtaattctatagtttctgtgcactgccttccttacatctgaacctcatcccctctgtgtttgttacttctctgctgtcaagctaatcctgtcttactgactacaactgtctggcatgtcacttgttcctcccacctttacttgcaccacctctcaagtggagagagtcgtaggtgtggtctcacagaggagcctccttggttctctctcagtatcaccagggtctaagaatagtgcattgatttctgatgcttacgtacagaattatgcttttgagttgagatgcatttttacgcagtgaagttgaactcatccacaggttagtgtaaatgtgagcctccaaagaatttgtttttttgtgagatgaatttctaggttgtgttgctactgccttggttgtgtggttggttatctttactgcggtcagttttaactctgttcctgattttatagtttattgaatttgaacaatttgctcttatttcctattgattagtgctttgcagcctagattttctttgtctgtatttcattcagtgcatacactgaaggactgtgtgtatttcttgcggaattctcttactttgtagctagagggacatagctctggttcctaggtcatcattcttcttggaaaacactggatagaagatttgactttatagatacaggtttatggcttacagaagggaaactgaaaattaaaactaacaggccacttaggatttgctctaaattctaggttgcattgtacattagagtttgagatataaatattcgtaggtatggttgataaagatttcctaaaaagttgtgattttcactgaaaatacatgtttagtcttactatttttcccttttagcttccaataaagacaggacagcagaacacacataccaaagtcagcaccgagcacaacaaggagtgtctgatcaacatttccaaatacaagttttctctggtcatcagtgggctcaccaccatcctaaagaatgttaacaatatggtgagtatctgacttacatgatctctgctttgtggtgaatttgcttcattttcgttgtgattttggaagtttggagagcatgttttaaagtatggaaaacatattcttaggctttcagacacaagttatttaatggacaagctcaagagtaactttgaaattttgacttcaggtttttattcccgttgaagcttctcttattaattactctgttattcgggaattagaattttatatctcttttgtattgtatgtaaagttatcataatatagattccttccctccttccttcctaagctatgccttcagctgggtagtacaggctttgttaatatgctttctgttagctgcttccttagatgtatttattgattgtccctgtccaaactacgtggtgaaaaagagtatgacctttcacttctaaagtgagattactttttcccgctgtattaaagagttttctctgccttccccaaatctgaagcaggctgggtagtgttagcgactcagtgttagagagcagcgttctctgtatcttagcagtcagctgacttcatcaagggagtccactgctgagagctgccagtccttcttccatccttcccacccggccgcctctgtactccaacagcttttaacaatctacttcatacttctccagacagtagatggacgtctccttctctcagtttgtgctgtttgtgctgagctgtgaagcagccacttttgtagattctgaggattagttttctagtcaggtcagctttggagaatttccttttaagaaggctgttcaataccagagttacagaactgatgaattgcgggtatgggcagttcaatagattcttttctttgctaaatttatgctttttttttcttctaaaaagcataggacgtttaataaactgtacagtgatttacaggatgcacttcctgttgtgctgtagctcttcgcctgctgtggagcgcagtattagtgtttcttctgtctgagcatgctgctgccgtcccaggcgcactgctgtagtttatatttgcaatcttctttagaactctagggatgttggcattcatgtagacctcactgaaaagttacagggcctgtaaggtggctcagtgcataaaggtaattgtcactggtcctcggagcaaactggttgaaggtgagaaccaacccctgaaagttgtcattctctgacttccacatggacactgtggagtgcccacagccatactagcacatacactacatgtacaataatgataaaatagaaaacagaaaaatttaaaagaaaaaatatataatgaaagtcagtttttttttttttttttttaaagatttatttattggttatatgtaagtacactgtagctgtcttcagacactccagaagagggagtcagatcccgttacagatggttgtgagccaccatgtggttgctgggatttgaactccggaccttcagaagagcagtcgggtgctcttacccactgagccatctcaccagccccgaaagtcagtttcttgttagtaggtaggtgatacagggttcagtttgaaagtaatgaatgcttaagattcactgtaagcgatgtagtagcattctgtttaataagaattaagaagttaattgttttgcaaaggaggcgatagctaaatgctaattcaggacaggtacaagcctcttaactcatgagttattttaaactctccttgattcattatttacccccacacccttcttccttttctttttccttccctgtcactcccccaccccgatagagtgtataacatactctgggctggcgcctcaaacttacttccctagtgctagcattgaacttctaatcctcttgccactatttccatagtgttgggactaccaatgtcttttcattatgtctggccagcttatagatattaaaaaatataaagcatcatgttttactgttatatagctaacagcaggcttttataaatacctctgtttctttggtttttttgagacagggtttccctgtgtagccctggttatcctggaacttactttgtagaccaggctggcctcgaactcagaaatccacctgcctctgcctcccgagtgctgggattaaaggcgtgcaccaccactcctggctaatatctctatttctgttagcttggaaatttatttttagggtaaaggaagaaatgatagatttaagtatcattgaatgtaaaagacaaagtggaagagtaatactttttcttgatcttcagtcttttatatttcatgtgtgctaatttgtagtgaagtgttaatcatattttctgaatatattttttagaggatatttggagaagctgctgaaaaaaatttgtatctctctcagttgatcatattggatacactggaaaaatgtcttgctggggtaagtaaattcattctaaagaggcaggttttgtgaattcagtcttgagaatgaggtggaacactgaaaggtcagtgtgggacactgaggacacactaagagtctttgtggtagatgaatatgaattctgttaatacagatgacctgatagctcagtctagagaaaattattctctcagcttttataaatcccatagatatttaagtttacttaaaatgttaagtttgagccccatttctgtctcttaagattttgttttaagaaaatatttttatgaaggaatcactattccatttaattatttttcagatatctttagacccgtgcctttgtatagttggaagaatgtggtcagcacaccaagggtagtcttactttcctgccttcatgatatggtttcaactttatacagaccccgacaatgggatctatcctttctttgtttgaagctgtccttctgaggatagctactaccagaagatttgtgtaaatgtgagcattttcataggcatgtggaggagtcattgagtaccacgcagttctttcccaggttgcctctgagtcgctgtgtctacttatttcaattaagactttcactttttcaagatgttttctgctgcatacattatttatattcttccctaatcttaattttccccaaacatgggtaggtgtttatataaatacatgatgaatatttgttttaaaattgtctactccatttatgctagttagcttatttctttttattcagcacagaatacagaattttgcttttattcagaatagcttttctcttatgagttctctacagtaaatctagagggaagacacttaaaacaatttttgaaaaggtattttgtgtggatgagtgttttggctgcgtgtgtatgagtgtgtgtgtatgactggtgcctgcagagccagaaggggcatcagatctcccgggtctggagttactagtggttgtgaagtaccacgtgggtgctaagaccatattcaagtcctctagatgcttttaaccactgagccactctctggccacaagaaggaagagattttaatgtattaggattgatgatgtagttgagaagagaaagaatgtttagaagtgacgaggattatgcagggaattggaaaacaaaaacccaaaacatctcactcacacaaaactttctctagggaagtttgtgagccagaaacaaaaaaaagtatatgatttatttatagtttttaaagtttaacttaaaatgatttaaatttgtgtgtgtatgcttacatgtgggtctgtgcttgagtttaggtgccctcaaagggcagatgcttccgatccccctggagctggaattacaggtgatggcaaatcataatcctacgtgggtgctgggaactgaactcaggttcaagttcatgcaaggagagtgcgtgctcataaccactgagcagaatctccagctcctgtaatatttatttttatttatgtgcatatggggtacatatatggaggtcagaggacaactcttggatagtcagttctcttcttccactttgacaaggattttagggattgactttaggtcgttggttttacacagtaagtactcactaatggaaccatttttgccagcccagcataatacttcaaactcttaaaattaaaaaagtatttatctattttattttatgtgtacgagtgttttaccttcatttatgaatgtttatatgtatgtgcgtgcatgcctggtacatgaggaggtcaaaagagggcatcagatcccttgaaactgcagttacagatggttgtgagctactgtgtgggtgctgacaactgaacatgggtcctctgcaagaacaagtgcttcaaaccactgagccacttctctagtccctgatattttgaattctcattgatctctggccatagtccagaattacagcatttgtaagttttatacttaaaatggtaggaataccatttatactaaaatggtattttagcttggtgttctctgttaatctgtgaaatggagaacaaaaacactattatctagtggggcggaattgggagtttagacattgaaaccttggcagtgctcttagtactttgtaatttttgctgtatcagaccaaccatgattgagttgggaagaatggtgtagtgcctctttaagtttcacaactttttcttcattaacaattttaattgagaggtaatgttatcttggagagtggttgctgatattctttggagatatcctaattacaatgatgccatatttccacagtatacctgtatagtttacatattactttgacttggtctgctttgaaattgtttctttttggtttctttttttcttttttcttcctttttttctttctcttccttttttgcttgtggaattagagattgtattcagggccttgtgcgtataccactgagccacagccctagaactatgtcaggttagtgagttagctgctgcttaggaaataatccaataatctgtaagacagttgggccagttttaaaagtaaatttcatggaatgtaaaaatgagatatgtggagtatgggggtggggtggaaattgctccagaataaagacactgaaggacagaatagtcatgctgtgacctctgaatcacttttgggtcttcagtgaataaaaagctatgaagacattttcagtgtcatgcagtgtggattgggtatttgatacatggaatggtgttatttcttagaatgttaattgtgttgaaattgcgttagagaatatcctcattaggataagctgacatacacaagggctgagatattataatgtttataatgtacttggatgtgatttagctcagcattatttgaggtgcatagtacatgttttggtcagattatacagaggccatgtgctccctacctaattcctctggaagttaaatgatatagtgtactcacagtgaatatgaataaagtttattgagaactcacagggaactgcaagtttctaaaaaggaagggatcgggctagtgagatggctcagtggttaaaagcgccaactgttcttccagaggtcctgagttcaagtcccagcaaccacatggtggctcacaaccatctgtattgggatccaaggccctcttctggagtgtctgaagacagctacagtgtacttacatataataaataaatattttttaaaaaaaggatcaactgataaactaggaaacctgtgaggcaagatggagggtcgggcttcaatggtaaagatagggtgatgatgtcttctttactgaccaggtataggacgatgtggcaaattcaaggaaacgatagcaggtgttgaattcgagtgatagctgtgtggctgttccttctattccagcttctctgtgtgcttgacacttaactgtgaatgtttgcaggtaaaggaaaagccttataattatgtgattatttccattttagcaaccaaaggacacaatgagattagatgagacaatgctggtcaaacaattactaccagaaatctgccattttcttcacacctgccgtgaaggaaaccaacatgcagccgaacttcggaattctgcctctggggttttattttctctcagctgcaacaacttcaatgcagtctttagtcgcatttctacaaggttagtgcctaaagcatgtgggaaattaagtaaaatcaattttagaattcttgtctgcataagagtggttaacagaatgacatctgggtttttgaaggaattctatatattgatttttcttgacattttaattatataatattagaaattactttggagatagtgatatttagacatgaatactattatgaataatgttacagacttggagaagatatctccatggccatctctctctctctttctctctctctctggtgcccgccctccctccctccctccctccctcccttccttccttccttccttccttgtggtgctaaggtttgaattcagggtcttgtgtatgtaggcaagtgctccaccacagagctacactccagccatgggtaggcactgtaaacatattcttcagattaaactatgcaaataggtagaatagttgagaagaatagcagacattctaatgacctaattctcatggctcctaaatttccttaaaaataatctaagtaatatagaaacaaaaggaagtaattacaaagttggaaagtgaggtgtgttttagtgactatgaaagtcccatttactgaggattcacagtttatgccatgtctcacagtgataatgaaaggttgttacaggcaaataaattgatacccctcaaaaataaatgtattgtgctggtatagtggctcacaactttaaaatctgagcatttgggagcagagacaggagttcaagaccaatctttaatgagtttgaatccagccagggctgcacagtgagactccgtctcaaccccccccccaaaactccaacaaacaaacaaacaaacaaggaattgtgtcaaataatggaatttgacacatttccaaatttctaagttggataggcctcaagaactacgttagtttcattatattagttttcagtatttctattttaactatcttgtggaattttaaaatactgtacatttaatttagtgatttcaaaaatgaaatagtcaggagagatcgcttagtagttaagagcacatggttctcttgcagaggacctgagtttggttcccagtgtctgcatggtgcctcacaacctaaaccgtccagtttagggaattcagtaccctgtttggacactaggcacacatgtggtgcacatacatgcacagtacattcatataagcaaccatatgcataaaataaaaacaaacttttaaaaatgtaatttcggtgaaacggaaagtaaagaaaatgttggctggggaatcacttggtctgtaaagaccctcacagagcaagcctgctggatgtgggttttatccctgggaccaagaatcactaccacagtgtcgtcctctgacctacacctcctaacacataaagcttaaaaatgaaagaaaattattgtttaaatatttcctgatcagtcaaaatcataaccatgatattacagatgagaaaattagtttaaaatggtgctcagtgggatgaaatgataaataaattgtgactgatttgtcttcatgaaaatgatttgcctgtcttgtataagtacactcatatgggttcttaattatgataaaataaaaagtataaaacaacccacgtaaagatttagtgactaaaagacaaatacaaacagagaaaagtaatcctttttactctttggttcctctctctgtcacttactagagttacacgaatgggtttctattatgttcactcttgtttcccagtgaggtgaatgggaatatacattaaaattcaagaatttatggcccgctatttaagaactcacttgcaataaaaaaaaaagaactctttttaataaaaagttgttctataattatgatggtaggtgacaatattctatgatattgtatcctacagtcttaataaactatgaaaagaaaatcaaaactttatttaatgatatatcattggttaaggtttatataacagaacatttccatgatattttttttcttggtttttcgagacagagtttctctgtgtagccctggctgccctgcaacttgctctgcagacaaagctggccttgtagatttattttatattctgagtcaccatacactgatggagccaacaaggtggcaaacagggaaataggattctgggcggttatacaaagtaaaacactttcatttaggtcagtacgagattagttttattacttggaaaaaaattcttaaaaagaagataaaaagcaatatagaaaaatacagtttcttagtgtatccatgcaggaattgttaatgtttttatagaactatatttccataaagtttttgagtaagtgtattattctgtaaaatagaacaaatgtgccatctttgaaaaccctaaagttgggctggagagatggctcagcttttaaggacactggctgctcttccagaggtcctgagttcaattcccagcaaccacatggtggctcatgaccatctgtaagggcatctgaggtcctcttctgctttgtaggtgtacatgcagacagagcactcctacagcaaaaaacttaaataattatttattaaaaaaaaaaaaaaaagaaaaaccctaactcacccaaagctgcttccatgaagtttggcagcattagttaatttataggcaacttttgttgattttccaagtctagtagtttgttatctgttgccagaatagaagttgtggctagagtttcattgacttcggtggcagattagccagaaatgggatctatgagataaatgcttaatacagctatgtgtcttgatttacttagtaccagaattaggaccactcacctaacagactgctgtgatggtttaatttacatgggggcatcttatgatactattcttatagctactattcctttatctatatattctgtatatatagaagatttgagccagccctccctccctccctccctccctccctccctccctccctccctccctccctcccttcattgttttgattgtgtagacagactttgtctgtgtagctctggttgtcctgcagccagctctctgtagaccagactgacctccgtctcagagatcctcctgcttccttctcctcagggctggattaaaggtgtgcaccaccaccacccaactacatttcatttataattacgatcataaaaatgagttgaactttaccagtttctttgtcagcagatgttctttttggcggtgggcggggcagtattggtggttgaacccagggtgtcatatgttctactactgagctacagctgtagtcttctttttactttgaaaaagggcttcaccaagcttttcaggcaggcctggaactcagtttgtagatgaggctagccttgatagtgtcctccctcagctctcttagaagctgtcattacaggtctgtaacacccacaacagctttagttgttgtttgtttgtttcatttattaattgaaaaaattataacatagctttattctgctgaactgtcttatgctgtaggcttattacactctttagagtttaattttatattgttttatatatgttacttgtgtgtcagtgcctgtggaggccagaagatggtaagggatccatcccctgaagctgagattacaggtggttataagctaccatgtggtgctaggaatcgaacttgagtcctctggaagaacagccagtgcttttaagcaatctctccagccctcattgtactttcttttcttttcttttttaaaaaagatttgtttattattatatctaagtacactgtagctgtcttcagacactccagaagagggagggcatgagatctcattatggatggttctgagccaccatgtggttgctggaatttgaactcaggacctttggacaagaagtccgttagctgagccatctctctgcaccccccctcctcccattgtactttcttacatagaaaattgtttttttataacagacttgataatacttaatttggtgatttatttatttttgttaaattcttttagagacaggtttcttaagtcatccaatcagttgttagatatagatattatctggactatccaacatttcccataaaaattttacctacttgataatctctggatcgattattaattggaagtgggaaaagtaaaaacattccccacgcacgccccacgccccctcttttgactagtgaggcagggtcgcactgtgtagcttcagctggcctggaacttgctgtgtagcttggctggccttgctgtggcttgcttggagctcatggatctctcctttctgtctctgactccagaatgctgggattaaaagtgtgtgccgccacatctggctggagtctatcattctttatttttaaattggacatactgtatttctttatgggttttgtgattgtgagaattaaaatccagagccccttgcattaaattgtgctttctctttattttcttccttctttcctctttcccctctcttcctccctcctttctcaagaccaggctttactttgtagcccacactaacagtaattctcctgtgttctcctgtctccagtttcccgagtgcttggatgatgggctatgataggcatgagccactatgcctagctgaaactagattcaaatgtaaactatttcatttttttcctgtaaactgtttttttttgtatatttatatcattttaatataatataatctaaacagggaatgcagggtagaggcctgttccaccattattcctttttagattgaagtgattctaaaagttggaaaagctcacctgtgagtttcttctctcagtaactactgctcctcctgcccccatgtggattgcagttgtagaaaaaagaaaagttggggcaggggcagtaggatggctcagcaggtactggtgcttgctgccagcctggtaacctgagtttcagtccctgagacttgtatggtggatagagaggacagttctgtttttctgattgataatgcatgctcacatataataaataaatgtgattttttacaaaggaagaaaatctgatactccaattgtcccagtttaacagttatagtgtctgattgtacagctgtatgattttggacttgactataatagttgctaatttccttgtcttcaatttcagggaaacctaaatacatttgaaaatatgctccaatcttagaattaactagtttttccagaagagccatggctaatgtgagaaatacaattcagacctcagtgttaaagatacaaatacaaagtttactggaatatcactttttgtcatgactcttaaatcggttgaattatttagttttttttaaataaatatgttcttattttatgtgtctttcattcataaaccccctttctattaaatcagaatcttggactgttctaagacttaaattgataaattacttttgatttttacttttcaggttacaggagttgactgtctgttcagaagataatgttgatgttcacgatatagaattgttacagtatatcaatgtggattgtgcaaaattaaaacgacttctgaagggtaggtttaaatagatatggttatagtaaacttgtttgaactggatatcaaaatagattttatagtgtgcatgttcttgtgaaatggccagaaatgtatgtgcttgactggattttgggcatttgaaaataatacagcagaacatgaattttattttttgagacagggtctctctgtttatccctggttttcctggaactcatttttgtagatcaggctagccttgaactcagggatccacctgcctctgccccctgagttctgggatcaagaagggtctttactgtcatgttcatctgagaatatggatatttaaaatcttggcagtaggaagttttcttttttctttttccttcctcccttcccttccttcccttcccttccctttccctctctccctccctccctccctctctttcctttttttttttaaagattttttaaaaagttattttatgtatatgagtgctctaactgcatagagacctgcattccagaaaaggacatggaatcacattacagaaggttgtgagccattatgtgcttggtgggaattgaactcaggacctctggaagagcagctagtgctcttaaccatctcttaaccgagccatctctccagcctgggaagttttcttgagctacaagttttgcttttaataaggagaatgttatccttttagaatttgatcccttaagtgactctaggtcgcagaatcaatttgtttggttgtccaggtgcttgaagaacatggccttgagctgctggagtagtgtatgcctgtaatcccagcacatgggcagatgaggaaggagagttcaagaccagtttgagctatgtagtgagttcagtgtcatgatgggctatagaggaagccctggtctccagaaaagtaacaaacgaacaactccctccacatcaaaggacggagtgaaaatctcaaacagtggcttaatttctgacctgagagactgagcttgagttatgtaagctatgagaagttttaatagttgtgtaatacagttttcaaaatacttaatattacaaaacatgctattaagctggatgtagttatatacacctttaattccagcacttgggagcaggagcaggcagatcttgtgagtttgagaccagcctggtctacagagctccagaacagccaggtttctgtagagagacccaatctcaaagaaacaaaaacaaaagcaatacagtgacagaaaacttttttcttttttgcctttaatttagtacacaaattttacatgtgttcatggaatcttgaattctttgaaagtcagttttaagagaaaaaagtttatagacatgagtgtctactatttaaaaagtcagaaatatcccagataacctaatgataacctcaaggtcttagaaaagcaagaacaatccagattcagcagcaggggacagctggaagtaacgatggtcagagcagaaatcagtgaactgaaggatgaaagaactgtgtagagggaaacagagagtcggctcctggaaagttcagcaggattggcaagtcctggcttgtcaagactccatcaaattagagatgaacaagctgagttaactacaggtcctagtgaagtgcagagaaggagggtatattctaaatagttggtaaacctagaaaaaaaatgggtaaattcttaggtctatcaaaactgagtcagtatggtattaacagcctcaatagatgcatagcaatcaaagacattgaagcagctataaggcaattcaagtagtaataaaagatctcccaacaaagaatgcaagagcagatggaatccactgccgaagtcaaacaaaaatttcctttacagaaaaatagcaaaggaaggagtactaccattctgtgaagccagcagtacagtgataaatacgcaacaaaaagaaaacttgaattctcaacagaactccagaagcaaaactccagaacactgtggtttccttccagggatgcagtgttggtttaacacaacatagaataaaccatagagtaaaccagcatgtaggtttacgagcagaaattacccggtaatcacaggtgatcagaaaaggcccttgcttcagaagttcagcattcctttataataaaagctcagcgggcataaatgaatgcaccaaaacataaaaaaggatgcatatgaataaaacccatagccaacattatactaattgaggggaaaataggagaagttcctccaaaatctagaatgagattaaggttcagactttgtgtggtgcagacttttaatgccagtactcagaaggcagaagcaggtggatctctttggtttaagcctagtttgatctagttccaggccagctaaaaccatatattgaaacactgcatcaaaaacaacagcaaaacaaaaacaaacaacctaaaagtttccagttctcttttagaacttagtttagtatgccaaatcttacctagggcagtaagtcaagagagagcaacaaaaggaattcagatggggagcaaaagtccaatttccccagtgctgaggcaacatgtcttgtttcacagcagaactgaggtgggagctccccctgctggctagttttcacagtgcagaagttgtatgtgggagactggaggagaaaggcattaatgaggatcgcaccgcagagatctctgccacccataataccaacttgtaggcaagatgtactcattgcagtagtggcacaaccatacggaaacaaccagatgctctgtgcttggttttgaagcctgttccccaagagggagtccatgcctggaactgtgaacctagttaacttcctatgcctgaggtctttgaccctggaagggaacttactgttgttgtttagttaaattgataaagcgccaagctgcctttaaaatacttaggtttatgttcgtgagttaaacactactttgaaaagtataatgaataaggaaaatttagagtcacatggctgctgaagatactgagagtaagtagtgggcaagtgctcagccctcaaaaaaaaaaaaaaaaaaaacaaaacattcaggctacctctctgaggctcagggagcagtgtagaatgaggagtgggaagagtagaagagctggaagctaatgagaagagctgcaaagtactgtcatgtggccgtgacacagccaatgaaaatcatgatctcacagcagcagcagcagcagcagcagcaatggacctatacaagactggtcccatctacagtcttcatatatctgagaagggtccatttggtcctccccttccttgctgaactatgaactactaatggatttgggttgggggagagcaaacaatgttatcttttgtgtaccacctgatcagcctatcgttctctgatgaatagtagcagacccctggtcacacaggtgaccctaattaaactcagtgcatcactgagtacaaaaatgtaatgtgtgaataggattctagggagtcatagaggtaatagtgaaataagagggagaagtttgacaggagtcagaaataggctacatatatgtatgaaattgtcaaaagaacaaaaataataaagtaatgaatagaaatatgagtaaatacaatttttgttaagaaagaaaaaaatagactttatacacacccaaaaggggatttattagagtaacctataggtgtggcccagatagtccagcaatggctgtctcctgacagaagggccaagaaccagactggatgtcccagcggtcctaatattatgctggagtcctagagaagtcttagaaagctactggtgttcaggatatgttggaatacagaagaagtagcatcaagagatgccctaaaggatctgctgtactcaagacatggccttcagagcaatccagttagccgctggaagtctagaggggccacccctcctaacactgttgttgttgtgatgatgatgatgatgtctgttgactctaaagggcaccaggagcccaaagttttcaggaagaagtttaagcttccagttcaatggaatgtatgttatgccttgggcagaaaagttctccccccttctggaacacaagctagtaggccagcagacttaaggttgtggtatcagaaagtaaaagtttttcctgtaggactgtaggggtgatagtgagtggaaccatttccatttctatcccttgatccctggattcctgaatcctggctagggagaaactgaaccatatattagatgctgaagcacatactgctttctggagaaccctgccccagtcttccagggttctgtcaccgatatccattgtaactatgtcttccaaaggctattcacaccattctgtcaagttagctgcttcaggaggtagggaacatggtaagaccagtgaattccgtgagcattagcccactattatatttatttgcctgtgaagtgagttacttggttagaagcagttctgtgtggaatatcatgatgatggataagacattctgtaagttcatggatgatagttttggcagaaggaaaagcaaatctataaccagagtaagtattctagtaaggactaagagttgccctttctatggaagaactggtccagtgttgtcagactgccactaagtctctggctggtcacctgggagaatggtgccatatctggggctcagaattgggtctctgctcctggcaggtctggcactcagcagctgctataaccagaacagccttggtgactggaagtccatgttgtcaagcccatgtataacgttcttttttgccaacatggccactttgttcatgggcccattggacagtaacagagatggctggggaaagaggctgactgtgtacagaatgggtcatcctttctacttcattattgaataacccctctgcaaaagtcaccttttgatgaacatttatatgggccacaagtatctttacatcatttgtccatttggagagatttgtccccatcttccctagttaacctttctcactaactttccattcatgctcctaagtccctaaccatcctgccaatctgttggcttcagcccatgagttcaaaaacagtcacatctggccatttctcattccaagcagaatttacaaccatgtgacctgcccaaagtttgctttacaatgaagatttctcttcactggcattttttatggttgttctgtaaagaggttataatgcagcagctttccacacctgggtggtgcctgcatagtgtgcagaaccatcaggaaaccttggtctccaaacttttcttttctcagtcagttgattctaggaaacaccccatgagatcataggtacatgcttgttaggaaaagacactttaacagaagtagaaaacaagcacttggacaacttcttcatatatcttgctcaggacctactggagcctgatcacaatatattctactttcatttgataatggtttgctgttatgttcatcctacttcatggcttggtattatggctggtaaaaccaaatactactcagctcatgataggtagctcagatagcatagtaacttggtggcccattcaatagcaggcaaagagctgtctcttaatgggagaatggttgtctgcagatggcaatagatccatgttctaaaatcccaagggtctcctctcacctagaggagcctaccaaaggctataaactgctactgccatctaaagaaccattttagcgggtctcctggatcacatggtccaagtggtagagcagcctgcacagcagcctggacctgttgacgagctttcttgttctagctcccctcaaagctagaagcttccttccttacttgaaataacaaaacaaagtgaggagtatgctcctctggaatccaaataggcccaccaagctttgtgctgctttcttggtcgtgggaaagaccagatgcaataacttacccttcaccttagaaggaatatttctgcatatcaccactggacttgtagaaatttccttgaagttgaaggcccttgacttttgtctggatttatttaccatcctcccatgtacataagtgttaccaatatttccaaagtggttgctccttcctgctcgcttggttcagtcaacatgatgccatgagtatactggaccagggtgatattttgtagagagagatgctcaagctcccttcatactaagttatgacacaggactggagagttgataagtactaacctcgaggtaaaactgtaaaaaggcatactactgacttccagctgaaagcaaattgcttctggttgtgcttatggacaggaattgatagaaagcatttgctagatccatagctgaataccatgtaccaggagctgtgctaatctatccaagtaagggcatcacatctagtacagcagctgaaatttagtcactgcttgattaagttttaatggtcagtggtcactctctatgatccatctgactcctgtgctggagagttaaagggagatgtgagaactaccatccctgcatgtttcaagtccttgatggtagcatggagtattatatttggttcactatgttcccagaggcaatgccagtctcttcaatttgtgatttccaaccataatagctttcagttcacaggtcaaggaaccaacgtgggattttgccaatgtctaagtatatctataccaattatacattctggaactggagaaataaccacaggatgagtttggggacccagtagactctctgtgatttgggtttcagtcaaaattccattaatcacctgataatcataagccccgatttaactggagggccacagtgctatttgggggtctcttggaaccagtgtcagtttaaaacgagtgtccagtaaaccctggaaaacctgattgtttcctttttcccagagtacatttacccttgtaaaaggtcataggatgggagaagggctaacagtaaaacttttaggtattttagcaaggtcctcagggggacctagccttctcatcattcaaggactttggggtctgcaaactagctcaagtctggaaattgattgataagttgagatacccctttgctactctgcagtattctttttgtttgtttgagaatttttttttttgcttatatagatgtaaaaacaaacaaaacaaaataaaaacatatattcctggaagcattattagccagtacaaaaagatccgtaggagtcatgccatcataaaagttactctgtctgtgctgcccttcatgataaatattctcgccttgcctttggcaatgcagtgctgatacctggccctgctactctgggggcctaattaagcccatcccatttaactttttggattgagcatcagtgtctccaaccttaaggtctggcacaaagagaagagcgggggcaaagcccttcaaatcctggtgcccctcttaccattttgtgcctcacaggattagtgaagagaatgtcttctgggccttcccattgtggaggattcggttttatacagcacacccatcattgcagtttctctgaaccctaaaatcccttcatcaatactaagtcaagggacatcaggtatccacagttccctttcagtagagtatggctagtgcttagccaaccagtcacgcttttgatacctttttaactgtaagaacgtctgtattgaacttagaaccttaactcagtgggcccatatcaataaattcagcttgattcagttttatggtttttttttcaccattatttcatgcccttaaaaatccattctcatatatattgcccagactacggcttgaatgaattcacaaactcagtaaactttagtattgtaccacacctttgttgtgaatttcactttctgtttcgctcctagaagccttcttagccttgatactgattatagttcagaggcaattattgtcgacagacactgagcggcatcagtattgccttgcttgatgtttctctttcagtgaaagtcactgaaatttgtagacaacaaaggattaatttcctcaggccaaggtacaaaaggaaatattgcaaggtgtgacagtggggccgcaccctacactaagagtgggcagactactgccacaggtgagacagacgcatcagaatttgaagggtcaaagtcctcagcacctgtcccctacacttctccatctcaagttacaggatcccaccccttaccagccagtgcctttaggctcctatttaccttagcaacaggagaagtgcacttgactagggggagtgcaggcaggcaggcaaaagtgaaaagtttctccttccatgttccttcacaggtgtgattccagatatagtcaagttgacaaacaagattagccatcatattacctaagtttctgacaaagctatcaaaaacatgcattggagaaaaggtgccctctttaacaagtggtgctgggaaaactggatctttctctctttctttctttctttctttctttctttctttctttctttctttctttctgatttattttatttatatgagtacactgtaactgtcttcagacacaccagaagagggcatcaaatcccattacagatggttgtgagccaccatgtggttgctgggatttgaactcaggacctctggaagagcagttggtgctctttaacctctgagccacctctccagcttgaaaactggatttctatacatattgtgcaacaataaattcagtgtcttagttagggctttattgctgtgaacagaaaccatgaccaatgcaagtcttataaaggacaacatttaattgtgggtggcttacaggttcaggggtcagtctattatcatcaggggagaagcatggcagtaaccaggcaggcatgatacaggcagagctgagagttctgcatcttcatctgaaggctgctagcagagtattcatttccaggcagctaggatgagggttgtaaagcccacgctcacagtgacacacctactccaacaagaccacttcctgggccaagcatattcaaaccatgacattcagtatatcaaaactctaatgaaagaagaagacaggtaaaaatatttgaagacataggcatagacaagaattttctgaaaaggactatagcacaggaaacaataccaagacgtggcagagagagttacatgagattagaaatcgctaccaagcaaaggacacagtcactagagtaaagagaccatttacaggcttgggaaaagaaatttccaggcttacatctggctggggactggtatctatgatatataaataactgctaaaattaaactctaaaatcattttagagtctgtagataggctcatgagctgaatagagtccctaataggagaaatacaatgaccagtagatacttggaaaaagttttcaacattcatagacatcagggaaatggaaattaaaacctctttcagattctgtctcacttcagttgggacgttgtcaagaaaacaaaagacaacagaggggaaaatgtgggtggggctagtgggatcctgagtagctactttttatttttctgtttttttctgttttttttttttttcttttttttgtttttcgagacagggtttctctctgtagccctggctgtcctggaactcactctgtagaccaggctggcctcaaactcagaaatctgcctgcctctgcctcccaagtgttgggataaaaggtgtgcgccaccactgcctggcagtgaaactccactatgacagtttgaagggttcctcagaaaaactgataacagaccatgtgacccagatatactactatattgtatagccacagaaattcttgtacatccatttttactgccacacaattcacggtggcttaggaaataaaccagcctgaatgtccatcatgagaagaatggaagccggacagtggtggcacaccctgtctcaaaaaaccaaaaaaagaaaaaagaaaaaagagaataatggatacagaatatttggtacagtgagtggtggtggctgcaacagtaggcatttgtgtggtggagtggaggaaaactggaaaggctagtggaatggccaaggctaagttaatttcttgctcatagagagctggctatgtagtttcctgtgggccaaatcaacgaacacttgaagatgcacatcatgggccatgggtatgtgggtgccactgctgctttgtacagggcaccttactgccaagacattggagttggcacgtaatgctttcaaaggtctcacaaggaagcctatcagttggtatcacttgcagctcacagtctgtggtgaggaagatggattcaccaattaaggctaccactgttgggcatagtgtgattctttacagccacagatgtcagattgcaaaataaagttcagcagaaagctgcccaggagggttattttaaccaacctacttcccagtgttctgtaactggagcagaagataacggtgagcagatgtggaagtttgtttgtttgtttatttattgcttatgaatatactttagctgtcttcagacacaccagaagagggcagcagatcccattacagatggttgtgagccaccatgtagttgctggaaattgaattcaggaagtctggaagaacagtcagtgctcttaaccactaagctatctctccagtctggaattttaaaaaatagttaaatggaaaagtatagacaattactatagccatgataaaacaaaacaaaacaaaacaaaacaaaacaaaacatttgtatgttcttggagcagagtttggtaaagtgcctttttatgtggtagcagttctgtgttgattggccagacttctacttcgtgttttttattaaaaaatatttttataaaataaaaaactaaaatgctatattatgataatggaattttatacagctgaaaagaaaaatgccatcatgacaatttccagaaaatggattcaaccggaatttattatgttaagttaaataagcttggttcagacaaacaagtcatgctttgttttctgtagggaacttgaatttaaaggtgtgtttatgtgcatatgcgcactcgtgtacacacacacacacacacacacacacactacagatagatcatgaaacggaaaagatcttaagtaaaggggaaacagagggtatggaatatgtgcaatatggaagcagaaggttggactgcctggttaggaagaaagggagccagctaggaggaggcaggtaaaaccgggtaggttagggataacaatggagagcaacatagaatgacacatgtttatgaaatgtcacgatacccaattctttgcatggtaacttaaaaattaaaagaattcaaagataaagtgtaatctaagtattcagattatcaaaattaaagctgtcctactagacagtgatggcaagcatgtggcagatcgtcagtatacagctcagtggacaacttttctgaaaagcagctctgtagatttcaaaatcctcagaaagtatttgttccttgctgacacagttgcttacgttgaagaaaaagatggtggataaaactttacttaagtataagtatttatcagtactactcaaaatactgaaatgctagagatttgttaaatgtatgactgaaaaacatttaaataaccagtgtctgttttttttttaaggttttgttatgtgtgcatatgcatgtagtgccctcagacagcagaagagggtgttggatcctctgaagctgaggttatagatggttgtgaacaggtgctgggaactgaactcaggtcctgtgaacagcagccagtgctcttgaccactgaaccacctctccagcccatataggtttttgtttttgttgttgtttgtgggacaaggcctctctatgtagctctggctgtcctgtaactttctctgcagaccaggtctttccttgaactcacagggatcctgcttctacatctacaaggtgttgccatcatgactgacttctgtgtcattatttaatagacttaaaaataagatgtatattgttatcgtatgtgtgagggtgctttggctgcgtgtgtctgtgtggcgtgtgagtgcctggtgtccgaagaggacagaagagggcgcctgatgctgagctcccttctgggtgatgggtatcaaacctaggccctgtggtagagtgtctagtgttcttaaccaccaagccatttctcagtccccatgtttatagtttttgtttgttttgttaatcaatttaaaaatagagcaaagggaaaacttgatgttcaagacatgtttgcttttcatttacttctgtctctatcaatgtagctcatgggtttgggggtttatatttatttttattattaaattgcttattaataatactggaagcaaaacagtttataaaattattttatagtagttctgaattttatttgttaaataattgagagttaataaagcatttttttccctccagaaacagcatttaaatttaaagccctgaagaaggttgcacagttggcagttataaatagcctagaaaaggtaagcttcaacctcttgggtatgcaagttttgattttgattatgaccttggctgtattcggtatcttgagtataagaaagtcaagacttgtgtggtacttcctcttaatgggaagaatgcaacacgatatttgtgtgaagaaacttaaattctgtgttatttaatatattggaaaattgactgctttcctataaaaacatgtatttttgttacttgtaggctttttggaactgggtagaaaattatccggatgaatttacaaagctataccaaattccacagacagatatggctggtaagctggctaaagagtgactgggtgtggggtgaggggcggcatggcaccttgtgaaactctcagagggaaatgtgctgcttttcagtttatttttttcaaaagtgttttttctgttttctttgttcagctctaacaggaattacagttttctctcctgtttctgtattatttccagtcctttcccttctgagcaagtggtaaaagaagtttgaagtgaagctctagtctttcatgttgtgattgaatactggtggctttctcacagcgtgcatgtgtgtgcttgtgagtgtgtgtttcctagaattctatatttaggtatatctaaggaggaaatactatttttacttctgaatagcaattttgggggaacgcctgcatagtagaggctagagacccccgggaaactatcagccttttgtttctctgtgagaccctgagactgtgacaacacacagcgattctaaaataccaatgcttctaggatgtgtcacattagctcttcttacacttctcttagactgtgatagttgagtgttttaataattctaggttttaatttaatgcaaggattttcttgcctaatataatcatttaatgtttgtatttttcacagaatgtgcagagaagctgtttgacttggtggatggttttgcagaaagcaccaaacgtaaagcagcagtgtggcccctacaaatcattctccttatcttgtgtccagaaataatccaggacatctccaaggatgtggtggacgagagcaacataaacaaggtcaggagggaaacgagtggctgccatctcctgatgggagcagcttgtttattcaaggtgtacattttagttatgtccatgctaggtcaaacagttggttgcccttagcagagattactcatgttatagtcatgactgaaaggctctgacctctcttggttttaatgctgaataatagtaaaccagataaattctgttatttaagcttgtattcaccattaaaatacatttagacatatataatttacctttatgtttatgaattaaatttggctggctatttgcaaataaattgtatagctaacaatgcattttctaaggcttcagcacaatgacttgaggaaatgtatattgactatgttttttcattatgaaacataactgtcctaacaatttaatttctgcaaaactaagaataaaaattggaaattttcatctttttctatgggctgaaataacctagttagataaaaatcagttaaaatcatcaggtcttggtgattctaaattttccttattatcattagtttaaaaaagcagagattttcaagatggttattaattggttaagagtactctctgctcttccagaggacctgagttcactttattcttatttattgatgtacaatttttatataatcatgttacagccctacctggctttcagagtctttaatgtcaccacatttagttttggttttggtaatttcagtctgcatgcatgcataacacttggttggttggtctgtaggttggctggctgctctgtgtgtatgtgtgcgtgcgtgatgggtagcaggttccagactcatggcacacataaagcaagcagacacacaagcatgcacagaaactaaaatgaatcttttaacaagatcgacttttttgcttttttattacttatttttcagtaaaaaaatgtgtgtgtgctctgtgtgtatgtttgtgttccaacagaggcataagatcctttagagctggagttacaagcagttctgagcactcagtgtgcgtgctataaactgaattcttgttctctgaaagagtagcaagtggtcttaactacccaaaaccattgcttctgggtagttaatttttaatagttttatttcttgctggtgctgctttttaaaattaaaacatacaaggacaaaggcctggcacacttagagattctttgcacatctagttggtccggtctgtcttcctcctttgattggtcaggtctgatttcctagtgatcttcataaggtctctataaccatttgacccagtcctgaactgttcaggacatatcacaaaagcagtgcacaggtgactggacaacgtcactgggcgtcatcatcatcctcagtatcattttaattctgcatggactgcctttttattagctgtcaagtctgttagatactggtgctgcttccatcttcgtctaggtctatgtagggccctgagctcctaaggaacatcttgtttcagctggctttaattatggcttgtggcaaagctgcatttaaatttttttttttttatttctagaaatgaaatttagataacagaatacccttgggtatattgtttagaagactggaggtttctatactctagagtagtagaaaaaaagtctaccacaaccaatacaggctaatgattaagcttcaaaggtaacatcgaaaggaaagatatagtcaactaatacttagttcaaatgtatagtaaggaatgtttcctttctctatagtaagtcaacagagaaagtagagaaaagtgtttcatgcatttttaaaaaagtgcttactctttaaatatgaaatgatagccaaatacaagccatttgtgtttatagttggagttttagagttggctaatttgctactttgttagatttatctgtagtagtacaaactaggtgttttgtcttcctgtatttccattctgtagaagctgtttctggacagtttacggaaagcactcgctggccatggaggaagcaggcagctgactgagagtgctgccattgcttgtgtcaagttgtgtaaagcaagtacttacatcaactgggaagataattctgtcattttcctactggttcagtccatggtagttgatcttaaggtaatatgctgttctttcccttctatagactttaagaaaattaagtggataaccttcttgtataaatattctgctgaagataattgctaactctaaattttgagttaacttagatgttgtgttcagaggacctgcttttgttgttactgtgctcattagactgagaacaggaagactgatatgcactgggtttccttaatgtatagatagatgcttggatcgtagatgatatcgatagactatagtaaccagtatttagtgctttttccggcgactaaagtttattataatcaatgtgactaatgttgattatgtttatattccttgttaagtaaatacttcatgactatttaaaggccattgttttctattgggatttttatagaacctgctttttaatccaagtaaaccattctctagaggcagtcagcctgcagatgtggacctcatgattgactgtcttgtctcttgctttcggataagccctcacaacaaccaacactttaaggtcagatcgttgttttatataaccatgcatattatatatatgtattatataacataatattgatgtggttatctctataaaatgcagaaactataaagatgaataggtgtactttcattagtgtttcttttttttaaaagatttatttttatttcatgcatctggatgttttagctgcatttatatctgtgcaccatgtatgtgtatgggggtgacggaggccagaagatggcattgtgtcccctggaactgtagttctagacaattgtgaactgctgtgtgtgagtgctgggaactgaacctagatcgttttaaagagcagtcattggtcttaaactctgagatatctttctagcctcttactaatatttcttaactctaattcttgatgttaatttcaacaccttaaatttattttattgaaagtaacttactttttgctgtttttttctctctgtttgttaatgtactttttttttttttttttttttttttttttttggcagatctgcctggctcagaattcaccttctacatttcactatgtgttggtaaactcactgcaccgcatcatcaccaatgtaagtctaaagctagtactgtactactaacaagtaaagtaaaagctagtactgtactactaacaagtaaaggtctctttgttgatttgggttatatgttcttttctttttaaggaagattctggttttatcaactgttctgaacttagacctttctgtaaagcagagcttccctaagatgatcccacgagcagttgatgtccagctgcagctgtatattcagtctctacctgaggcttttagtgagagggatggagttaatagaatcttttgtaaggaataagcctacaaagtgtcatttaaagttcaaaatctgttgagaacaatgccactgaaaaacaatttagtgctttctttcttactatctttgttaagttggaaggaagagtaattgtagtacagcctagctatgggcatttaaaatggtgaagcttcatttgattttaccttttcatccccttaattagaataaaacacatgctttaaaataaataccacaagagacaaaagcatttcagagaaaatagctgacttcattagaggtatttgtgctgtgtgtgtactaaatggaaagcagacaggaaggtagtagtagatgtggactgcagaatttaaaatctccatgtatggacattcttagtcatgtatgtttttcttagtactacttttacacattggcagatatgatacacttatgagtaacttgttcactttgtttctttttttcctcccttaaagtctttgatgactaatactttggagtatttgtcttacttctaaattctgttatgacttgtgaattaaaataatacccattcctttatttgccttggaattatcaaattaaacctaacattactcttttttaaaggtatttttgcaggggaaaataactgctgatcaagctacttagtgacatactcattttgcttggtggagtgctagtagcattttaggatgttgggtctctgttttagcctggccttgcaggacatccatcattcatgaaacggcaaccacgctctatctcctgcattatgaacaactaaatgcttaggaataatacagccctcatttgaatatcactgatagaggtataagttacacttaatccagttagttccaatgaggatagtattgtgaatctaagtgtagatagaatatgtttatatcaaaacctgtacatttgccagtgtaatgactcaggccatcgtctcattgactcagcacattgactcattctaagctttagttttaaatttaaaaaacaacaaaaaagatgattttcctatcccataagtttatatgtaattccaaaatactagttgcctaccttgattcaaaatattgaaagtattccacttaattagataactttatatgaatggttaacatttaataaatccaagtttatagtctttggatattctgtgattagttactttaattgtgaaatatttttgtctataattgaatacatagagcactttcaagcatggacttggcactgctgtaagtggctgagctgcttctttctgggtttcaagcatgcctggagtgttagttcctgcatgcctccgtccgtctgtgtgcctggtgaaagcgtgttctcccctttctgaggagtgctgcatgtatgaaggcagagtgtgtctgcatccggggacatttgtatataaagcacccatactgactagtctttaaatacatcaacatctgttgagtggaatagcttgtaaacaactcagataatgccaatgtgactttttgtttgtttgtttcttgagacaaggtctcaccatgtagttttagacggtctgaaactatgtagaccaggcaggccttaaactcagagagctccatctgcctcctgagtggtggggttaaaggactgagctactgtacccagcttccaaagtgactttcagttatactttagttatacctcatccttagagattgctgagtaaattgtgttttattagagtccacactaccaagacttgaggccaaaaaatactgactttaaagtacttttaattgttaaagactgtaacagtaaatatgcagatttatacagttgagttttatagagttttactggaaacttttagtaggaaaatgtttgttttcaagtaatatgaattctttcctagattcatggagtctagatctttaatttgttggtatatattttctttttaaatgctttggttcagtatacctcctcagcgcaccttttccatgtctactaagccagtttacagctttaaaaaattattatgttctcctaaaagataaaagttgtaatctttttgtgggtttatatagaatgagaaattatgtttggagttttatattgcttctgtgagatgtcctcatacacaatttataagtactatgtttaaatctaaaacattccaatttcttttagagattcttaaagtctattcactatttgaattttgatgcagtggtaattttttttttagtagtttctaaagtggtatttatactgtcactttttgaaaatgatgtgcactaagagagaaactatagttttaagatctatattacatctgtatcatctttataggctttttaaaggttaaattagatgtgcagctaggaaattttaaaaatatacatgtaagtcaacatgctacagataggacagtagttcattgcagatttttttcttgtagcagtttattgtagtttgccttttaatagttcatatattgaaggtaatctctggcaagagatggttaaagaagtatttctagggtacttgaaaattatttaaataaccttgaggaatgtacataattcacttatattagtcttaatatttttaataaactattgttaaggggaaatgtctatttcattgactagtttcagaatgcacacacttagtaactgactaaaacactaaagttttattaactcagggatgtctaatctttagtgcctattttatttgagaatatagcctttactttgaaataaatgaattaattccttatgaaaatagaaaattataaaaaattttaaatcttaagtctaaaagttaatatatagttgtcttagttagggtttctattcctgcacaaacatcatgaccaagaagcaagttggggaggaaagggtttattcagcttacacttccatactgctgttcatcactaaaggaagtcaggactggaactcaagcaggtcaggaagcaggagctgatgcagagaccatggagggatgttacttattggcttgcttcccctggcttgctcagcctgctctcttatagaacctaagactgccagcccagagatggtcccacctacaaggggaccttcccccttgatcactaattgagaaaatgccttacagttggatctcatggagacacttacttccccaactgaacctcctttctctgtgataacctcagcctgtgtcaagttgacacataaaactagccagtacaatagtgcatacatattactgtggtacagttttgcagttatcaaaaatgattacatagtaaggtggttgtggtggcttatgcttgtagttctagcatttaagaggctgaggcaggagaatcacaggttctagaccagtttggacaacatagtgaattccagcaagaacatgtgtcaaaaaccaaacagatgtaaactaaaccaaaactgaaaatagcaaccccccactcccagtagtttgataagatattaaaggagatgcttgtctatttagtttattgatttctgccaagattttatgcagtgtataggaagaagtcaggactcagtgtactctttttttttaaatcattgagcattttgttactttcaggtgattaacaaaacatagaaatctggttacactgatcactgatggccttgggcagatcagtgcctcaaatctgagagatgtgttatattttgtgatggttagtgttgtcaataaagtctgaagatgagcctttgagcatatccatgaagattgatatcatgattacgttaattgagataggaaggcccctgaccactgtgtggtaccattccctgggcagtgagcagagaaagctctttgttcctgcttatggatttgatgtgaccagctctctccagctcttgccactttaacttccttgccactagaacctggaattgtgagctaaataaattctttctccctgaagttgcttttgtcagagtatctaattacaacaacatgaaaagaaacggagacagtaaacaccaccagtgtgtaggaattggctaaatcaaataactgagagacagcataaccacaatagtttaacatttatatttcttaaattaatgaatttttaatgtgcatggttgtttagcctactatatgtcagtaggggctagaagagggtgttggatcctctggagcaggagctgcagatagatgcgaactgccatgtaggtgctaggaattgaatcagggtcctctgtaagagtagccagtgcccctaactgctgagctacttctctagcctctatcttacttattttttaagatgaagtctttctgtgaagcccaggatatcattgaagttcctcatgccttaacctcccttgtgtcaggattaaaggtgtacactactgtgcttgccttagtttttctgtaaagagagtttgtaactcaaaatactgtgagctgtgagaaacttaaatgttaagactagcttgattttttttttaaatgaagaataaactataagtaggatgaagctgttaagtcacatgtatttactatatgactgtgttatttaatatcagatttttaattaaagtattacaaattgaaaatttatatttagagcatattgttttcatgtatagcctatataagtagtgaaagtttatccagtcacttttctataaactgataaactttaatgctttttcacaattattatttttcaagcatttaaaattgaaatatattaattaaatttaaagcaaaagtcatttaaggatacacttaaacagattttataaatcagctagattggctaaatggaaataggaaaatatctatatagaataattattttataaacccttagctaggtctggggatgtagctcagtggtagagcacttgcttaacatacacacatcccagggtcctgactttaatgtctagctttgtaaaaacaaagatacttagctaggatcagctgtctttgttttgggtgaccatttagtcttccatgtgttgtgccatctgcttatcaatgtaaaagattattgatatactaatggctttattccatttactaatttcatgttaattgttgtttgtaagcacttgactaatggttttacatagtctttcaacattgtgttgaaccactaatctcatggaaaactgtgatgatagcattcttacctggtgaaaaatatataatgtatgcatgtgtttctgaaatttgttaatactaaacttttttaaaagataaaaattggttgaagaattttacaaatagtttttaaatttaatatggcattgttgagaaaggacaacctcatttgcacactcagtattctattttaacatgtgtgtctggttagtgtttgacttaaagatatcatttgaagactttgaaaatcatattgtatgtttgcatggtcttagaaagtttttcagaaaagtataaaagtgtttaaaaaaaaaagaaggtatacagcagtaaaagaatgtgtacagcccgtgtgatttttgtactctgatctctcgttttttcttcagtctgcgttggattggtggcctaagattgatgctgtatattgtcactcagttgaacttcgcaatatgtttggtgaaacacttcataaagcagtgcaaggctgtggagcgcacccagcaatacgaatggcaccagtaagaaactatgagctttgaattccacctgtgtactgcatttccagtcttctcattcctgctgatggagttaacgggttgactgggtccttccttctctaggaatgctgtattgccatgccattgctgcccagttaacagtagttatttttcactaaactttattttcctaaagttttctagaaaatgctaacatcttaatgaatgtcatctttcttgtgtttttggtttaactttttcttactcagttgttttaatttgtttcttactttcagaccttgggttagagtgagtgtcctgatgctgaatggtatacggaaaattagaaaccgagtaaaacagctattatttaaaggatttatgttttagtaaatatgatcatttagcaaaaattgataggaacttgacattgatgtttattgaaacttaacaaaggcttactttgaaattgtgttccaagagcttagttaataaagactataaatccatagagagtgggttttcatagctaatgataagattgtgcccatggtttccttactcatgtgtaggaagagcatttacatggcgactcttgatgttgactggtggtgctttgtcttctgcttactttccgatcttattggctgttgttgctcacgtggtcaggtgctagccagtcactgtgtcacagtgggcttctgtggctggaagtacatatgatccattgtaactacctcagaaaagtccttgatttctttgacttttttgaatatagttaccattatagtcacatcatgtcatttcaaatgaaaatgtatcatgtcttcacctgttggttttatctaataaactatgcatcttacacgaatggttaagcaggtggctctccagcatgcttatctttccaagatgctaaggacacagcactttcctttatacagttaggctcagtcctgcccagctgtcagaagcagtttctaaggatttaaaaaatatgccaggtgttcaaatgaggaagttttctatacaaggtaccattgtatttttatcctaaaatatttatttttgtgctaaaaataatagctgaaagggcatgtcattgattttttttttccttcagtgctgaagatcaataccaggtttcccataaacgcctaacatatactatactacaccccctgcctcaatggtattttattaaataaaatttaatattcaagcttacttagcttactttttgtgatggtatgtatacaatacctttaatgtaaaaaaattgttacagtatatatgttagtggtaacatatagagtagctatgtaaatatttcttaactagacattttctttaaattgtagtaattccttgaatctacccccaccttgtgttttgcactaggagggcatgctaactgtcaaacccaggagggctttcctctgtccagctgtaccactcactgatctgtgtctccagcctcagcttgctgtgtgctgggccatagctcagtgtaaagtgctttcttacctcttatactgataggaagataattggaattggtggaaaaccatatttgcttcctgttttatattcaacccaacacctctgccacttaatttttatgcacgagtgctgaaatgaaatgaacctcatttattcttttgaacggccacagatttggttggtagcctgacagatgataatctatacttttaatttcttagatttggttgttagttaacacttggaggacttacattatgctatggtcactgttttcttaaagctgtagctagtaaggatttcttgtggctcaatgacatgataaacatttgttttatttatatttttatttattatttttggtagtatcagtatacatttagttttcagagtcacttttaagctttttttttttttctttgagatacaggctatgtagctttggctgaccttgaactcactgtcttcctgcttctacctcagtggtctaaaagattcattttttttttattatttttaattatatgagtatatgtgtcggtgtgtgcacatgaaaggccagaggcattagatgtcccctggagctggagtcacaggtgattgtgagccatctgataggagttccttctggtaaagcagagtacactcttaaccactgagccacttctctagacctttaaagtctgtatatttgtatgtatagtattgtgaatgtatgtgtaatggctgtaggaaaactttctttctgttagtgtttccattagagaaaatggcaaattaatgtaacccagttgtataaaaacaggaagttttagagtttgggaaatctttaaggtaaacactattctttgttaatgtgtgaatagaccacagatatgcctggtgttaatgctaggatcatgggttgtgccttgtttacattgcctgaaatcattttggtagctcttaggaattgagctatgcctttgctttgctgtagacatagcaatgcagaagttctagctgagcataatgggcatgcctttaatctaaggtcttgggtggcataaacaggcaagtcaggactatacaagattggttgattgattatttaatatgtatttatattttttgagacaaggtttctctttgtagccctggttgcctggaacttactctgtaaacgaggctggccttgaacttaagagatctgcctgcctgtgcctccagagtgctaggattaaaggcgtgcaccaccattacctgcctcatagtaaaatcatgtttcaaaaatgttctgtctatgaaaaggtaaactattatgtgtttcaatatagtattgattttctaataaataaatctcaagtgtggggttgcttcccgcctcagtggtttatgttcctgagtgaaagacacccacacagcctctatattttaatacactttaaacagcacaatagctgagcgactgcctaatctctgtgatgttagattgtacctcccgccgataattccaagttactactcactaatttctgagttccatcttggccacattagttcagttagtcaaccctctgggccacattttcttggcccagagcctggggtgttctccttgcttctctattccatggtggcctctgtgtctctcctctctccatactctcctgaagcatggcggatgcctttcttcctcttccttgtggtcccaagtctgggaaacctaaaaccctatctttttcttctccctcactattgactgctcatatctttatttcccaatcagaattagctggggccaggttccctgatgctacatgtagaccctcttctgtagactgttttggaggacccaatgagtatttgaatacaggcagctatatttcaaagcttgacaactgctgatattttggggataagttacttggtagaaagtagtagttatttgaggactggagaggtagatggctcaacagttaggagtacttgttgctcttagagaagatctgagtttgattcccagctcccacaaggtggctcaggaaaatccttatatttagttctaggggaagatgatacccatataagcaaacaaaccgcacacatgcaaaaacaaatttaaagcttaaaaaactaactacttggattttttttttcaataagatgaaaatatgttgtagttgaagccatcccagttcctttctgactcttctacagagtacccttgaagatgttttgaatgaagttaaaacccagtttcctaagagttgttattatatatagcttgtgttggattggattttattgttttaactctttgaaagtttgtttgatttgttttgataactaagcaaactaagaccaaatgtggttacaggaattagaatgtcgcatggcccagcagagttaggtctgaagttgttttgacgcctgcctagtgtctgctcagctcctcagttgccctccttcactagcaggttagctgggtggatgatgacactttcactgcttcaacacagactcataagctcccagagcagcgccaggcaccgtgggcatgctggtatgctgtgtgccaggcaccgtgggcatgctggtatgctgtgtgcatttgtgagtgatttttgtggatgaatttatttgattgaactaaaaatttgtctatttgggttatttatctttcacaaaaccagtttaataaattttttccattaatatggccctttaaagaactgccttcataatgtttgtctggtaccatttctaggttttggtctaaagctgcttttgatcattggaactagctgctttcatatgatgattatacccatgtttttttctttctttttctttttcttttttggcactttagtagtaattttaactttttgaaatttttgtctgagagtaataatttatattttaaaactagaaatatgctttaattaaaatgtgaagttttaaattttggtcttagatgatatcttggcatagatgttgcttaccatgccgtaaagtcagccctaaagtttcaagttggcagatggttttggttcctaataaataacttaggaatttcttgtctgacatagctgactgtctttaatcagagcatatgtgtcagtttagatcctactaatttttgtagtacagaagataaattagtaaatgaagtctttttttttctacttaataaacagtttgttaagcagctgattgttcctgactttatataacccactaatggccattagattgaaagaggtaattggactttctcaagtttagatttcctactagtcaattatactatagagcaaaatttacatgttagtacctgacattaaaccaaaaattacttaaaaaacaattactgaatcagatgtattatgtattgctggttgtcctctgactgtgtacttcctgtgcagtgccatgtcactctccgtcacatcatagtgagtttgttcagtaaaaggcttcaccttgatttcctattagaccttgaaacatacacatgcatgcacatgcaagcacacacacatatctatagagcaaacattccacagaacttattaaatacatctgacaaacatttcctttagtgttggagagtttggatatttcatttcttaaatgcttaaaacttgagcactgtgtgtgttgggtgatatagatatagtcatcttcagttgttaaaagaaaatagcctgtctacagagacatttgctatggttgaataaaggcttcatagtctgccatccctgtatctttctatgtactcactgtaggcatccaggtcaaaagtagattgtgtgtgtgtgtgtgtgtgtgtctgtgtgtgtctgtgtgtgttagttaaaggaaatagactggagagggatagagcgacagtgaatcaagaatgcaattgttagatttttttttaaatcgactaacattcggaattatgttgatctatactatctctgtaattgaactacattttcaccagagttctgttttatgaatattcttaggcaaaaagacaaatgcatgcattctattaacttaaagaggaaatgccgtcaaaataaaagagcaagttcctaactaaagccatgactgcagagttgcctacagagactgtttcagcagctctaaagaacatacctttacttctatctgaaagtggatgtttattttcctttgtgtgatatcgaggattcacaatagtttttcatttctttgtgtgatatcgaggattcacaatagtttttcatttcttttagtccagccaagtgatgcatcttacagtgtatagtgtatttgtgtatgtgcatgtgatatatccagagatccatcccataattagcctccaaacgatgacaccattgcatacactagcaagattttgctgaaaggaccctgatatagctgtctcttgtgagactaggccggggcctagcaaacacataagtagatgctcacagtcagctattggatggagcacagggcccccaatggaggagctagagaaagtatccaaggagctaaagagatctgcaaccctgtaggtgcaacaacactatgaactaaccagtaccccagagctcttgtctctagctgcatatgcatcaaaagatggcctagtcggccatcactggaaagagaggcccattggacacgcaaactttatatgctccagtacaggggaatgccagggccaaaaaatgggaatgggtgggtagggaagtgggggggagggtatgggagacttttgggatagcattctaaatgtaactgaggaaaatacgtaataataataaatatttaaaaaaaaaagaacatacctttacttctatctgaaagtggatgtttattttcctttgtgtgatatcgaggattcacaatagtttttcatttcttttagtccagccaagtgatgcatcttacagtgtatagtgtatttgtgtatgtgcatgtgatataagtatttgctaatttgaattctctagtatgtatattcatgtgtgatatagatacattatttttcctcttactattttcatatttgagaaccagtttttgaacccaagagtcaacttgatattatgcctctagtgttttagattattattattattattatatattactagattgttatataagaatgatataaatgctataaaacatttttaaaaaatgcaatattaaatgtatgcttgttagcttatgtttctaccagtatcatacatttggtggtatgaaatgttttttttcaaagcattttaaataatttcttttataaagtatagctattattctgaatctgatgtctgattgtttctaaggtgatgccatgtttttgatttgttattagagtctcacctttaaagaaaaggtaacaagccttaaatttaaagaaaagcctacagacctagagacaaggagctacaaatgtcttcttttgtccatggtgaaactgattcatgcagacccaaagcttttgctttgtgtaagtatttttaatgaaatgctttgaaattattccactaatctatttgaactgaaaggccaaaatacatttaaattatgagtaacctctaaaacattgctaagaaagccaattccaggaattctaatatacttagatcacattttctaaccgttccctccgcattgaactgtccatagtagcatcatttgcccttgttctgcattataatcagacctatttctggggtcaggtgggacaaatgactgtaaaatcggtgtgctcagcatctgaactgctcactctttttgctattgctaagcgagttaacttctatagctagctccctgtgtgttcctttgatcagccttctattatcattggctctgcctgtaaccatattagaagagaaagttaaaatgagagtggttagtatccagttattgccatagctctgctttttattcccgcaaatggtattatattcctgagagcttcactttggtgcacagagtaataaagaactgatgtaaatagtgtaaccaggtgagagtaaaggattaaaagcacaggctctggggaaggactgctttacttagtctcggcaccttaggcttctcatctgaaaaggtaggcagtaatatagttcctacctcagagagaccattaagagtgaaatagattgtgtaaggcttttaggaacaattcgtagtgtatagtaagcaataaaattagttactgctatttttagtaagatacagttagcgttagcattcttactgtccaagtaaaacagtttgaattgttcacaggatggtctgtttaacttttatcaagtctctatagtcctagactgttggggtcggcctgctgctctcatgtctgggttcgagcctgggaggcagcctggaactgaaaaagaagagggaaactaggtggacaagagagagatatggaaccaagacagtattctgatcaaggctcaaatttttaatggcagacacgctttataaaggaggggggaagcccattcctgccaaatcatccttggagccgagctgcaggtgaccacgtgtaggcggactcccagcaggtagcagcagaggcagtggctgaacagcagagtgatccagggaggcaggctccaccctaggtgatctccttagtggcatagcaaagtcaaggtctggctcagcttgcttcaggcttgggggaggctacactaggcctatcaagtctctagaccatcaggtaaagccttctgctttactcagtgtcaggctcatcctttggtgctttatggttttgcagctatgctcttcaaattactaaaatgaaggcattcatgactaagtggctgtggtttcaagaattctatgaaccccacgttttgagtgtgtgtgcacacacgtgtttttgtttgatttttgagacaaaatcttgctgtgtatactaggttggcattgaatttattatgtatgacatactgacctcagatttgttgggtatcccaggctggccttgaactagatgttgctgagtgctggaattacagaaatgtactgtcatgcctccactctagaattttaaaaaatatttacatatgaatagtttttctgataatgagagataatagagccagagtggatgaagttcctaaagtatgggttaccccaaaagaagacctattatctttttgtgttttttgaaaagtccacccaaatttgagagtttaatagaataaacagttaaatctttagtttggaaaagttttaaaaattttgttagtggactctgaaaattaactttgttcttttggtttctcgggtgtgtggcatgaactgtggtgacatctcactgtgcttgctacaggatgctagggttactctgtttacttggctgcagttttatgttcaccagtgaaccagggtcaccagtgattttcatgttaaataggttattgtttgaagaacaagggttgaattgtttgagggaaaatagtttttaagtaaaatttgctgtcttccaagagttatggaatcctttttacttcccttgatgaggatgattgaaccagaatcaggtagttttgtaaagcaggcaaaagctccacccccggcctactcctgcgttttgtgggctttgttttgtgtttgggggagttgagagggtgggtggggtttcctttgataggctaattgtcactacccaggacagctgcctagcttcatggacagtgctttctttgctgccatctagtggttaagtgactttcctcagtaacccaggaaagtaaaacaatattgtacacataaattctaaaccttagttactaggagaaatgtaaagatggtctccatcatgggatcttgttgaagtaatttgattgtgtcttgtgtttgtaccatctttgtcctggttcctgtcactctatgtgttcccagctactaccatttcttacattccccaatcatttctctgcactgtgttagaatggtctctttaaagacttttgtcatgcctggtccaacttaaatatcttttagctaacgttgctcttggataacaggtaagtggatctttgagttcatgaccagcctggtctagagtgagatctgggacagtgagggctatgtagagaaactctgtcttaaaaaacaaaaccacccccacccccccaacccagaatgtgaagattgacggggccggagagatggctcagtgcttaagtactttctgctttttccaaagtgcctgcctttggttcccagacacaggcaggcagatcactactgactgtagctccagctccaaggaagccaacactcttctgcctccatggccacctgcacccatgtcctgtctacacacatgcatataaataataaataatatataaataataaatacagttattaaaagcaaaactgaagtttgtttttctcctacagaatccaagaaaacagggccctgaaactcagagcagtacagcagaactaattacagggctcgtacaactggttcctcagtcacacatgccagaggtcgctcaggaggctatggaggtaaaggaagtgaattctgggcttttgaaagaaagactgtaactgtctctgatctttttctgagaacttaattttttaagcaattatttgactctttctatgtgctttctcttaaaaatatattttaaaaattttaaattgtttgtgtgtgcatatgaaaatcagaggaaactcaggtttctggtcttggatagcaaatacctaaccagctgtaggttattcatttgttttttgagacaagatttttacgctattgtcctgcctggtctctaaatcctaaaacaatcctcctccttcaactgtaatactagctagaattttagttgtatgtcacaagtcatgttgtatttgaattacattgtgtaaaaaatttttggaagtttgtagtttctttattccttactttctttttatgtctgcataatgggggtagggtgtgcctgcactcgcagtggcacgtctggagatgaggggagagcctgtggcgtttctcttctccgtccacctttatatgggttccgaggattgaactcaggtgctcaggcttctgtaactgttccttactgctgagccaggtagtggatggtagacgttcagtgtggtttctgtttgaggatttctacaaataatactattaaagttactgtatcatttaatatttccattagcagtgtattggtgttttggtatttctccattgttgatgacactcattattgtttgtttttaaattatagtaaacctactgtgttaacaaaggtgactttttaaaaaattatatttgtagctggatggttgtggtgcatgcctttaatcctagtactcaggatacagaggcaggtggatctcagaggcaggctaatctcaaccaagcctacatagaaagaccctatctcaaaacaacagaaaaattacattgacgtatttattgtatgggaggatgtgtgcatagcacagcatataggaagaggtcagagggtaacttgtaggagttggttctttcttcccaccactgggtcctagggattgacctcccgttgtcaggcttctactgacagcagtgcctttacttactgagccagctcatcagcttagagtttacttgtttttaaaattatctttaatctttttcttttttttagtccagttgttatccccctcctggtccgcccaccaacagttcctcctcccatacgcccctcccccagttttcaaaaggatgtctccacctccaacccaccccaagtctctagagggttagtgtgtcttctctcactgaggcaagaccaggcagtcctctgctgtatatgtgtccagggcctcatatcagctagtgtatgctgcctggttggcggctcagtgtctaagagatctcagggtctggattagatgaaactgctggtcttcctatggggtcaccctcctcctcagcttcttctagcttttccctaattcaaccccaggggtccccaacttcagtccactgattgggtataaatatctgtgtcttgctgctttttgggcctctcggaaggcagccatgctaggcttctgtctgtacatcatagcatcagtaatagtgtcaggcctttgagcctgcctttgagatggatcccgatttgggctggtcactggacctcctcagagtttactttgaagtgttatttttgtactgacaacctaaacatacacctttaatctaaatgaaatttatttttttataattaacatatacgactagtttaagacttaagaatatattcagcccagaaagtttcctttctgcagttaatactacccttattttgttacctcccttaagttaggaaaagaattttgacactcttgtattgtcacacatgttagttcccttttcctggttgttgatgaatattgcactggcttgttcactaatgggctcaattggtagacaacatgcacttctattgaatgtcagccttgtattcctttgccgtccccatcccttcttaccccgtgtctttcccttggctcctttgtaataattgatttgctttgttaatgtaattagtttgcattttaaataaatgaaataaaggtttttatttttagttcagcataattgctgtaattgtattgtgttagtggttggtttatctcaaggttcctcctgttttattctgtttagtgtcccattgtatgaatatagcacaacttgtttgctcatttatctgttgatgatcatttgtgttttgcttttggctatttagaagtacagcttttgctgggtatggtggtgtataccttcattcccagcattcaggaagcagaggcaattgtaaatttgaggctagcctggtctacatgtcgagttccaggccagcctgctacaaagtaaggctctgtcatcaaaaatgatgatgatgatgaagaaggaaaaaaattgatagcctgtaggtacacacacacacaatgtgaacagatttttttatttttcttgagtaaattctaactgaggcaaaaatcttactgtgtggtctcagaagagatatagcatagctataagaacactggaagaaagatagtacaagcatagaaaagtgtagtgtagtacatagaaagtaaaggtgtcttatttatgtgtaaggatgtgtatctgtgaatgtatgtgcacgtgtgtgtgggtacccagggaggccagaagaggatattggctccctgtagttgaggttacatgcaggtggttgttcacctactgagatggatgctaggaaccaaaggcaagttttctggaagagcagcagcaaatgctcttagctgttgagccatctctctagcctcagattcactggagagagagagagagagagagagagagagagagagagagagagagagagagagagagagagagagagagagaaagggagagagagagagagagagagagagagggagggagggagagagagatgaagatctttttgcaaaggttcagtctaggaagtaaaagtgcatgaagtttctaaagcttcaggatatataaaacaaaatatgtaaagaaagaagctgtttacagtgcagatgcagtggtgttcctgagtactttcctaacatccggtgggtaaggatagggtggggttgttatcattcagtagaatacgacactgaattcagacagtactttttttttcccaagcatacctggaagatatttaacataggggtaggcttaaaactatcaaagtattgaaatattattttattgccatagtagaattaagatagaaatcagtaagaaaaaagtttataaattttaaaatgttgatactgtgttttcgtttacatactactgagtataatttagtacaactaccattaaatgccattttataatatcagagctaaacataaatgctgacagtttactccgggtcatagagccagcagaagtgcacatgtctacttacaaagcacacaaaatggtcagcagtgcagcttgtgttgtatcttcctccaaagtatgagccattcagatgtgtcagccgagtagacaattcctgttatattgatttaactgaattctatgcagtagtgaaaataaaatgaactggattggtggcacactcatttaatcccagctctcgggaggcaagagacaggatagttgtgagttcctggacagccttatctacatggagagttccaggtcacccggtgctgcagagtaagaccctgtcactaaaatgatgaagatgatgaagaagaagagaagaaaaattgatggcctctaggtcactaatacataaatctaagttgtgaacagagtgttcatttttcttgagtagattccaactaatgtaagacaacaacagtaacagcaacaacagcaataaccaaaaaccccaaaagaggctggtttacatagagagttccaagacagtcaaagccacatagacctgtctgaaagtaaacaaaaccagcatgagtactgatgagtgcagaagctgcatgagtctcactgacatgctgctcagtggaaataaccaaaggccaagtgcattctgacagctccgttacccgagcttcacaggcagagagagcagcttggtgagggcaggcagagagccgatgcctgggaagggggggctgaagggcctttctggtgtgggcggtgttgataggtggtggtgggacatgcagccagtgaaaaaatctctgagctttcctctccaaatgacctcctgctgtactctgtgtgtgtgtgtgtgtgtgtgtgtgtgtgtgtgtgtgtgtgtgtgtgtgtgtgagatcatcctagaaattgctacattgcttatattgtctttggaggatctattcaaatattttgattattttcacttcaataatcaattcttacatttcttgtcttgtgtataatatataattcaagattaaaaaaatacatgtatcttcctctaataatcaggaagaccttaattattcattagtaagcgaatgggtttatatttaagagagtggtatttcaacttggcatgctattaaacatccattcaaacctgtgtgagtcgttcagccgtgttggagaatgcttaggagataagtgtaatatgtttggagctagctgaagctgtcagtcccacactgtgtagaatttattcatcatcaacaaaccacaataataaggtgcttcccaacaaattgtatcatctaatgactccatagccatctttttaatgtcagtgtattctttgatattggcatgatgacatagtcacctttgaggtacttctcagtgtctatctgtcagataacatatagcagtatggaaaattaaagcaaaggagaacatgaaaaggtatataatttcattgaaatgcaaaaaactaatacatttttattcagattaaacaaaaaactttattaaacagggaatgtgtcacctaaaaaaccctaaaatatcccagtcttactaaatgccaaaccatttgtgagtgacagaaataaagctaggatttgggtctccgcttctgttctttgtactataccagaacactgccttctcttctttgtatgcataatatgaagtccttcaaaaacacagatgtgccttggcagttcaacaccctccaaaagagaacctcagtatgccttaggttcttttcttttcccatcaaacactttgcccaagtttctatgataggcctagagcccctgaagcagtggagctcataaagactgtgccccactgatgctagctctctcttgtcacaagagaaagcaactgctttaaattcccaaccaaattgatgccactgtatgaaaaacaatagaaaaccctaaagtaccaggaaattgtatcaagtatttgtacagtaatggtaaactgaattgcaatttgtactatctgttttttttttaagtgctaactataagttacttatttgtttcaggtagcagttcattgatgttttaataacaggggcttacagatcccatatgtatttttaccatggactgactgtactgagcacaatagaatttgctagggaatggggaagcattgtggaattgcagtctagcttgagcaggtttgatgaaagggtctttgctttaatagtctttgatagttttaatttataagttagcatatttatatggaagttacttatttaaaatgagttacttaattctggctagtcgtcattaaatactttaaaataaactgttattaaacataaagtttgctttgtttttgcctctctgtcaattttagaaaataacttttctgtctaaaatgtttatgtaacaagcaagttaatttctactatttcattgtgtgggttaatattgctgtgtgtgttaattttaggggagatactttgttctagagttattaattattgaaacctcattgtttatttcttgaagcagctttgtgtgtgtatattgttctgagttcattcacagctccctgtgtacgccatgtagagtaatgatggcaggggcagagggagttagttcggggttggtattctgactggctctcaaaaacatgtttttcactgttcttaagacagacccagctgagtttgttagcatttgtaaaacgagtgctccagtgttgttttcctaaagcactttcagtgccttctcctttgtacatttcaggctttgctggtccttcatcagttagatagcattgatctctggaatcctgacgctcctgtagagacattctgggaaatcaggtatatggattttcacattttaatttggctattgtctttaaatattagctgtataatatttagttcattgttatatttattgttataagtagatatttttcaattttgtttttaatttgaattgaaaatgttagaatatttaactgtcagagaactaacacatatatgcaaaaaagtttaaaaatggtgttaatttttatcagctggctacaagttcttctacttcatgtattatcctttgtggtgtacttctaagcagttacaattgtgtttgttgttttgagacagggtctaactatgtagccttggctagcctagaacttaactgtgtagatcagactggccttaaagtccaagaaatccacttccctctgcctctggagtgctgcgtctaaaggtgtgtcctatcatgcctggctataattgtgtgtgtgtgtttaagtttatttattattatatgtaagtacgctgtagctttcttcagacacaccagaagagggcgacaaatctcattacagatggttgtgagccaccatgtggttgctgggttttgaactcaggaccttcagaagaacaatcagtgttcttagccactgagccatctcaccagtcccataattgttgtttttaatagatttttttcagttataagactaaaagtattgacattttgtaacttagcttttcatttttaaactaagcacgtggctcagtagtacagtatatgatatgcattgaaggggggagctatgatctttgtcaatcttctgtatgcactagtggttttagtgagtcagttacagacaggcatatatgtataaataagaaaatatgtacaggatttcactatacctttctgaagctgagtagatggttttctttaataagcatgagggcactacattaggaagatgtaaatctataaacctaggcccctgctattgtctcatcatagacatggtgtgttaggtatgtggagaccgagttaaaatctaacctcttataatgacatagttattggagacatatgtaattaacttttaatttaacacatcataaatgcatttatttaactttatatatacatatataaatacgaaatagtgaagcatataatcaatttgaattgtcagtgagatattttatatttttcttttcataaagtcttcaaaatttgtagtgtgtcttactacagtacatatgaaaacacatttcattatggacaagcttcatttaaagtactcaagtggtcacacgtgggcggctcgtagctaaacagcacaattgtatagtatcatagagtatacagaacgaattagcaatcttgttctctaaagggtgggaaatggaccaggtgtcttggctcacccattctgttgtgagtctgtactttcacgtttggagcaagaaagcagttacagactgggaatgagggactgtggctgtgttccattgaaacctcctttatagatgttagaggaggcatggctttgtcctacaagcaacagtttttaggccctggctccagactactcttgctctgcagtctttgctgtgcatgtgaatttataatttttttttatccccaccgcaagaatagaattttttaaaatgtgttgttattaacatttggataaaacctgtaaacaagtaaaactaagcctctaaacgtacacctactatgaaatatgtcacgttatgtatgattacgtatatgtattaggttcgtgatgattttgtaacagtgaactttatgttactgcagctcacaaatgcttttttacatctgcaagaaattaactagccatcaaatgcttagtagcacagaaattctcaagtggttacgggaaattctgatctgcagaaataaatttcttcttaaaaataaggtaagcacagtgactttttcttttggttttcgagacagggtttctctgtgtagccctggctgtcctggaactcactctgtagaccaggctggcctcgaactcagaaatccgcctgcctctgcctcccaagtgctgggattaaacgcatgcaccacatctgcccggctgcacagtgacattcttaaattagaaatatctgaatagtaaggagatgtgttttcattttactgctatgataaacaccaggaccagcaacttgggttgggtgtatttgtcttacatgtcttgatggcaatccatcattgggggaagccaagacaaggaactaaagcagaggccatggaggaacactgcttactggtttgctctctggcttgctcattatacaacctaggaccactgggtgacaactgccgacagtggactgagctcgcccacatcgatcattaatggagaaaatgtcccacagacttgtcaacaggccagccttaaggaggcatccttttatctaaggttccctttctaagattactctagcttgtagcaggtgacaaaaagctaaccagcacagaacaagttaaaaagtttttattagctagattatatcctacttcaactcctcactcaatgacatacttaagagaaatgtaagtacagaaggtattatctggtagtccaacatttaaatattctaggttttaagttggtaaatggaaggttaatgaattctagttgacttaagtaggattctgggtcaggcctatgaagagtagaggctgctgcaatcaaagatgtctcaaatagtgttttctctttatttttaagtcctcatgacttggctctcggagctaatctagtccgggaaataatctttcaaaaagctaaagggcagaagttttaaatttaggttaaacttgtatgtctcccttaaagattttgtctgttagctgggtatggtggcacatgcctataattccagtactgttgaggccagcctgagcagagtggattccaggctagcctggagtacacattgagatgttgtttcaaacaaggcctgaggatgtagcttaatagtagagcactcaagttctgtagagttagggatgatttcatcttttaaaaaaagaccaggaatcttttttttttttaaattagaataaaattttttggtcctgaacagttgaaacattgaagttctggggaacaggaacgaacctaacgtttcttttaacatgtaatttttataatcaatttcaaggtttttctattatgacataattgacataatttaaagaatacttgatttaattaattttaatccaggcctagaattatagctataagaaaccttaccaagcatcttgatacaattttgtttagaggactgctgatggagaggtaaggttatttgtatctggcttatcttgtgtttatgtcacagaacaaagtttgtcctgaagattttagacttaagaattttgtgcctttggcatattgtctagcatggtcagtgttagtaatctagtagtgaatccgaggtgctttgtgagggctggagagagcactcagcagtgctgagtaccccgacaaggcaaaactgtaatctgtagattcgtaaagtcttacagttttcttgtgatagattttacatcatcatctatattgtacttggtttggaggttggacaactgagaggtgtttgaaagaaagatagtgcacaaaccttatttaccacaatggggtagtgagtgcttctaacgggaaagcttttggagagaaggttttccagggctgccttaaaatagaaagtcagttcccactaagcactctgtcagtgtcattgcttcaggaggatacgtcttctttccagcaggcagatagaagctcctgtcattctctctacctttatggagtaggatgtgaaatgtctgctactggaaataccactcagatgtcagttgatcatgatgagttcctgcgtgcctgtactcctggagcatctctgcggaaaggaagagggaattcctccatggtaggtaactccctctgtgactctcctgtatcatcatctctgctcttcctttctgagtggatgttggtaaatttcgattaaataatttagcacattagttacagactgctcagaatttagttgtagtgctgctcactgtggaaccctgagcaaattcttcataactctgtgccttagtttctcagattgcaggagatgatagcagggcatggtggaatacacctgtaatctcagtgttgcagaggctgaggcaagaggatcacaagttagaatttttgttttgtttttttaaagacaggatatcactgaatagctctggctatcctgtaacttactgtgtacaaaggttgacctcaaattgagatatctgcctgtaccaccatgcccagccttttaagttttccttttttttttttttttttaaatgtgtatgggtgttttgactacctgtatatctatgcactcatgtatacctgatgccccacagaggccagaagagggcttctggtcccatgaactggagtcccagatggttgtgagctgccttgtgagtgctgggaagcaaacccagttctctggacgggcaggccttgctcttagtgctcttaaccgttggtttatccctctgtcccagaggggacaagtttgaaggtaggtttacatagtaagactgtcttccacaaaatgaataatcagaaagcaattaataatagtagttaataacaaataataaaaccagtataagattgttgctccagagttttgaggattcgagtaggtagaatgtaaacagtacatgattatttgaccgtgtggctgaccactctaatcattctgatgtgaacaagccattcagatgtaggagttgaattaaaggaggctcaaattaattaaaaataaaacacagtagtttgcttaatttttggataagtgttgctaagatgttatttctttctctctctcggcttttatttttatttatttctgtatacatacatgtatatctgtattgacatagtcgtgctttgcagcacaggctaccttgaatttgctgtaatcctcctgcttcacccttgcaggtactgtaattaaggtcagtcgtgcttggcaagatttacatttttagactaggtcccaaatatgccaggctggctttgatcctcttgccaattccacacgagtgccaagattatagatctgtattgctatgtacagcaggacatttatttctgtatgtaaatgtccttaacataaatcaaaatatgagcagaattataaaatcatatggaaggttttgtctttcagacagagagccttgttatgcttaagtttcactgtatgtagcctgttgaggcagaaacctcaatgagccctgtaggagctgcaatgtgtgcttcgcctgtgtccttggcattggctttccaagtgtttctgcctcagtgttagtttgtgggtcattgtttcagtcagtgcttccgggtgtttgtttcttccctatagacctcttcctttgtcattatggttgacccacaagtggatcagttttactgcattggactctctgtgtctttttgtttgtttgtttgtttgtttgtttgagacagggtttctctgtgtagccctggctgtcctggaactcactctgtagaccaggctggccttgaactcagaaatccgcctgcctctgcctctgcctcctgagtgctgggattaaaagcgtgtgccaccacgtccagcttctctgtgtcttaattgtatatttgttacagactatctgcatttctggaatctaggataatatctattccaattgaaatgcagtaccattatatgaaccatatattggttcacatctgatttagagtaaggcacatcagaaaaagatcttattattagaaaggtaaattcttatttattttgtgtgctatggtaaatggtacattgttgagtttgtaaataaagtcacctaagttgcagatacatccctccttcctcccaggatagcacagcagggtgcagtggaaccccacctatatgccgacaagcccagaccaagctagaagtggccttatacatgtttctgtggaatcctgacactgaagctgttctggttgctatgtcctgtttccgccacctctgtgaagaagcagatattcgatgtggggtagatgaagtgtcagtacacaacttcttgcccaactataacacattcatggaatttgcctcagtcagcaatatgatgtcaacaggtaaatgtggctcttttttttttttttttctcttactctttttaaccatgttactttgactgacatctaattatttttacagtggagtctatttaaagaacagtttgaaagttttcaggacaaattcatacggtttacttgaaatccttttctgaacaaggtagatgtaattcagtgacatttgaaatttactgaatttttaatattcaaacttattggtaactggcactgtaagttgatgttagttatagattatagaaattactctgcttgaattataaatgggaagattttaaacacctaggcatatatttccataaacataggtgggaagatggctgttttatgttgtagaccttttggagttggggatcaatgaatactcttgcagaggttggtgagagcacgtgctcacctcgatcatcagaatcatttgtttcattccttcactctactctgtgtgtggggcaggctcccagatgtgaagatggctctaaacactaactgggtttgcttgctgtctttgcttaggaagagcagcgcttcagaaaagagtgatggccctgctaaggcgcattgagcaccctactgcaggaaacattgaggtatggcctcagcagctgcagcacctccccctccctatgttactgttagctatgtgatcagaacaacttgagaagcaaagctgagttatgtgcatattacaagtagggtattctcagaacctgcattacatgttgactttgaattcacccctaaagttgctccctagtgataattgacttcattttaggcctgggaagatacacatgcaaagtgggaacaggctacaaaactaatccttaactacccaaaagccaaaatggaagatggccaggtgagttgtttttttcagtgaatttttgtgtattaatagatctgttgcttcacttaagtaatccttgatgagctacgaagagtaggatattatatggagttgttttaagaatacctgtggtctgtctgtctgtttgcctactcttgtagatattagccacatgtatctgttagaatgtcacttttaactcatttaattaaacaagttagacttactttttcaattttatagtagccaaggttcagtatttatttactcagttggatagtagagatgtaaaaggttacatgactacaggaatattaaatatctctgctagaaaccacttagttgagagaccagttactcattgatgttctttgtcctttgttgaagtattcaaagaacgtttagaaaagatctaatagctgtagatagagaaagagaatatttctaagaattctcgtaacgtgtgtttgctttgagacaggatctggttatttacctttgctgcctagaacttaaagtatagaacaggctgtccttgcccttgcagtgatcctcctgccttaactttccaaagctggggttacagaggtgtgcctccctgtctggctcattatgctgtattcttagatactctaattaaaggggctgctgagcacataatcgagcgcactttaaggttgagtgcaattttaaactttggacattttatttaactattatcatcaagtgaatcattttattcagcaactaccaccaattctctattaccctagaaattaagaattaactggtttgtgtataactaatttgtattactatactgctttcattatcaggtctttgagacaaactgtttatcctccaattgctgtttttcttgttatggtcacttagagcaagtaaaagttgttttgaggaaataatacagccttagtcatgaaagtttttcttttgagggtgggagtgtgggtgttgactgtttaaatcagcatagaattcatatactgtagagttatctttcataaggtggtcaacctaatgattgtttttagtatagtcacagaattctataactgtcagtttatacacaatcaattttagtacattttcatgctctcacagaatgccccctcccaccaaacctgctccccattagctatttctagctctaacttgctgtatttcctacctctctgtctctaccgctccagccttgagtagctgctaatctatgttctatttctacaaaattaccttctctgagtattttgtccaatggaatcataggtgatatgggcctttgtgactagctttttttctccttaaattgtttaaggttcatcactacacatcagagatttttaaaaaggaatttgacacttcagggtgattttattctagctatgacaaaaatgtattaagtggctctctaatgtgtgtatggtagggattagagagatggctcagtgtttaagagcactggttgctcttcagaggatctgggtgtgagttctagcactcacatgatagcttagaatgggttgtaacactagttccaggaaatctaacatcctcctttatttagcttttaggcatgcacatggtacacatatatacatacaggcaaaacatttatacacataaaactaaaattaaaaaataataatgtatgtggtagtttcaagttttttttattattattataaaatgtacctttcctactggtagaaatggataagagtaatttgtaagatttttattcagtctatgttgaattcatgcttttcacaaaaatgttgtgtttaggctgcagaaagtcttcataagaccattgttaagagacggatgtcccatgtcagtggaggaggctccatagacttgtctgacacagactccctgcaggagtggatcaacatgactggcttcctttgtgcccttggtggggtgtgcctgcaacagagaagcagctctggcctagcgacatacagcccacctatgggcgctgtcagtgaacgcaaagggtctatgatttctgtaatgtcttctgaagggaatattgattcacctgtcagcagatttatggaccggcttctgtccttaatggtgtgtaaccacgagaaagtggggcttcagatacggaccaatgttaaggacctggtgggtctggagttgagtcctgctctgtatccaatgctgtttaacaaactgaagaataccatcagcaagttttttgactctcaaggacaggtgacgtcttctccactttgttttttacctttctttatgaatataataatagtttgaaataaatcaagactgtttctttcaaattatttaaattatagaccaacatgataattcacttacaactttaaaacctttcataattacagaaaaaaaatcatgtaacctagggatcaacttgcttctaaagaactcaggcctgtgggtatgcctggagttaggagtcttggctgtgtgcctcgtacctctgtgtatctgtgtgtttgtttacttgcctgtagtgtgcctgcgtgtgatggttacatcagtttcattgccctgataatggtttctgttcattgatgttagatcgctaatgggctgttttttggttttgtgtgtgtgtgtgtataggtattactaagtgacagcaatactcagtttgtagagcaaaccatagccataatgaaaaacctactggataatcatactgaaggcagctctgagcatctgggacaagcgagcattgagacaatgatgctaaatctggtcaggtaagcattctgtcctgaatcacagcagagtcttgttttaagaggtaagacctcgtatgccctgataatggggatgatgaagtagtttgccattgttttactacagacccagtgtgactatggcaataagataatcagaagttgtatatgttcctacctaagtaaaatttaaatattattcacgtctaaaattacatttacttaagtttacttaaagattaaatttagaataccttatcttttgtccatatctgatcattttttttaattccatgtttaattagatacgttcgtgttcttgggaatatggtccatgcaatacaaataaaaacaaaattgtgtcagttagttgaagtcatgatggcaagaagagatgacctctcgttttgtcaagagatgaaatttaggtgagttctcagaagagcaaagcagggtcttgtaagtattatgttaaacaaagtgtagaaaagtagcagagctttttgtgtggggaggggagggaggtacatatttgtgcatatttgttttttctgattattcttaaccaactttctcaaagctctgtgcccacaagcatttgtttttctgttttgttttcagtctttctttttttaaaaattctctcctttcctggaactaattaatttatggtcactaaaagtttctgtttccacattgcaaagggacagtgcaaagaaccagcatctgaattgtatctgtgtccttctgacttttattccatcacccctgatagcggtatctgttgtataaagtcaccctagcccctcagctgttttcactagtagagcgctgttttggttctcagcatatgcctacagttccttcagtcagaaagccaaggcaaaagttcagggccaatctgggatatacaactatatgataaaacttttgtctaaataatcagtaaactatgtgttaaaaacttacttgttcttttccttttttcattctgcaggaataagatggtagaatatctaacagactgggttatgggaacatcaaaccaagcagcagatgatgacataaaatgtcttacgaggtaaaataaaacagaacaaaatggacagagagagaggtggggaggggaaggaaaacggagaaggagagagggaaagaggcggtttttaaagttctatcatgttttactttactcatgaaaaccagtacagagatagctgctaggtgtgttaagttgttttgtaggtggtaagcttttgcatttgagatatttaaagttccttttattattttactggaaggacttttagttgaagcatgtgaggtagtcttaggaaagtggtattagcttaggaagtatggttaacagttattgagagaagatacataaagcattaggctgtattactttagataaaaacattgattgaggaacataattatgagtctttgtaaggcataattgcgtacatgctgtaatgacagatgcttgatatatatcagaaatggtaactgtgattggatgataatttcatccattttttgttcaggtatgacttggtaatatgtactatttactgattggttgattaattgagtttcttctatcatcatcatcatcatcaatttatccatttggccacttatttattcgtttatttattgatggtttttcaagacagtttctctgtgtagccctagctgtcttggaactcattctgtagtccaggctggcctagaactcaatgacctacctgcctctctacctctggggtgctgggattaaaggcgtgcaccaccattgctttttcatttttatattgtgatattggagcttgaacccaagacttgtagatgctaaactggattacattcttaaccccataattttgatttaatgaagatattatgcttaagattacttattcgtaagtttccccaccagttttaggtctttgtgtgtgtgttctgagcttagtatatttactgatgttatttaggttgtatttatagtttactaagtgaagtagagagcgccttagtttcctgtctaaaaggctcatagtttctaaatgacttttttttagagatctggaccaagcaagcatggaagcagtagtttctctcctcgctggtcttccactgcagcccgaagaaggagatggggtggagctgatggaggccaaatcacagttattccttaagtaaatgtcagccgccaaaaaacagcacaaaacacaaatacagctttctccctcccacagcagtgtaaccaaagtagctaaatattatatttaaaagtagacctaattgcttctaattttggccattgactgctctcatgaaaataacatgtctacttgtgaaaagacagaaccaagatagaaaaataatttgtgttgtgttttttaaagaaaacagtgggatagttgaaattttccttgtaatgaatctagattgcctgttaagtcatttaaaatgacaatgtctaactggtttggaccatgagttttgtagctaaatattaaaactgacttttgccagcagacaaggtgcattttctgtgcttatgtcaggaatgaacactgtactttgtcaggataaaataatgctaccagcaactcaataatgagccacgttgacttctgaccccagtattataaaagcagatgcttacagtggcccacataatcattcagaatggatggttagcttgctggttggtgtggccttcatggtgtaaggtcagtctctgtattttccaggtacttcacattatttatgaaccttttgaatgactgtagtgaagttgaagatgaaaatgcacaaacgggtggcaggaaacgtggcatgtctcggaggctggcatccctgaggcactgtacagtgcttgcaatgtcaaacttactcaatgctaatgtggacagtggactcatgcactccataggtgagatcaaatgaaagctacataaaaaactggcctagcatggtgcacaacttgaatcccattaaccaggaggaaggaacaagaagatctctatgagttcaaggtcagcctggtctacacagtgagttccaggacagccaaggctaccagtgaccctgtctgtaaacagacaaacaagcaagcaagcaaacagaaccaaagcagaaatataaaacctagagagctgggtgggaagggtggctcagtggtttacagcaccggctggtcttccatgggacctaggtttaatttccaggcctctgtggtaaccaggcatacatgtgattgatacccagacattaggcatgcaaaacactcatagacataaaacataaaaatctagagttgacataacatgcaaaatgaaaattgcttcagccaggctgtggtggtaaatttgcatctgtctatcctcatcaggcttaggttatcacaaggatcttcagacaagagctacgtttatggaagttctgacaaaaatccttcaacaaggaacagaattcgatacacttgcggaaacggtgttggcagatcgatttgagagacttgtggaactggtcacaatgatgggagaccagggagaactccctatagctatggctcttgccaatgtggtcccttgttctcagtgggtaagtttattgagaaagtagggtaatagaatgcttgacatacagctagtgcttcaaaataagtatcctcagaagtgtttattaagtgaattgacaaaatttaagaactggaaaaaattacataatggagagctgagactgtagctcattggtagaatgctttccctagcaccacagaaaatccatcatgattgtgcttgcctgtaatctcagcagcttggagggtgaaagcaggaggttcagaagttcaaggtcctctttgttaatagtgagtttcaagccagttagagcactgtaagactgtctaaaaaaataattaaccaacttgagtcattaaaccttttttcttaatgtgttttgcttctaactattgagaagtggttggtactcctacccctgactagttctttctttccaacccagtgacaaacgttcatggaatcaccaatgggaagaaatgtaaaacagcgttgtctcttatctttacgtatatataaagtaatagttaacctaactattagttgttaatagtactaaatctataatctgcgatttgtgctcaataactatctctgccttacacaccttaatttttacttgaagtattacattacatttgaaatttgcatttgaaggcatgctggatgtggtggacacactcataattctagcacgtagcaagtggaggcaagagatagaagactcataagtcatcgacggctacagagcaagttcaaggccagcttgggctgtataagtctgtgtctccaaacaaaatggactgataaaataccatagaaatacatgactatttgtccgtctacatttattttgtattctggggattgctgtcagggccttacttgttaggcaagtgctttatcactgagttgcaccctctgcccatcaaactacaacattcttggtaatacatttgaaaactttgaggaagcttttgttcattttcatttaaaaaagccatgttgatccctatatttttgctcatgcctttagtcccagcatggggaggcagaggcaggcaggtctacctgataagttctaggccagctatagcttacctagtgaatccctgtcttcccccccccccccacacacacacactttcttaaagtcgtatggtttattttatcaaaagaggaaggaaggaagaaagcaaggaaggaaaagaaaaaagactttagtaagagtaaacttctaattactaaaataattttttttttttgcctaaaaactgtaatgagagggtgaggaactggaaactggttcaggagtctttcagaagactggggttggattcccagctcacatggtcacttcacaaccacttgtaactcctgttttaggggactgggtgctctctctgcctccctaggcaaagcaaccatttacataaaattaacaacagaaatgaaggaacccacctgtagcagaggctggaagggcggtttggtgcttaagagtgtctgctgctctgtaaaagaagtggagccgaggtcccagcactcccaacagcaccaaaggagaggtgctactcatgtgcacgtgcgttgaaaatacacagttaaaaacagagagcctgtgagatcatggtttttgtatctaaaaataaagctcatattttttgccctataaccctgcactttacctgggccctgccttaactgtcttcagctgatgctgaggctcttctgtgtactcatctcaaatgtgataactgtttctgccctagagtacccttgctcctgctttctaaaatacttctgtggttgctttgatttgattcaattcggtattagtaaaattatttaacatgagctctatcgtcttagcaattttgttggtttgcttacttgctttatgacaagagatggtctcaccttgtgggctctggctgacctgaagctcactgtgtagacaggatggcttccgactagagatccttctgcctctgttttccaaatgctgggggcacaggcagcatctccacagctgactcacttacaattgtacttttatgcccatttattagagtactcctaaattattttcttcaaacctaaaatttttcacacatcttcaaatgtattatcagtaaatattatgaactttttagcatttaactgtaattaaaagtcatttagtagttttcttaatgaagagtgaaggtctgatgatgcaacctagtggtagagttctggtctagcacgcatgagaccctattcttgatccctcctaacacaagaaaacaactgttgatgtaagtctgtgaagctctgactaatatttctaagctttatagcacatgacttaaaatacctctttttcttcttcttctttttctttttctttttcttcttctttttttttcttttttcttttctttttttttttttttgagacagggtttctttgtgtaatagtgctggctgtcttggacttgatgtgtagaccaggctggccttgaactcaaagagatctctgcctgcctctgactcctgagtactagggttaaaagcatgcgctaccattcctggcttgacttaaaaatacctcttacgtatttacttttttggagataggatctctggtgtagcctagctggcctggaattcattgtgcagaactaggatatagcctcaaatgcacaaagtttctctgcctcctgttacaggggttaaaggcatccaacatcatacctcgcctcaattacttaaaattttttttgagattttatttcatataaataggtattttgcctacatgtatgtttgtgcaccatgtgtataaaatgcccaaaggggccagaagtggctgttagatgccctgaaactggaattaaaacagttctaactgcatgtgggtactgggaattgaacttgggtcctctcaaagagcagccaatgctgctagtcccccaaattatgttttttctttggcaattttgaacatataaacaatctctcttgatcacatgcaccagtgtttctcaaccttcttaatgctgtgactctataatatagttcctcgtgttgtggtgaccaccaaccataaaatcactttcattgctactccataactgtaattttgctattgttatgagtagtaatgtaaatatctaatatgcatgatatctgatatgtaacccctatgaaagggtcatccaattctcaaaggggtctcaacccatgagttgagaactgctgatatacccgtggctccccactttccctccccttcccttcccttcccttcccttcccttcccttcccttcccttcccttcccttcccttccctcccctcccctcccctcccctcccctcccctcccctccccttcccccttcccccttcccccttcccccttccctcctctcccccttcccccttcccccttcccccttccctcctctcccccttcccccttcccccttccctcctctcccccttcccccttcccccttcccccttccccccctccctctctctttctttctttcttttttctttaaaaaaagacaagatctcattatggcctgtaactttttttttttttaactttatctgcatttatttgatgctgaatttattcccgggccttgagttttgtttcttcagtttcttccaggatttctttttcttctgtgctgcctcttctttgggctttggaacaatctgttgcttctcagtgaggatcatctcagtgtggcagggggagctcatgtatgggtgaattcggccaagagctctgtaggttttttcggcaccccttaggttccttgttcacctggctgtgttcaatgactagagcatccacgtctaaacccagcattcttttttggccaccatccagcctgtttggcccactgtttggcctgggctgcacctaccaacaccaccattattccgccagaatggcacacattgcttctttaaagtggcatccttcagatacttggtggctttgtggatatgcatacccttgatggcctgggcagtttcccgagtgttcttaaagtgaacatgaaggtttggacctcttgatttgcgtgattttgtggggtttttttgggtcaagagagtagcaaaccatcttcacaggtctcttctggccgcttacaggaagagtagcttggaactttttaaaagaaaaacaaaacaaaacaaacaaaaaactcaagaccaaccttattagcagagctgttgaggaatcacggatatctactaacaatgtggtgggtttttctccttgtaactcttacgtaactcaacctggcctcaaatttccactcttctgcctttacttcctcagttctgtgattacaagtgtgtactatcactttctctaatgaaattagttaaaaatttaatttgattatgtaaatacatgttttaaaagccagctgtttagaattttgggggtttaggagaaaggatgagagtagaaaggcatttactatggggcctaaaagcaacagctactgctgtctctctttactattgtgctggaattgaaacagctgactttctgtgctagaaaagctcccccccaccccctcccacccccgctcctgagctggagcccaagcccggcaacttcagtttgtccctaaattcttatccttttttcttaactcataatggaggggagatgtcaaagatgtattgtgtaactacagggggcttctggggtatttatagtttggattattcaattttttcccttactccagtgtcttgttcttagaatcttgggaccaggccaggctgagggcagggctctggaccatgatggactttagtactgtttgaaggttgagggctctttttttatagctactggtattttctttgtcttctctcaatgttgggtttaacagtgaattacagttttaataattgtaaaacaaaacaaaaaaccacaaaaactttaaggaatttggaaaggatgttgtacaaataatagaactgttagcctcaatcctaactctagttgtatgtaaatctgactggattttgggttttaactatctagccgaccccctccattctgatttttaaataatcccttagtatttgcatttttgttgtttattttggccttggtcatattgtatttaatcatttctaagaatacagtttgttcaaaacgaacacttattttatgatgtaatttagccagatcctgatgtctttctgccttgccttctggtaaagccttaaatctctcatctttcactagttaatttttagcattagcagctattagaaacaggtattaaaagtcatctttaatagacaaaggtaaatgttaggaataataagttattgtttaccttgattattatgagttttagatctgccttttttctatccttttacaaaattttaaatctacctaagagaagtaaaattgttcacagaaacacaattgtgctttgttaccaggatgagctggctcgggttctggtcactctgtttgattcccggcatttactctaccagctgctctggaacatgttttctaaggaggtagaattggcagactccatgcagactctctttcgaggcaacagcttggccagtaagataatgacattctgcttcaaggttggtgtcattgactttgtgtgcacacgtgcactaggtttgttgagaagaaacttagagactgtgtggagggattatgttttaaatgtaggatgtgtggctgtggctattggcctgactgtgtgtttctttaggtgtatggtgctacttacctacaaaagctcttggaccctttattacgagtcatcatcacatcttcggattggcaacatgttagctttgaagtggatcctaccaggtttgtcatcttgtcacagttgctccctcactcctccccagtactgcatgaggtcacctttatctcatgttcctgtccttggttttctggtggttttcatgaagacgatatgtcactgtgtagcccagcctgtccttaaacctgtgctcttcctgacgtggctcactctcctggggctatagcccttctcttcacttttaaaaggtttgcagtttttacactaaaggttatatgcaaacatcttccttaaagaataaaaacattaatagatatcattaaaggcatcattgattaccacctatggataccgttgtggtttactccggtctgtccttttcccattcttttgtataaacatatatgtaattttagaagatgtatactttattgtaattgcttaattttaaaaggtaataaaaataaatctgtggtttacaacccaattcttttggtttggtcataggccttagatctttctgtggaagtggatgaagattgctgttactcttttatactgctgcacagtattaagtagtttagcgctgttactgtttgtgcagtgcagtagcatagcctttgactttgccataacttccttattattggggttttgaaacaggatctcacagcataattgtggctgtcctggagcacgctatgtagacgaggctggcctggaactcgcagagatccacctgcctcttccccttaagtgctacagtcatatgctaccacacccagaccaacgtccttattagtattctaacattgtcttttccacactcaagctgtttgcagtggaaatgatttttctaaatgtaaatggggctttttgtttctttgttttgttttggtgatgttgataattgtatttgagcccttctacatgctaggaagtgcctagccactaagcctattcccaaccttagcagaaatctttctgatgcttattttgtgagacatcagcagcagtctgctcttgtcagcaaaatgcagcacagattgttgcttcatctgaaccacctttacctcactcaccgtgttcatttcatagtcactctaagctccaaggaaaagtacatagttttaaatgttcttgcacaaggtcctatgggattagagatacctaattaattatgtttcttatgtctgtttttaagaaatattattttgtgtatgtgcttgatatatgtttgcggtatacatgtaaaggtcagagtatacttccaagaatcaaactcagatcaacaggttttcttggcaagtctctttatacattgagccatcttgcctactcagtccttcatttctgaccatgataaaaaatcaagaaggcagactaagcatatggctaatggctgagtggtagataacttgcctagtagaatgagcccttggttccttccatcctcagcaaaacacacacacacatacacacacacacacacacacacacacacacacacacacacacacacagttccttccatcctcagcaaaacacacacacacacacacacacacacacacacacacacacacagagttccttccatccttagcaacacacacacacacacacacacacacacacacgcacgcacgcacgcacgcacgcacgcacgcacgcacacacaatctaagaagatataaggaagggagacatccataaatcagctgtaactttcattttagataaaaaatgactttcgaggggttggagaaatgactcactgattaacagcacttgatgttcttctaggggacttctctctcttcggttcccaacatccatatcaggtggctcatagctacctatcagtgcagttccaaggtatctcctggccttagagggcacctgaatgtgtggcatgcattcacacagattcacacatataaatgaaaccctttagcttggagaaagagaccttagatccccaggtacataggattgtttacacttgagcctgtgacccactctgacaagtcaagattttgaaagtctactctctatgttcacaggaagaaaaagtggctaagaattctgaggggctgaggacatagttcagtgatggatgcttgacacaaatgcagaaggctttgggttagctccctagggaaagctggaaatagaaaagaaaaggaaaggaggggaggggagaggagaggagaggggatgtgggggaagatacagggccagaggaacaagaggaagaagtgagagacagattggctgaaagaaagaaaaacacctagcacaggtagtttagattgtgtttggcttttgccattctgggaatcaaactatgggctcacatatgctgtagaagttttctgccactgagctacatctctagctgtcaataacttgtcagagagctgaggtcccaaggcaaaccaccattccaaaacttgtgtagaaacagctgaatacagagtggcagagcttaccacaggaaagagctgctggagccagtaactagtaggggtgcttagaccataattagtggacttgcttaaacattagacttaatggggcccaatctgaaggggctaccccacctttacttcaaaggcttgctgagtttccaggaggaaggtgagagaaacaacctttgtgctttggacaggtgaaacagaatcatttcaaatatgctcattggattctgttattcctaaccaacatatgtttcaagagaaaaacactctttcctagccttatctgacctagagaatgggcttttagctacctttgaccttccaccacacccacagcctttctgtctcacatatggagaaagatatggacaaaagctgtccttctgaaggatttaaggactttgaagttctgagactttggcccagcatacaacaacggagctagaaacttagagcattaaacagattgtcagaaggggaggagaatattctaaactcacacgttaggatgttcaagggagaggagggcattaacgcgggttccctgggcaagcacaagtcccagatcccatgtgagcagcctgcagggtagcctgctggttattgcctcctcccttccgacgcttgatggggccttgtggggcagtgagagccagtcctcaagtcctgagttctagatggagcagttctgttgctttagtcttttaatccaggtgaggcttccgtgagtgagtgagcgagctgtgtttgcatcagttccactccagcttttcctggcttcctccaactgcctactggcaaatgtaggaagccatttagaattgttttactctgtgtgtgtgtacatgtacgtgcacacacgtgtgtaaatttttatatgcacatgacctacttcatccaattacattgcccttatttgcatatgtttagggctgaaaagttaggattgaggtctcgttttgaaataaaatagcaataccaggaaaaaaaaaatctgggtctccccccctcagtacctatcggttgcctgtagttcttctagaagtggaaccttgttaaaatctcctcccattcacagaggcgtgggcacggtattgtctttgcaggtctcaagcaggcagcctgagagttcatgagagcattcctggtttgttgaaaagacactgttaagcagtagttgaccaggtcctcatgttttttacagtcagtcccccttttccttgatgtttcctgagccttaggcataacgttgtgttatacctaaggcataaccagacagcccatgctcactgacttagtctctgcgttttgaccacttgtagttctctctaataacctcaaaaactgtggactgatccctacctactagattagctaaggttgagcatccagaagtcaaaaagattctaagagctaaagctttttgaacatggtgctggcactcactaatgttgacattaccggcatgagctcagtctgaaggccacactgtggtggagagaggcctgacgcctacaagttgtccttgagcctgcctctgcctgcctgcctgcctgcctgcctttctgtctgtctgtctgtctgtctttctgtctctctttgtctctctctccatacaaatgagtaatctaaaaaaatccacaaaaaattctcaaatatgtaagtaatatctatggctgtttttatgttaaattctggtttcctccagattgtttttgtcatggttgctgttgtatttttgtagttttgaatgggtcctgtactccatgctggcctcaaacttgctaccaaactaagaatgacctcaaggtcattcttttagtcctcctgtgggcaccttctgagttttggaatttcaattttgggtttgttagtttgttctagagacttggccattactgtatagttgaggctggcctcaaacttatggctgtcactgtctccttatgaatattgagattagtgggagccatgcacttgctgttataactgctccttttcttttcttttcttttcttttcttttttgtagcaaatttgttgtttatttcagtgaggatcaggtcttgtgaggggtgatttttgtttcaatagtcatgtatgtttggttttccctttcctttgttacaggttagaaccctctgagagccttgaggagaaccagaggaacctccttcagatgacagagaagttcttccatgccatcatcagctcttcctcagaattcccctcacagcttcgaagtgtctgccattgtttgtaccaggtatgatgaaagttggagattgccactctaagtccaaagccaactgagaggagtgtcgtgtgcagagtcagctgctgaccatcatttggacacgtactataattaggatagagaggtagctaagtaggtaagagcacggctgctctcacagaggacccaggtttggtgtccggtacccacatggtggttcacaaccatctttaactccagtctcaggggagctcgggctgtcttctgacatcttcaggcacggggcatgcatgtggtgcatatacatacaatcaggcaaaacacctacacacagaggataaaataaacctaaaaatcaatctgaacgagctatcattagattggcgtcacattttcttcagagatatttaaagaactttaaggaaaataaattagccttccttgtgttgaaagcaactaataattcactatgtgtactgaaatgaggtatagtatgcatttttgcttatcttttgcctaaattacttacaggaactttcccactggaggcaagttcattgcttttttgcagtataaatgatttgaactgtaattttggcttctcctattaagagatcactggtttatctcctgttttctcaggttaggctaattgtcatatgtattttatgtagagtactgcttgtaagatagagaccacaccatgcagtagctaacagactttttaacccagtcacagcagatagtgctgctaaatttagatgtccacaaagattctttctgtgttgaaagaacaaggcctgtgttcttctgtaacttctgattttgaattgagtatgcagttttaggaataatttatttattccgagggattgcctataaatctgtattaatttttcaaatagggaaaagaaaacccagcataggtcctgaattttggaataagggtacaaaaaggaaaggacttacacatttaccagaactcatgcatttctctgactttgcagtatttttttttcttttttcttttctttttttttttttggcttgcagctttagttgcttagagacattaacatcatcagtgaaacaccatttaaaaaagctgcatgaggctgctatgtgagtttttctccattgctattttaaaagatatatctcagtgtctataaaaagaaaactttgcatacataaaaatatgataaaatatacttagcattcagttactggacgtgttgtgactttactgcgttttcagaaagctctgggaagcttaggaggctccacataggtcatccacctagtcgggtgtgcagctacagggtgggttaactagactgtggtgggtcatccccctagtcgggtgtgcagctacagggtgggttaactagactgtggtgggtcatccacctagtcgggtgtgcagctacagggtgggttaactagactgtggtgggtcatcccccttgtcgggtgtgcagctacagggtgggttaactagactgtggtgggtcatccccctagtggggtgtgcagctacagggtgggttaactagactgtggtgggtcatccccctagtggggtgtgcagctacagggtgggttaactagactgtggtgggtcatccccctagtcgggtgtgcagctacagggtgggttaactagactgtgatgggtcatccccctagtggggtgtgcagctacagggtgggttaactagactgtggtgggtcgtgctgattacactgtttgccactagactttaataaaaactcttcatgtggctgttcccataatgaaaaatgtatttgtatcatcagcaaacttgggcaccagtttgagagcactatactagtaaagtaaaaagaattggacacttaataagtatgtgggaaatatttcattaaggaataaattttatcatttctacacatttaagtaagcaggattcttgccagccttcctagttaggtttgtaaggaaccatgaacacaaggaagtgctgactggtggctcactctgtgctaccctgcgctgtgctgcttagtgcgcacttgacagcagtctgcattgcctgcactgcagttaccacattaaagcttcatggaaacaccatgcagatgttacttacgtaagcattactttgtagtgggtaaagttagtgcagactaccatggagcagaggttttgttgtaagattttttttttttaatgagcaaatattacagtgaccaaagacaaagatagaaataaaaaagcttcagacccaatgcatttttcattgagtctctggtctctgtccttaactcagcttcctccctccctccagatctccctccagatcttcctccccccctcccttcctttgttcctctttgggctttgcttgcccttgtagctttggcagtgacataatggcacccttgtacttttatgctctgctgggaaggatgggaacccattttttctttttcttagtaaacatagctcctttgaggatttactggggaaactttggaagctaagtgagtatattgctagctgatttttacttgagttcagatttggtttttcaggcttttttgtatcttgtaatcagctctatatattttccttcttagaaaagatggttaatgctatgtaacaataatacataatacaataatagttataatatgtatgacagatttattttttgtctcttctaaccttctttattttttattagatattttctgtatgacagatttataattaaatttttttcatatactatttcttttctttctgataaatttggaacaaagagaaaataatttctagagtgaatgttcagttctggtgagaaagatgggaaatagctactgtgatcttaagtaagcattgtctttcccacttcacgtgaggttatatatgtgtgttaaagctcaatggtagctgcataccataattgaaaaaaatctggatatttacatggttatattttgtaaactgccttaaagcctgaagcaaagcacactgagatgagcttttacctctgcttcctaggcctaggatggtgctggcgtctaggtatacaagagctgctagatggatgggtggatggtgggtggatggtgggtgatgggtggatggatagatgatgggtggatggtggggggatggtgggtgatgggtggatggtgggtgatgggtggatggatagatgatgggtggatggtgggtggatgatgggtggatggtgggtgatgggtggatggatggatgaatgggtagatggatttaaaactgaagggtttcaatatcttagaaatctagatcaaaaatttgtattatggttagtgtcttttttgcccaggtttgccttgaactcttgattttcttccattcacctcccaaaggctaggattacaggcatttaccaccataactggctcttatcctaagtttttaaaatattaaaaaaaatagttggtataatctaatcagaagttttaactttgaagaagtctttattctagagatggagctgtggtgagactgacacctgtgtgggttcacatggatggtttgggcttttgcatgggagagggcagtctggtaaatcgccatccataatgaatgacattttaaatcagatttaaatttgaatctacaatattatcttcaatttcttaactttggtattaataaactttttttcctagttgatgctaacattctttttccaaatacagcggctttcaataaacttagcaccatttcagggatcactctgtgggcattggaagatgtgagattataacagcactccatttaaaagatggagttcagagtctctaaactttgttttctgcatatctatccatttaattttttatttaataacataattaactgctaggtgttggaaaaataactcttaagtcaattgaaggatacacagagaagtattttatatatcagaaaaaattatgtagacacaatgtttacagtgtgtggtctacttcataataaatattttaagtaaaatttatcaaaagctaggaattgactcaagtataaatattcctgagattgcttgaggacagcttttccatgacttatagccagaaatagtagacatgattgggtctcaccatttcttgctgtttattttatgcttggcttaaaagtgtaataaaaattaaaatccaggattaaacttcatccctcaaaattcagttgatttctgcctttctgttggttccatttgtgttacattttaccgtgaagtttgtgtacaagccaacattgtttttgttgctgtatgtagccggtgctgtgacttgtttgtgctcatctctgttctgtaggcaacttgccactccctactgaataaagctacagtaaaagaaagaaaggaaaacaaaaaatcagtaagtttggagaactttttattagctgtttctttcgaagcaaaccccaaatctttgctatttgttaagaacatcttcacttcagctatttgaccttcactgtgaaatcattctactaattctggcacaaaatagctctcatttcgattaaccctggaattaagttacattgaaacattctctgtgttcctttggtttgatttaccccaaaggtatttttttgtgcattgatttattacattgaatatccttgatctaattttattgttatttttaaaattataaatgaatgcgaaagaaacttaatttcaaggccttaggggatgctgactgtcttcattcttgcttctcgtttgcgggtcatgtgagtggtttctttttctagaaacaaaagcatttcttgataaatacattgtgggtagaaatgtgaccttctcctgtcccaacagacattaaattcaggacgcacatgctagagctaccaaaaccaaggatcatttcctaactctaatctcaaagttactaagttttaatgtttactccttatatttttaccttgatagtatcagccacccctgatttagacatttgtgcttagatcatagaaattttaatgctgatgttccttttaccttagaggaaatgcacattacatctctgcagtgaggaggaggctcagtgaggccatgctcacacaggagcccactgtgcaaacgtgacctgagtatattgcctgcttctgacttggccgtcttgtgaaaggaagaaagttatgattgccataattattttcttcctacgaatatcatttgttcacagtataacttgcattcatttttaaaataacatcatctgtggatgtgacttaccattatccagtttagtcctgtctttgttcacttaatccaattgattatagagaatgatgtaattaaagaaaacccccaaaaaacaaaacaaaaaaaacccaaaacaacctttcacaagttgtagggagttttattaaaaaggaataatttaaagtcatatttgtctggtttcatctttcattttctacttttacatataataaagctttacatttataattgtattcaaaattcagaactaaattaaacttcagagactcatacttttattatgtccattcagaattttctttttgagtgtactatgtgaaattgatcatctctgaacaaatggattggattggatggctctcctgcttaaaacattttcctctaatgcttcagccttctaattctcagcattgtgggtttaacattatacatcatcactgtggaaattaatttgctgtttctaacattcttgtttactgttacactaatgtcattgtgtagcataacataattaaagtcaggctttctgtgtttctctagagcatgtattatagctttcctaacattattatggttttatataaaaattccttggaattttttagtagatatttcatatatgtatgaaattttggaatgtatttctcagcccatgtggcagtccttaggaaactaagggggtctaattggcagtacttcagaacagattctatagtataaagacatgctaatcattataaatttagaatgtcatgttttgaaagttgtttaacggaatctaattctttctcctttgagagcaagctgacctcctttgtaataagtgaaagaaagtttcgagtttgggtgattagctatgttgacagctgattcagttgattgtactcaacatagtgtgtacttagattactggagcggctgcctgcctaactcaagactttcaggatttcaccatgtatagctagtgatcctctgctgatatgtaatttattatatgatttttgtagttcaactttacctagggaagagtgtgtatgtgtgtatgtgtgttaggggcaagggatagctgatcattgaccttacatgtagaatatcatttacatccaaattagatttttatacacttggaaataaagaacaacatgccaggcatggtggcacatgcctttaattccagcactcagaaggcagaggcaggcggatctcttgagttggagacaacctagtctacaaagaaagtttcaggatagccaggccacacagagaaatcctgtcgcaaaatgccaaaacaaaacaaaacaaacaaaaaacttaaatatgtggtgttggataaaattccaaattgatgttaaatagaagtgaaagaaagagtagtccttttataaattgactcatgaaactttttatacagtatctctttattaattttaattgttaggttttagttccaaaaatatagatatcactgtcaaggagatacatatttacaatatgtgaaactttttctttttctttttttttaagatttacttatttttttatatattttatgcatatgaatacatcaccactgttttcttcaggcacaccagaagagggcatcagaccccattacggatggttgtgagccaccatgtggttgctgggaattgaactcaggacctctggaagagcagtcagtgctcttaaccgctgagccatctctccagccctgtgaaactttttctgaaacatgaagttttgataatattttttagagatctggaaagggttaaaagttatagtactttcatattaattttataatactcttcttagaagataattcagactttcttatgatcacaagctgagtattttcaaatataaacgaggagacaatgtaagttgtgcttttataagatctttatttctagagacaacgagcaagtagcaagtttttgtatttttaaaacaggtcttaagtgctataagcacccaacagaccttcatagcaggctggcctgaactcaaggcagtgctcttaccttcgtctctccttgcagggattacatgtgagaactaccacacccaacctctgaaacaactactttcaaacatacattataaaggctgtgtgcagccattgctaatacttataaagacactttcatagaagtttaataaaccaactccttccttaagggcaaactctgatgttggttgagcctattaaaactatttcatgattttggtgggttaaattgatattattatttttaaaacaacctgccaaaaagggttggagagatggctcaacgattaggaacactgactgctcttccagaggtcctgagttcaatacccagcaaccacatggtggctcacagccatctgtaatgggatctgatgccgtcttctggggtgtctgaagacagctacagtggactcataaaacaaacaacaacaacaaccccaccctgcttaagataaaagcactgatggactaggagcatgacgtccctaaagggagtgttagtcttcttccttcttcatgatttgctcccaaaacacttcatggtcttgttagcttactggtatttttgtctcagtttggaaattctaaatttggaaattctaaaagaactccatgtcaacgttggtctttgcacatgttgaaattatatgatgaatctgatatttgcttttttttttttaatcagatctgagattctagtacctcaaaagtttaaaaactgtcctagaaaagtaaacttgaattttcttagttttatatgcaaaactctatttcagctaaaaaaacacagctatatttagccaactccccaatttctcaggatttcctaaggttctccctgggtgctgtaagcacacaaaagaactgtaacccagagaagctccccgagccacggcaccgtatacaaagggaactggagctcacaaacctctctgagctcgttcctacgactaccccccaaggaatcattttctgaaatctttttctaattttttttttatcagaaacaatagaaaattattttgagatttttgggccttgggtaaggacacatttatgatacaacccctagggctggagagatggcacagtggttaagaaaaactggcttttctcccagagggccaggttcaattcccagtaaccatctgtgatagtagttccagcagatctgacaccctcttttggcccctgagggtatcaggcttgtaagtggtgtacagacttatatgcaggcaaaatgctcatatccataaaaaaagacataataaataaatacataaataaatatagataacacaaagcacaaagtggatcagaataaagtgaaatattcaagagttaatctgcagttgagtctgtgaattaaagacaaatattgacacccagtaaagaaaaataaaatgataagtacttctgcacataaaccctgttttctcatttctccaccccaggagcctttgagatgcagggtgtccttgtgttcccattattgtgagtgctacggctccactatcacagttagccacagcaaatgagaatagcttttgactattgcatgtgttcttttaaaaaaagaaatatgtatatggtctatacaaaaattaaattctaggataattcagtttccaagtgttagcttaaaatgggaagtattaggaagaggtcgaagggcagccagttctatgccattgccccctgtctggcgtgcctgttcctttgcatcctatgcagaacatttttgttatagagagaataggtccgtttacattgccttcctgtgacttttcaaggagagcagctatttcctgggccctgaaagattttgttttgttttgtttttggttttaatttattttattacttgcttggcagaagaataaattgaggtatgtggagcgtgggggatctgtcttctggtaggatccttttttcttttaggttcccaagagttcctgtttctcctgtgatttaaataataggtaggtccttatattaggaagcatgcttatgaagaaaagtggctggcaggaacatggcttgtaagtaagttttttcactcagtagaaatctaagcagagatgtgtatggtaagttgcactgaaatgtcaattttaacgggtgtgcaaagtgttagctattcctcttaggaatagagtatgtaggaggtgctgttagaaactcagctcttataaaagtcaactgtactttttatgtctgttgatgatagaaaaatatgttaacctttgtgtgaaattaagtctacttttgttggctataatgattatgaagtaaaatcttttttcaggtttctttgaggagatttttcttctcttttaattgtgtctttaaaaaaaatcacacatgattacagttaaggataaaccgtattttctggtgttttgggacaaggaaaaaagttaaaaacagatcattcaaaagattgataattggaattttgtgcagactttgaccttgaagcctttgtttccacttatatttcaacacaaactgtctgctcaactctcaactcctcctcctcaggtggttagccagcgcttccctcagaacagcatcggtgccgtaggaagtgccatgtttctcagattcatcaatcctgccattgtctcgccgtatgaagcagggattttagataaaaagccaccacctagaattgaaaggggcttgaagttaatgtcaaaggtgaattattttgatactcttacaacgtttaattttccttatagctaatttttcagtgtttcatattcaaagtactttgtcttcattttgcttcagttatgtgccttttgttttaatttgtttgtattgcagaggaactttatatacacacacacacatatatacatatacatgtacatatacatacacaaagtgggcactatgaggggaaggtatacaagcaaataagtatctaatttgtctaatcagtgagggttttctgtgtaactgctttgaaaaatttgaggtggaaataaagatgcagattgtaggatttctttagtctttattattgttgttgttgttaacagcatttgaaactgtgaacatgagccatgtgtaaagtgcctaccatgcaagcatgaggactgtggctcagatcccccagcacccatgtaaatgtcaggggttcatgacattcagcctataatcccagcatgctggaggcagaggcagggtccctggaacaagctggctagctagactgagtccaaatactccaatcatgtgaaagatgctgtaatatagaagatgggcaatgatggggggaaatagcgtcaaactctggcctccatatgcttgcacacatgtaccaactcacacttgcaaacgtgtgcatatatgcacatatcacacaatacacatgtaatagatactttgtatctataacatgtataataatatttctacttgaaaagaattaaaacaatatttaggatattttttacaataatgaataattgatttgaactgccagtagaaatatcaatggaaaatttatattttaatgactatattaatttataggtttcatatagcaaataatctgactactcataatcttgtttgattgtttaggtacttcagagcattgccaatcatgtactgttcacaaaagaagagcatatgagaccttttaatgattttgtgaaaagcaactttgacttggcacgaaggtaagcagccagagtcttcagtggccaccatgtctccattttactgcagtccgtgtatctggtctacattaaatttctgtatgtgattccccacccccccaatcctttctagactaagaccacatttttgttctgtttaactttaagacactgagaaaactctctggaacctgtaaagcactgttggcgttttctcacttaggcaatgctgcagaatgggctcaagaagattcctcgtattaaaaaccataaccatgcgatacaggttatgtcagggtgcttttatgttaataatacttttgtttctgcagtttagaagtgtctctgaatttaaaacaatacttcatataccaaaatgtacaaaaatataagattttgagtgcgaagaaacagataattgtagaggctttacgactgaattttcataactgattcttcactttaattctctgaattgttggtttatttgtaaccttggggtagtactgtctttgccagggttacttttttaaaaaacaagtgagatgattcctgggaaagtgctttgtgaaggtgctgatgttcagaagtcatttgccagcacgagaaactgaagggactggaatctgcacacagccaccacgaccaagtgctcagcacagatgagatttatttctcacagagggacagagagcaggaaatgagagacaaagacaggagatagaggataagggagagggagaagggatgtttgtcccggggaacaggggttgggccctggaatgatgacaaaggcctgcctctggatagagaggagacagacatagcccataggcaaatggcagtttataaaggtaaaaaggggacacccagtgttaggatgaggtgtttgattttagtggccaaagcagggcttttgactgctggacttccaatacatagataatagtcagcctcaagaggaggaagtggccaaataagggactagaccttagtggctacttttaggaatgtaatctaacagtgtttagcaaagtagaggggatggggagaagggcaaagtctgccagagccacgtttgcaggcttgagctggcagaatcccttcagaagcctagctgatgtcactcatgtcacgcatccttctgcagctgcccttccagtttgttgtcatacagtgcttcctggcctttggtgtcttcaggtagaaaataactattatgactactcacagatggttaagactaccaaagttccactcctggctctgacaggcagctggtgtaactttaagagaagtctttacctaggcctccatgtcttttatctgttaagatactagcttgttctccagattttatccatataaatttattgttctccaacttcagaagactgctctgcagttgaagtggaaactaatatcagaaatgggaagacaactttctccttgtgcttctcatttacactgagggcataaggccccctcctttgcaatcacagctactatattactagactctatataaatgtaatgcataagtatacctggggttaaaaattctaatggctttgtatttttgcaggtttttcctagatatagcatcagattgtcccacaagtgatgcagtaaaccatagtctttccttcatcagcgatggcaatgtgcttgctttacatcggctgctttggaacaatcaggagaaaattggccagtatctttccagtaacaggtatattttccaagtcttggggaaattaaacacttagtttaagttgaattaataaaattattgatcctaaatattgatcttctatttgcacatttttgcagtattatgatttggaaagagaagcgcagattcacatgcatatggcaaaacttaactcatgttatatgattcgtagcaccagctgtggaactacaagttccacaatcacagatgctatttattaagtgtatgaaaaccaagcagcatatagaaagtacccagtcagtcaggcacagtgccatgcttttaatcccactgtgtgcaatgcagaggctggtagatctctgtgactctgaggccagactggtctacgtgagctctgggcctgccagggctacgtggtaagaccgtgtctagaggtaaggcaaactagagagaatgagacgagatgcagtaactcaaagtatttggaaattatttcactagctttttagtaaaagcttctagtgacataaattaacctgctgtcctttgtcagagttatttccttttaagtttatatagaattgtaaagggctccaatttctgtgtctgaggagatcactgtggctaaacatctaggagatggaagtttaaaagtaaacttgttaatcctttatggagtgtttatgggttgatgtaggcatggacatggctgacatgtgcccctgaagcaggagaaggaaaggactttatcctggcagtacccaagtagcctggagctttgcttagctttgttttttgtttttgtttttgttgttttaagacaaggtttctctgtgtagccttggctgccctgtagaccaggctggcctcaaactcacaaagatccacctgccactgtctcccaagtgctgggattaaaggtgtgcaccaccaccgcctggctaataacctggaacttttaaaaatgaacattctcttcttttttcatgatttgaatacatatgcacagtttgttgaaatttttaaatgtgctactttaaaaatgatacatatttcaaacatgaaaatatagacaatgatttgatagtttcatgtctgctcactagcttgaatatcctgtaattttgatataaccactaaggaatagggggttggggagaacacacactgagtattcagacatataagcctatggggctattcttattcaaactaccacattgctcttccagtttgttttccagcacccatggcaagtagctcacaactcctcttaattccagctccagaggatctgatacaaacttctggcctcatacacaaatacacgtgaataaaaaataaatctttaaaaacatgatatgataccagcatttgggaggctgaggcaggaggatcatgagtttgaggttaacctgagctaactataataagacaatgtctcaaaaaaaaaagtccataaaagatcatcagttactatggttacataggctcatgtcccaaacacggttttcacaagatagagtctgtagatgagaatgttagaactatcaattctaaaaaacaaaaacaaaaacaaaaacaaaaatcgaacttaaaacagtaggttttacaggtgggaaataattgtgtttctaagatctgaaatctttcgatgctgcaaacttacaaatcaggcaggaacagtagttagaagaaaagcaagcggtggcagtctaaaggaaggtcagactccccaattaatgtgaagtgccatttaataagcatttcctgttgttaccagggatcataaagctgttggaagacgaccttttgataagatggccacacttctcgcgtatctgggtcctccggagcacaagcctgtggcagatacacactggtccagccttaaccttaccagttcaaagtttgaggaatttatgaccaggtaaaacacaactttgaaaggatgaatatgttttgggaggtgtgaaacaaagtttattaccaaaccacttactgaatgtgctcatgctgtattaatatagcatgttttgttttgctttgatatattgattttcttataaaaagaacgatgtcttacaaaaaagccagctttttttaaaacatttgtttagtgtgtgtgtgcttgcgtgcgcgcttgtgtaccattgccagtgtgaagtcagagaacaatctatgggagtcagttctctcctcacaccgtgtcccacgggaccaagcacaggctgtcagttcagtggtgagtactttcagctgctgagccatcttgcaaggtctctttggcgtagtcttcatttaatactttaaagaacatatagagagataccattattttcatgttatagttttagaaaatacactaagcagacataacttattgacctgaattcacacctgctttatggttcttttggatttaaatcctaagttcttattaccgtactaacccttcaaaaagtccatggttctaattttttttttttttttagtttaagactcagaaaatatagtacacttaaatactgctacaacaaacattgttttatatctcatttagaggactctaatctatcaactaaaagattctcactagtagacacacacttgattatatttcacaaacagtacattgtgaacggctgtgagttggttgttttattcataggatgtgccaatgacagaaggaaaacattctcacctgatgttcagaagttaatttataaaagttaagttagacagtaagagcctactttggggagagagggaaagaaagggaagatagtgtgagaagatccaagtctgtaagaagaaagctttgttctctttagtaaggctaagccttgtctctctactgcattctcctcttcttgctctctcctcctgctctgatgtcacagtaatgctcttactctcaatgccttttctcccaatgctatgcctttacttgtgagtttttcttgagttcagttctgtctaaaaagttctcctttgtcctgactaaaaaattatcctcaattctgttctaaaaagttctgttcagataagctaaaaaattctgtctaaaaagttctcctcagctcagttctgtctcttctctgtgcctcagcacttatacatctttttgaatatatgatcacatggtaaaaatttcatcacaagtttacacataaattcaaatcataaattgaaatagaagtttacaacggagaattttgacatgcatatccattagaagtaattatttggctaaacattcattaccagtcatggctccacaggttcatagagaattgaaaaccataactaagttattagtgaagttttgtatagataaacccagttgacatcttctgtcctagtatctataataaatcgtagttccctttttatgcctttggttaatggttttacaactttacaacttcttggaatatactcttgaatagtagactatctgtttactatcagaagcaattaactggtggcacatgggagactggcagagttctcattgcagttttgactatcagaaaaaaatctaatagttgcactgtaaaagagcttaataaatactgatacaattttagaatttctcatagtatcagaaagaattaggaagtcatctgtctatatagcattactacaagacagtacgtcttcatagatctgcagagatctgctcaaaaggatgggctaatatctagtgattaaaatatatgtaataataacaggagaagcatagtaatagcaggaatctctcctaaaattattttcttctgagctgtgccttcgggagcaaatatgttgtggattatattagtcctccgaggaacactatctcaggaagatcacctgctagttattagcttgtcctgtgatgaattctgacactttctcacctttctaaaaaccataaatgagaggattgatgaactgaacttgcaaggaaaagcaaactaaaaatccttttatctgaaaaaagaagtagcatgggtaaaaggcgagcaaccaccatgcatgtccaggggtggtgttaagtaatcccaagagagtcatcctgactcaggaacacaccttgacattttgcccttcagaaaactggttgctttttaggtattttgctttttggtgtttttctttttattgttgattaatcacatttttctttaactaggcaacaatttgtataaagactcttaagtgactccctctttgttttaggcaccaggtacatgagaaagaagagttcaaggccttgaaaacgttaagcatcttctaccaagctggcacctccaaagctgggaatcctattttttattatgttgcacggaggtaagaatacattttagtctcttttaatagggtttttcaagtgatagcaattgcagaaacgtgatgcgattttttttttttccttcttgaattaatagcccttaaagccatgcctccctagatagtatgcttactactaggtatttgtttgagagtatgcacttcatatgtctttgctacatcagatgttaaggcaccaccacaaggagttactatcagagtgaaaagtctttcgggtatattctgattttataatatctgcaacacaaaaatcagaaccctccctacacacacacacacacacacacacacacacacacacatttaagaagaaagaaaagctagtatattgtatgagactgtatcagagcaattttatcagagcgatttaagaaagaattactggagctataggaaatggctataaagatggatagggtggcctgggaaatagactgtgatgtcctcagccatgccatgagctgttcttcttcctcttcctcttcttccttctcctcttcttcctcctcctcctcctcctcctccatctccatggtgatgggcttgccttgctttccctgccatgtgaaaactaacatgtggtggtacttggttaggctctcttcttcccatgagaatggcacaacccacagtggctgaacttggacaaaaagtgatactacatagtggcccatgataacgagatgttaagggcagtccagcagctctaggacttagtcttctcaaacttaacagaaataaaggaattatgtttattgactatggtcatgcaaaaacgtggcagaggttgagaaatcatacaaagcaggagaaggaagaagaatgagaaacgtgaaactttttaaattagatactcagctgtccagagttctgagtaactggggaatagaaaaggaacaggaaaacacgcttacctttgtcctttttttaacaactttaaggaatatcttctaattctaggcaaatgtgttagtccatttttaaatatagcatttaagaggccaaggcaggaggattatattgaattagaagtccaccctgggctatctcaaaagacctctcccaaaaaatgggaggaaaaaacgaccctccttatctctccacaaaactgttcttgtcttggttgttctttctaagataattttagttttctgtcttttttttttttggagacagggtttctctgtgtagccctggctgtcctagaactcactttgtagaccaggctggcctcgaactcagaaatccgcctgcctctgcctcccaagtgctgggattaaagtgtgcaccacctcgcccggcaattttagttttctattgcatttcagccttgttggtatttcagctttaacctttagtactatcagggtattttgacttttccctgctatatctaagttgtgaggactggtaaggagtgtgttagatgtgtgcctcactcccagccccctttgaattctttgtagtttaaaggtagcagaatgttggattttatcttcccctctttatgataaggaactgtaagtttgtggcctttttctctggtggcctagcagaggaaaagcagattggcctggcctttcgacgggtttccacagctctaaatcaggcctgcacaccttaggtttgcagttgccagggatccccagtctgcggcttattaggtgttctgactcttcatttttgagaaggaagaaaatatgcttgctaaacttctgtgtctctttcggtgtaattttgtaacaaactgagtttcgtgttttctttttctggatatgatattgccaaatcaaattttcagtacttaggagttttagtttttgcttcatgttttgaaatgtggccttaccaagtagcctgtctggcctataactcaagatcattctgcttcagcctctcgggtgctgggtctttgggggcttttttgtttttgttttttaaatgtacatgaacatgcttgtctatctgtgtatcctgctgccttcaagaggcttccctggagctgacgttataggcagttgtgagctaccatgggggtgtttggaattgaacctggatcttttggacacatagctaattctcttaactgcagagccatctctgcagttcctgagtgctggtcctaaagccatgtgtcaccatgcctttcctttctgagatctgggagagcttctgctctcactttcactgggtacaatgcctacctgcaggacaaaggggcacagtgggaagagcagagagaggccctgtttctcattgtgacggtaagtgaaggccttatctgtacaggcttctgtgacaagtggctctggagtctggcttctttggtgtctacagacatttgaagtctaaatgtctttttggcctcatcttcacatcatgtgttctttccctgtcatcgtaagactctccttttctttcctcctgccctctgtgggaggcacctgtgaaatcggatggatccgctgaggtatttagtgtaggctttggttattaccaagtctcttattttatcagaaagtgggcctaaagaaaaccacgagtcaagagccataccaggaagaaacatcactaagccataattgctgctctgtttcttggctttgtgtttaactccattacatggttctctgatttctgtgtcatttcagctttagctcagccagtgaccccttcattacctcaatatagcttacctgacgttcttgatatgtggttcagctggaaagtacctcagtgttcatcagtgactgtccttacatacaggtttacttattttaaattggatcttcatgatctattcattatctagtattaccatctgttacttttgaaatgtcttacattaagttttatttatttttattattttatttatgtatatgtgtgagtatatacacacacatatgcatatacatggaccatacacacacactccccttgtgtatgccttatgaccttaaggacagaaagggctgtagctgtcagtggtttgtagtcttccagcctaaaaagcccttgtcacccacttgagtagcacctcaggctttactggcttgtcttgagtttcttgtcagtttcttagactgtcacgttagcaaggaacatggattatttggttcgtcaggcctgggtcatgagcttatgcttagagctcagcagtgcatggatggcaatagtatatttctgtcatttgcctcgtgtgtgtgtgtgtgtgtgtgtgtgtgtgtgtgtgtgtgtgtgtaagtgtaattaaaatgttaaaacctaagcatttcagttgagagtttcctctttgggatactgtgattattcacagctgtttggaggagggcattaatacaaattataattcatatttacttaatactttcttcacatcaaactacatattgtatattatataattttttatttcatcccaatattgtataattttttatttcatccctatcataaccttctgaggtattatttgcaatctttgacatgacagaaactcaatcctggttatcagaaaaatctaaataacagcattttctaagccccctgagcttccacatcagaatctaaggacaaggcttctttttaaattttttcattaatgtatctatttattcactttacatctggatcacagcacccctccttcctctcctcttagtttcatcctcacaaatccctctccccattaccccttttcttctctgaggagaaggggagcctcccctccttgggtactaccccaccctgggacatcaagttgcagcaggactaagaacatcctctcccactgaggcctgaccaggcagtccagatagggaaggggatctagtggcaggcaacaaaatcagagacagcccatgctctaattgttaggggacccacatgaagaccaagctgcacatctgctacagatgtgtagggggctctaattccagtccctgcatgctcttttcagccttccatgggcccaggttgactctgtatatctttctggggtacccttgacccctctggctctctcagtcctataccccactcttccacaaggctcccccaactcctcctgatgtttggctgtgggtctctgtatctgcttccattgctgctggatgaagcctctcaggagacagttatgctaggctcctatctgcaagcatagcagagtatcattaatagtatcaggggttggctctttcccatgggatggatctcaaattgggccagtcagtggttggctgttctctcaatttctgcttcatctttatctctgtgcatcttgtgggcagaacaaattttgggtggaaggttttgtgggtggcttgatgcctccatccattggaagtcccactgactacaggaggtggccacctcagtctccatagccccaactgctagggttgccccaatagactttgggagcctttcccaatcccaggtctctggctagtcccacagatgcctccccgctaatttctgtcttctctccccaaactgtcctgcccctacccccacctgattcccatccctgttccttgccttactctatctcctatccagttcactccctctgtctacctccaatgtctgtttcatttccccttgtgagggagagtcatatatccttggggacaaggcttattttgtatatttaaactggcactcccaaatgacccatctgtagtcagtccacttgggttctgctgtgtcattttactcttgatagcttagctagttagaattgtcactgagttccaaactaatcttaagttgttttttttttttttaagatttatttattattatacataagtacactgtagctgtcttcagatgcgccagaagagggcatcagatcttaatgggtggttgcgagctaccatgtggttgctgggatttgaactcaggaccgttggaagagcagtcagtgctcttatccattgagtcatctcgccagccctaatcttaagttctaactcaccatgtcaataactgcaggaattgttactgttagcatactgagtttgttaagttaaacccattcttgtatataaacataaaaatctagccaatgtttctttagtctcagtactcagcccaaggtagaagtagttgagtctctagtttgaggccagccttgtctacatagtcagttccaggacagccaggactacgtacagagactctgactaagggaaggagagaaagagatgggaaatggacagaaggaaaaggatggaaaaagaaggaagtggggagaaggagaaaaggggaggaaaaaaagttcagctaacagtcaagagacattttcctaggtaaaatgagttcttagttctaagcatctgatttgcaaacaatcttttggaaccaagtcaatatttactcagaatacgttcctattattggatcaactgtattctgctttaaaaaggtcctggaatgatctactgctatcatactttcatgaaagtggtgtcccacaaatgggtatgtttgtaaaagactgttgtttataccctatttgtgctattcagtctatttaattaaaaataataaaatataaaacagcttcagcttcccccatacctctctttatctcccagcttctcctgcccccttgcttaaatgcctcttccataatttcttctcttatctttaatatagacatttgagtttgattctattttgcaaacatttaaaacacaaatgtgatgttttgcttattttggcatttaatagagcactgcacatttataggaaggaaatgattatattaatgtaacatttaaattatacagttaaaacttgccatggttggggatttagctcagtggtagagtgcttgcctagcaagtgcaaggccttggatttggttctcagctcaggaggggtggggagtgacaaaacttgcccaaacccaaatcttactagaataataatttcttccacagtaaattaatataaattttattttcttagtgtgcttgtcatttagtaaataatatgaggtgctgaagtgagcaggcatttgggctcatttctgcctgagtatgtacaaaagagtaaaaatactgcacagaaaaagggagtgagtgttgaagactggtctgagtgccgtgctcccgcctgccacagtccctgcagtcgtgtttatgcagggacttgatgacctgtttccttgccaggtgctcttggagatgagctccgagggctttgtcccaggattgaggcttggtcttgatatggcctgtgggctcctgggggaagacgagagcattccaggacttgggtttcttgtagaatttgaggtggtagttgttgtggttgtggttgtggttgtggttgtggtcatcccaagactcaagttttttgtagaatttgaggtggtatttgttattgttgttgctgctgttgctgctattgttgttgaaattgttcccataatatgagcacacatgaggagcagggtgacagtgaaggaatgcttggtcatcgttttcttttgctttaaagtgatcataaaatttaatactcagttcacaaacacatagacaatcacatatctttagttgtatctctatagtatattcacataatataaatggacttttaaattattcattaatgaccaaataacaaccctcctttctgaacctcacccgataacagacttgttttctatctaggtcactaacttcaggaataagcgttctgaatactagaaggagcttgattttgttttcctgttttgcaaacaagttaaccatgaggcatttgaaccagtaagaatggggttggtgtgaggaacaggacagcagcaaaggttcgacctgaaggactggctgacagactgggtgggagaggagagtagcaggaggaggaggaagcttctcgcttagtagtttaaggggtagctctacaaattagaatattacttttaaatctttacaacaaagtagaagaaaaaaaccaaccataagtcaaatgatttccccaatgctaaggtttccttcattttaaccttctttaggggtagaagagagcaaagggcgagctgttaagagaattccatagctttttaaaaaggaaatctagaattgactacaaatgagtctgccattttacagctgagcctacacgaggggtacatacagcatgtctagagatgcctattctacagtaagcagactgagagcctgagtctgaatcctagttcaggttctttagccggtatgaatggtaacacagagcaggctcctataccaaagggtcagtactctctctagaattaggctacttttctcttagcatgtattcaaatctaatagcttgctatacctgtaataagcagacccctgcttaccatgataaaatattatattttttgttcaaatcttaaacttaaattttaggaatatatacaagaacttctatttcattctaatacatagttaaccattttcgagttactactaccttttgatttggcagactagttttgaagattatgaattcagcctttgtcttgggtcctggagaatgatcctgaagggaagtctcttctcactctccgagttctaaataatatagctaggagccagtcacgtgcttggagcctcgcctctttggaagtatcggaaggagcgtttccaaacatctagtgtaaacaggcagactttgacagagattaaggcattcaaataaaatctttgtaaagtctatgtacttacttaaaggatccagtgaatacctcactgcatttaatcttcctgcatgcacccaaatggattgcttcattgggttgactctaactagacgaatatataatttgctttgtaattatcatgatttcaaaccaagtaagagcattaatgatgattttaaaataatttaggaattttacatcttaagagattaaatgttgataaataaagataaaagtaccctcgcatggcactttaaagaaagaattagacatggaagtgatagtgtgagactcaattacagaagtttccttttaaaaaatgtcctaagccacctctctcacgagctgaagtcagtgttttccggggaaatagggctgtgttgtagtaacagcttcatcttcatggcaggcaccgtgagtgtagcaggaatggacacaaggtgtggtgttggtacacaaggaagtcactgcgagagtggcggggaacaagccagtacatgtccttactctgtgctgagtttttcccctcctttgaatgaataggcaaatgcttgctaaatctctaacctcacttgtggagggtagttgtgatcatacttagaaaatcaacaaaagaagcctcttggcaaccagagcagtgcactaagtcactgcctgagatagtgagtgtctgctaccatgcctctcctactccctgcttattctgagaattgactctagggaatagagttgaaatggttgtagtgatgtttactccttgagctaactgtggcccagtaattaattatgtttttctaaccctgaccttttgaatttattcttttactcctccccgcccctctttgagacagaatcttctgaacatctggccttaaactcaccatcctcttccctcacgcttccaagtgctcagattacagtgtggccatcaagtctgcctattcagcttattatcaagcttctaacaactcaatcttgccttacttacttcagtgttttctccctattttttctcagagtctctttgttttgttttgctttataagatagggtctcatgtagccctgggtcttctcgtaatctgttaatttcatttatcatttagccaaatgactagctgtctaacctttggtttctcactatcttattttttttattaaccttaatgatgctaaacaaacaaaaattatttaccattatccagccttgaaagaccttaatattgtcattgtgtctgaagttttttccttccttgctcagagttcctcctgtggaggcctacctctgatgtcagtaccctttttctatgtatgaacatgccctaattttatggtgaagaattagtcattttaggaaattgcagttatcagagtctgggttttttcttgccctgccttcaggtcaagcacacctcttattctttgtattttctctaccttctagcatagtaagtattattaagactaggagacactgggatttattgaaaagctgtcagtttatttctgtctctccaatgatatgattagtaatgtctgaagtagcaactattggtcatttgacttatttcctctgtgtcataaacatacgttcacgaatcatcagcctaaatttaagagcccactattattttctggcttctatttggtaggtcatatatacactcatctttgacaacctaaagttgaatcaatagaagtttgacactcaaattatttggaacattttacctgggttggtatgagacttggacttggtatatttgtgcttcttgtctccttccagcatatcgccataccactcctgtcagccttgtggttaactacctgggaatgtacctgagtgctggtgacatgagttgtgtgacttgtcctgggtgacctatttccattcactctagacaaagagggaaatgatagaccgaaggagctattcttccaagttgtgctaatagtgttccaggagcatcagtgactcagtgtgcagcttcaccaaagcccttgtctccatcagtgatggatctcagagttgcatgcctggagtcttctccctccagcaactacttacccctagcatacccttcgggacagggagcgtggctcctgagcattccttctgtccacatgagaaggttaatagatccattttcatgagggttatcacgactgatctgatcaagttgacaaccatcacatccagcccagagaaaacaatatgtacatcattttctggcctggtgtttggctttgaaccagttctccaaagtttgttggagggcttcttcaaaaccctagaagagagtagaactaaatgactcagtagaggtgagaaataaacttttgttgtcatagctggaaatacttgagggctgtttataatagaaacccatctgtgctgtttgccaaatcccatgttactctactttacatcctgcttctacctgagatgtggatctgaatacagaatcttattgaacttttctcatctctgaattccacttgactaatagggaatacaaggagactgaagaaagaaagggtaggtgagaatgtattctcttgttcaccatggctgcctgcatccttccacgagatgatggttttgttaggtaatcccctctctgtatttactttctggtaactgctctacttcagctggtatttctaactgtttttgtaattgtctaaagccctgccttatccttttcatggaatctcttgggtcccaaattgagttttctaccaactagaattttacttctacagattatgtactgtatcttcttctacactcaactattttgaattcataaatttatcttgctctgaggatttcaaatcagggtcatagatatacactaaatttgaagatttttgtgtaccttcttagaatgaggcaccattcatttaagaatatgttaaatccttgggtatgatgatgcatgcctttaattccagcatctgggaggtactgggaggtactgggaggtagacattctgaatttgagtccaggctggtctacttagtaagttccagaccagtctggcctacatactgaaatcctgtctcaaaaaccaaacagacaaaaaccatagctcagcagttaacacttgctcctcttgcaaagggtctcctttggtttccaacacctacatggtgcctcacaactacctgtaactccagttccagggaatctggcctctatagactgctaaatgtacatgatatacacacacacacacacactcaccaagaaaacacacacataacataaaataaataataagtatttaaaattgctgaaaaaaatctggtaaattatgtgtagaggtgagagagagagtgcacacacacacatgtgggtatgtgtacattagtacaggtgctctcagaggtcagaggcatccctggagctggagttatacgtagttatgagccacctgacttgggtgctgagaaccaaacttgagtcctttggaaaggcagagcatgttagccactgaaccatctaaccccctgtattaaaagctatatcatgctgcaagtgtgtagttgtttggtttgggttttattgttaatttattgacttattttgagacaagatattactcctgctcagaccaacttggaattccctatgtaggcattattgactttgaacttatgggagccctccaccttctgcctcttaaatgtttcgattataaacatgtactgcgatgcccagcttataaagaatttttacttatatttaaaagttgaacatttaaagcatgttgacaatatatagcacagaaaatggcttttggtgtttcctgttttaaagatgtatttctggtttttctaaatatgtgtaggtgcatgtgtctgtgtgggggtatatgcatgtgggtgcttgtgctcaaggaggctagagaagtgagatctggagcctgggttctagacagttgtgaactgcctgattcgagtgctagggactcttcctcacaagtaacatgcaatcgttactgctgagccatctcttgagaacagtattgcttttaaacaaaggatttgaaaatttcccaaggtagtagatatacaactatcccaaaaggcaggctgctgttagatttaattcttagtaacattttcaattgcacgtaaaccaccattttctttggtttagaaatataatacagggaaaagacatgcttcccctggtttagatagatctatcttagggccaggggtatatcagtcagtaaatggctttccccgcatgcataatgtgagtttgagaccagcatgggatatgtaagaccctatctgaaaaacaaaacaaacaagcaagtaaacaaaaagaaagcacaaaccacacattccagagcaagtcaccacttccaagcaaatttggtttttaccagtgtaaacctgtaagtttctagtcttattttgacttgttgtgacttgttattcataaccaatgtaaactagctcagtattttgttaatgtcatgctaaaagactttcaagaaagcatatagccagggatgatagatacataactcattttcagaattaaaatttgttggaatcatgaatacagaaacaaatgtggcctgagtggatctgggttagagtacagttcttccctcccattgttccctagaaaaccaaaagagacactgcttgccaaggccacattacctgtgctctcctgaccacagcccataacatcctagagtcattaagctagactagggcttggaatcagaatttagcatgacttgactttgaaaagattgtctcctctttttcattcccttgtggatgacagtatttccatctcttgagctttaaataaagttaacatcatcttactaaactaagtcttgtttgttctgcttcagaagaagtttatgctgcattccctatattatagactcactccgcagccccacccatattcttatctgcaatgtgaagaaccatgtagtgaatgtaagaacctttagtagcttgttagtattattgtgcagcagctatgttgcgctgacctctaggctgttgctttaatctctgcatccttgcacatttcttccagaatgtcctatctctctatggccatggctgtgtacttccaggtagaatgttttattttatgtactattaactaagattttatacataaggcatttgttttccatttctgagggttttccatgtcctcatagctatcaatactattattttctcaaaacttttttttttaaaggaaaatgtatgttatgcatgaaaaaccaggaaacaagtggctgagagttatggtacacacgtttaatctcagcactctagaggcaaaggcagggcaagtagatttctgtgagttcaagtctatcctggtctgcatagtaaagctgtaggccagcccaggactacatagtgagatctgtcttaaaaaaaacaaatagataaagtgtagaaccattatctacctcctttttataccatccaacatgtatgtgccacgcttgtaaactgtgtctgattataaacccttcatccttagcatctcatacacgtcctacatagctgggctgctcaatctgctcataaaatagctaaagcagtgtcaaaagttgtttggtaaggtgctacatgctagcttgtctttctggaagtctgtcgcctagtacatgtacctgagctttgacaagctatagaaggtatcaggccagttgtcaggaagacgctagagcagtggttctcaacctgtaggtcgtgaccctctgtgtgttggggggtgcctatcagatcttgtgtgtatgtgtgtgtatacatatacatagatatatgtatatatgaagtagcaatgatgaactgttcatggttggagtcactccagtatttggaactgtattaaaggatcacagcattaggaaggttgagggccagtgccctagagacgagctaagcagcagagtctgcccatagacttagaatgcccaacacacatcctgtgtatcataacctctgctgaagtggtaataaagtagttttaaaactgttttcatctagtgttcatgtcatggtagaagacttgttagtcatcatggtgagtagagacatctgtaaacgaatgttccatatttgatactccatgcctcacattttgctccacttctacaaaccatcttaccctctgcttaccctggcagtctgccatgtttacctttaataagggcaaacttgaacttttcactcttgagtcctctaagcagggtcgccacctcctcaaataagattgtatgtatgtgtcacagattataaaattcagcctcttaaagtccatagtttcacgattgtagcacattctgagttgtactttcattactgctagtttttttttattattgttttttattttatttttatttattttttagtatatagaatagagtttattcaggacatggggaacggagttgagaggatagtagagacagacaggagagaagtagagcacatgtagagggggaagggaatggggagagagggggagcagggagggagaggacagagggagaacaagaaggcaagagagcaagagcgagcactgctagtcagttttaaagagtttgatcacctgccccccaaataaaccttaaagccattagcaagcactccctttccttgcacctgacagctattgatcttcgtgtgtctctgtgggttgcatattgtagatacatcatataagtgaatcctacagtatatgttcctttgtgacttcacacgaattttcaaggttcctctgtgatgtctcattcatatatatatatatacatatatatatgaacatatatatatatatatatattcacacacatgtatacacacacacacacacacacacacacacacatatgtactgcatttcattttatatctgaccagtattccattgtgttgctatatcacagtttatctttctgttatccggtaatgaatttttctccacattttgatcactgtgcatagtgctgctgtaaataaatatatgtggttttgtagggtctgtgttttcaggttttaaattatatatctagaagtggagttgttgaaacatggtgatcaaatgttaacctctgaggactaacttttctaaggtacatatgccattgtattgtcctgtgtagtgcataagcattcaagaatctctgcacctgaccaaatgcttgctgttccctgtttgtctaggcaaattctgagaaatgcttcctctaatccacagtgggttctattactattttacagtgaccatgacagaatataatgttatgtttctatgttggatgtttagttcctaggttttacatatccttatatacccagaaaatctagtatagagatgggattttacagagcaattaaataaacctagattttgtttgttgtattttgtttttgaagtggggcttgctttataacttagtttaaccttgaactcaggatcctgactctgtctcgcatgtgctagaattacaggtttgtaccactaagcctaatctgacttgttgttgttattattgtttgtttgttttggttgtccagtgtttcaagacagggtttctctgtgtagcgttggctgttcaggagctcactctgtatatagtccatgctgaccttgaactcagagatccacctgcctctgcctccctagtcctgggattaaaggtgaggtatgcaccaccacttcctggctggagactttttttttttttttttaaagatttttaattatatgtaaatacactgttgctgtcttcagacgcaccagaagagggcgtcagatctcattacagatggttgtgagccaccatgtggttgctgggatttgaactcaggaccttctgaagagcagtcagtgctcttaaccgctgagcgatctctccagctggagttgtatttttgattacacacacacacacacacacacacacacacacacacacacacacacacacacacacacacacattcattggtagtatttaaacttgtctaagattcacgctcatcatggtcaacttatttcgatctcaaatctttaaaaagagaaggtgggtggtgggggagtggaattgaagttctacagagatccagaggaattcttaaatggttttcttttctgtgatacttggtttgtagaaacagttgccatggtgctcagttgcattacttcacagggatgctttagtgattaatgcatacagactgacctggcattagtgtttatagtctagctgctgctctgtaaagataggtggttgaatctactttctaatgcatccagtccttgaaagtaaataatcctaagaatattttcaaggtttatttaaaaatatagagcaccgggcagtggtggcgcacacctttaatcccagcactttagaggcagaggcaggtggatttctgagtttggcgccagcctggtctacaaagtgagttccaggacagctagggctacacagagaaaccctgtctcaaaaaaacaaaacaaaaaatatagagcaagtatgtgagaataaacacagctgggttaatattgttctctacaaaaagagtcactaatagagacaatgtacttcaagctatgccaccttctaacacaacattttaggggaggaggagtgttcttaaagtttaaagcacattcttttacaatatgatagaaaaacatacttgaccttttttggtttaagatgacaaaataccaagtttaatatagttttatttatagtgaggtttgttcttttttgttgtaaattaaaaactgcctcttgggcgcatgcctttaatcccagcacttgggaggcagaggcaggtggatctcttgagtttgaagccagcctagcctatagagctagttctaggatagccagtctgggctattcagagaaaccctgtctcaaaaaacagaaacaaaaaattaaaaactacctcttaaatggttttgtaaatccaattatggatttattggattaagtaaaaacacttatgattgctttgatgaactatacttaaaatccattaaaggtcattttatgatttatatgtgaaaatatttttcctagttttaaatatctccttaattctccaagtaatttgtttttttgtttttgttttgtttgtttttttgtttttgttttgtttgttttgttgttgttgttgttttgttttgtttttgtttttcgagacagggtttctctgtatagccctggctgtcctggaactcactttgtagaccaggctggcctcagagatccacctgcctctgcctcccaagtgctgggattaaagccgtgtgccaccacgcccggcttgttttttgctttttaaaaaaccttggcttttacaagtgtatataagttcatacttaatggcttatagctttctggtacagtttaaagtcaggacaaagacttagactcttttatgaaagcaagagggttgggtatggtggcataaacttataattccaacattgggtaggctgaggcagagtcagaaaatgaattcaaagccagcatatgttatataggagggcctctcttccaaaacaacatgaagcaagaaaagatttgatgttttcttatagaaaagctataccatgagggaatattagcccctactgttcgatgaaattattttttagacaatgactttacttaattgccattggtatgaggaagtacacaagtgtctacacaataagctggtgaatggctgtggccatgcgccagatagtcttatgctatatagtgctcagatgtgttagtggtcattgaagctttggttggcaaataatagctttcccagtggttattgtggtatatggcatctttgtttttccttactggtggtttggtgtctcctcctcctctctacttgatgaaaagccattaaatctgagcttattttctgttgaggcaagtatttgaaagtcattcaaactccctcagcttttgaagtgctcattgtgttgaaactgtgactatgggcaacaaaataatgcaaaataaagggttgtgtttcctggtgtgattagtctgatgacctgagtttagatcctcagagtgcacagagtggtagcattggagtacatctgtaatactcaacattcctattgaaggatggaaggtggaaacagggagatatcctggaagctcacaggccagttaggctagtgtatgcaacatacaataagtgatactctgcctcaaacaatgtagtaggtgaggaccaacacatgaggttacctgacctctgatttctatacagatgtacagatgtatacacatgtgcttaaagttaagtcatattttttatgagataaacaataagtcagctctttgaagtataactgtgaaagggaaactgtatgcctcatgagttcaatcatatctctttctgagctcattagtgatccaaaattacttacacattaaaaggtatatgtatagacagatgactcagcagttaccaatatttgctactcttccaaaggacctaggttcaattctcagcacctacattgcagctctcaaatgtttgtaactcgcattccaaggagtccaatgtctccttctagcctcattaagtactcggcatgcatgtggggcatacagtgtggtgaacaaaatacatgcagcagaacactcgtgaacataagacagagtaaactgtctgtaattaaaacacaaatggtcaatacatttgacttgagttctttccttgtgtgtatgtgtctgtgcagttatgcacataacatgcagaggccagagttgatattggatgttgttttctattactttctaccttgttttttgaaatatggtctttctttggccctgaagctcactgatttgactagacttgctgactagacaagtccccagggtcctcctgtctctatctcttagggcaagtattacagcacactgctatatctggcttcttatataggtgctggcagttcaaactcagatcttcgtgcttgctcagaaagcacttggctgactgtactatcttcccagaacctaacttattccttaaaatacccttgtataatatttctatatttctctatatgttatatatatattatatatatatttctatactttgttagtaacctcaacaaatccagaattgtgacccagggattctgatgaggaaacataagtacgtttctcctgcattttgccactcagttcttcagcacatttaacaaaagaaagacagttgagccaaaatggcatttcttaaaagccgagcttcttaaagacctcactttacactgcagtttttagtgtgtgaaacaaatgaatctgcttaacacattaatacactgaggtgacattagctttcactccctggcagactacatttgagcagcttgccttactaattgttcaggaattttcagaattaatggtaattagcagctatctggaattggctcacatgtaatcctaccctgccctgaactagttttttttttggatggcaaataatagcctctccagagccttcattctggtttcactttcccctctgagatgggtgctcttgctacgttgtccaggctgacttggaacttctaagtagcagatactctaagtacattccattacacttgactgcattcattcttaacttttccctaatgtccctccggactttgctttgacctaaatggaagaactgtagattctagagtagactctgcgtgtcctaagtaggtcattgtttgtgcactggtcacatctttgatctgttcttgttccttagaaattcagataaagatagttaatacaagaaacttaggagaaataaaatcaaaactgaaatacaaaggataaatagggttgctagtgtaagaaaggggacatacagcattcctaaacgtgtcgtggccagagagagcatggtgagagaagcaaaggaagtctggtttgctcgggctacgggacgctgtatgaggatgctaggttctgagtcatggccaagttactgtccaaaagaatcatgccagtgtgtgaatgtggtcattgtattgtcttttcccgcactgattttatcccatacgtttttaagtttgcttgttattttaaagatttttaagatattacattttatttttattgtgtctctcagttatgtggctggccatattttcatattaattaccacgtttcctgtgttgtaaacagtctgcttgtgtcctttactcagatacctattggaagatttttattatttttaatattagcaatctcctttatagtattctattctaatatttttatcaggtttgatgtttcaacataaagaattcagaaggtttgactgacaaatttattggcaatctctagttcactttatggtgtgtatcacatgaattaaatgtaaaattgaagtgtcttccaattttcttatttttaaatttttatactttttaattttaatgtatatgaatgttttgcctgcatttatttatgtgcactacatgtgtgcctggtgcccgaggagatcagaagagggtatcagatcccctgaaagtagagttaaggatggttgtgagctacctttaggccctaggaattcaactcaggttgttggcaagagcaacaagtgctcttaaccactgatccatctctccaagacatgtcttccaatttccccagcactgtaccattgaatctttcctcatcttttgatctttgcttctttttttctcccaaagttaacaatgtttaagaaatggtatgtgctaggcactattttaaatgctgtgtcatcttattttcttcctgtagctcttctactttgaggcatagagctaattttttaatattataaaaccaataaaagcttttgttggttgggcatgaaaatatatgcttgaaaccccaaagctgagagaggaagattgggaatttgagaccagcctgggcaacagagtgagacccatctttaaaacgtggttaaaaaatattttaggcacatgtgccaaaacacccatacagaaaaaggtgaggaattctttcttacatacgctctactaattttactttaccatttctatattaatgactgtcttaatgtgtgtgttgttatatatgtgtgtgcctcttggcacatgctctgctactaagacagactatagcccctcttctgtcttactatgattgataccaaggtatatctagcatttcttctgggtttaggggtggattttttgcctgtttatttttccaaatgacgtaagtattttatgtcctattttaaattctcattgaagtgcttgtcaaaaaaatgcttaatcattggctggagagttggctcagtggttaagagcaccgactgctgttccagaggtcctgagttcaattcccagcaaaaatgtgatagctcacagccatctgtaatgggatccgatgccctcttctggtgtgtctgaagagtgacagtgtactcacatacatttaaaaatgcttaattatcatatactgtcaacaactgcagttttatggcaactagtcaagatatgtatcctattcatagcctttggtatgttccagatactagctaaatttggttgagggaatgaataaattgggacatctgaacttgttacctcgcattaatgttttctacattcacccatttctgtgtggatattatttatttggcattatagttttttcttatagttttctaattattttcaccaacatatggagaagtcatgtacatctccacatttatttcgttagttttttttttttttaatttaaggttatgtttctgaaagtgttccccaggtatcttttcaataagcaattactttatccgttaagaataaatttagtagtcaggcagtggtggcgcacgcctttaatccaagcactcaggaggcagaggcaggcgggtctctgtgaggccagcctgggctacagagtgagttccaaaacagccagagctaatcagagtaaccctgtctggaaaaacaaaacaaaaagaatatgtatttagtttcttatttaactaaattgttatctgtttgtgtattgttctagaatactcaaattatgggatttttaaaaatttaaatgtactatttttcttttatttatccttctttattatttgtttgtttgtttattagattttgtgtatgactactttgcctgtagggtatatatgcttaccatacatgtgtctgttacccacaagttcagaagaaggtttcaggtctcctggaactatagttatgaatggctgttgtgagctactttattgatgctacgatccaaacctaggctctatgcaagagaaacaagttctcttaaccactggggcatctctccagcccgtgtgtgtgtgtgtgtgtgtgtgtgtgtgtgtgtgtgtgtgtgtgtgtcagcacatatgtggaggtcagaagacaactacatgaaatttcttctacccttgcataggtttcaaggatcaaacctaggtctttaggattgcatactaagccttgttacccattgaatcttcctagcggccaagtactgttttacagggtggctaaaggtgcaagctctctgttgtgcagctgagatttgcagttgcttatcctcttcagggggctttcacaatgctctagtcttgtgccagttttactaaaattgatgtctgtgagacatagttaatgccaagtaaatattttttcctccgttcaaaatgagaccaaccaaataaaaatattgtttttgtcagtttgatgtaaactggtggtttagtattcattgatatcattccttaacttacttattttggagacagggtctctctacataaccctgtctatcctagaacttagtgtgtagaccaagccagccttgaactcacaaggatccacctgcctctctctgccttccaagtgctagattaaaggtaccacacttggcttttaattttctttatacataatttctctagtataaccttatccaggattttaggtgtcgcttctctgacttctttggtatccattacagtaatttgctgtcgattcatggcatcattatacaagatttaataacacatgtgaatggccaagacactatgaaggctttatggggattatgtcaggagaaacattataatgtcaacccatttcctagatgagactagcttagagcagtgaggtgttttgttgattgtacagaagtgacagaggtaaattacttacccgacagaacatagcctcaggggtgtgtggacatattaatacagaatagagactctttgacttgggatggacttatagatcaataaaaatctttgttacttgatgacatcctaaattgaaaatgtatttaatacacctcaccaatttatatgtacttaaaacccttaaatgactgtataattggccaagacatttaacaaaaaaattgtcataagtcattttacatgctgacgtatacctgtacttatatgtatgtgcataaggaagagatactgaggagtaacattttaaagtatttgagggttaatattacagtaacatttagagatgtgccttctttgattagtaatgatgcaaatatcagttccttagagggtaaggattatctaactgtaaggctaggtacttcttcctaaggacatgatcaatgtagttgacagatgttgtatttgtaaatttaccaaacttttcttctgcattttgcagacatgttagtcaggatgatttaatccatgggtactgctaatattataatccataattatactttcttgttactgtctccattggaattctaagatactaagcttttggtatccacaacttaaaagttggttgtaaacaatctcgttttgtgaaactcagcatttctgttttaaaaacgaaagaaatcaactcaaactagtatgcttgatagtggtagtgaagatattagatcattttggaaaggagaatggacaccatgcccatttgaagaggtaatgcattttaaaatcatcttagggacttttttcatggtaagattgcttagtacagtgagtcaagtttatagaggcagaaaatactcaaaactactatagagacattataagaatgcatttttattaaaaatataactaatttttcatgagcttaagccttttaaaaaaaagagaaatgtttaggacaggcctggcagtgcttgcgttttaatctcagcacttggaggcagaggcaggtggatctctaggagtaggaaactagtctggtgtacacagggagtttcaagccagccagtgctatacagtgagaccctgactcatgacaacagcaaaaaaggtatggagaagaggagtttggtagaatgttactttctgggtagaggtgttttacatggctgagaagatggctcattgggtaagaatccttgctcttcaagcatgaggattggaattgaagtccccagcatccatgttaaaaaaaaaaaatgaggcatggctgcatgtgcgttggaattagggtgataacagacagatccaagagctcacagcccacctagcctggccaaaacagcaagctttatttcagtgagaaaccatgtctcaggccagtaaagcaaagagcaatggagaaaggtaacagatacttccaatcttacgtgcatacatcccgcacacatacacacaggcagggcaggaggcaattgaacttttaacccaagaaagaagactatatggatttttttaatttttaagaaaaaacacaacttcttcactctccccaaatttagaaatgcttgaagttatattctttttttgtatctcacaaaaatgagtgcctcctttgtagcttaccacctttggatattgtagtttacacattaatttagttaagtcatcttatgttgattgctaattcattatatgaagtacttttatattttgtccaaaattcttggtactttattctaactggatcccggtgcagttgacttggaatgtctactctgtcccctgcctagctttgttgtcagtctactttattagaaattccatggttgtaggactgaaggaataccacccactcctcgcttctctccatcccacagtctccctcagagtgacccaaactgttagactccatggttttagccccaagctaatcttattttaaatttggaagatcaaattataatttctggtcttataagagacaaatttctcattacagtagcagtatgactttaactctgtaaatatttaactttgattaatgaatgatcaattaaatatacaagaaaactctttaacaagtccttaaatggaaactttttattcttttgttttttatacttttcttaaatgcaaagcaaagttaaattttccctgttaagatgccaagctaagagcctcctagccttttgaagagcagttgtccattatataatctgcagactagcaagagtccctcagaagcaggacattgtttagattggaagtagttctgtcttgtgtgtaaaacaatgatgtggtgtgagcatttatttacagtgacagccttggtttcacttaagtggcaaaacccttttgagtggctcacgtttcattcaccttacagacttcatcttccctacagcaaaagctgtgataatgtctagagaccacgtgacacagccaggagcataggccttttattttgtcccagacatttgacagtgtaaacatacataaaatacatattaaagtttagatgctctttatagtttgtgcaataagttgaagccttaaaaagaaaacatttcattaaaaaaaaaagtcattagttttacttaagacaggaaaatagcagcaagtaccaagacattgtgcacttcttttaattaagacaaattacttcatttacatcaaagtcagaaatataagactggctttcttgaatacataatatagcttgaatcactggttagataggggcacgttttcccaactgtacatcatggaggaaggttctccttcgtttcagaaactgcagaccctcagcctgccagcatgaccacagcattgagcattaaaaggagcgaggcatttactttccaagcactagccgcagaaggtggccgagtgtttccatttgcagtggtttcttccctccgtaagttgagggttgtgctttgtcgaggcatttcagagaagttatttggcatgccacgagctatgctgagggtcacggggcttgggggtgactttgttgcactggtgaggcttgcatttgaactcattccatcctggaggtgaatagttagagttgcagctgctgcttcatgggaattggtcatttctgtgggtgtgtcttctgggtaggccaccacagccctatcagtgctactaaaagtggtatctttgcttagagtgacaccaaatgtggtttcctttcctcgatattgtttgggtgttttggtcactttgggttgagttaccatactcaaagagttaatggtgtccactgtctgcatctcactcatagtaaataagcttgaggtaaacccaggaggtgtggggtacatgctctgttcctttagagaggatacttgcttagaacaaggagtccctatcacatgggctttcgtttccatcacccacttcaataagtaagtaatgttttgtttatggtcacatgaccacctgttattatgaagagttatctcttgcaactgcaaaagttggtcaaaagactgttctggaatgaatgtgaatttattgttgtgcaggtaaagatgtgtgagatttgtcaggtttattaatgtccctggaaggatttgtgtcagtgagttattagacaggtccacgatatgcagtttggaaggcatgttggttggaactgtccaaagcttgttactgctgaggttaagaacctcgagacttcttagggtatttttaatgagaacaaccttttccagcatattcttagaaacatccaggtatttaaggttccactgataagcagtatcagatttgtcaagaagtttaatattgttgttagcagcagacatgttccagagagaccgaggtaactgagcaggcagactttcaagcctgttgtttgaaatatccagggttctcagattggtatatggggttaactggttatgcagatcagtaaagtggttataagacaggtttaaatgtataatgttctcctgcagtccaggtggtaatgtagtcaagtttctgcctgaacagtccacatgcctgtgcctctctgtgcatgtacactggagaggacaaatgcataagatgccaggcgtgagaaacagaaggatgaacaggcaggaagacattttcagtatctgatattccatcaaagcctgaaaacaaacagatacatccttcttttaatatgcaaattcactctcagcatctgcatgggtcagttagcattcggcaaaattttcaataaacctccttgttgttgagtccttttataattgttccagtgattaaactaacaaagctgcccttcatttatagtccaaatgcctaatccttcaattggggctatgtggtgggtgggggtgggggaactgggggggagagagacagacagacagaaaggcagagagagagagagagagagagagagagagagagagagagagagagagactctcctacattttctctttatttttatcctttagtatattcatcttatttatcttctcggagcctttatatgatagaatggcactgtctgcaaatgaggagttttataggcttacttaggctgttactatttttgataatgtttttgattcagaaaaaaaatggctgtcatgtctgtttttcttaaatctctgcagtattataagacacaatatgtttgtagtttgagatgttaaaacagattaaaacagtttttgaaatttcatcttctcatggataactatatcctggtaaaaaacgttttaatgaacttggaaaaatcaagcccgatagcgtacatttgtaaaatgattttttcccttatatttcagtaccaattttaaaggaaaaacaatatatgtatttacaaagtgagtggacattaaaatgaaaacctcggctattactgcagcagattttggtgcatgcacttgttattgaatatattcaatcctaacattagctttaaaaaaaaaaaaagctaaagaaaaggaaaaaattcaaaatccgtcttttaccaatttaaacaactgcttaccataatgtcgtcttcactatcagtatctcattttctccgggaaacttgcagcttaaaggtcgtcttgttgtgggagtcggaagggtttctggctgtgggctctgcttgccagctcagctgcattgtgttgctgtgagccgaagctctgcaaccacctgatcagcaccacataggaggactgcagagctgtcattggtgctgactcaaatttattgcaagaggtgcatacgcaacaaaatggacttttttttttctttttctttttctttttttttttttttttttttaatttacagcccagagagtgccttacatagcttcagttctctgtcgggtagaatacttcatgcaaattagggctgggctttacttctgtgtatttctctgagtttaggttgcacatttaacatttgcttgctgtaatttttcttaaagcctctacattctttctatgtgttgaaaaatgttctttgtgaattgatttccaggatattcattgaactatttttaatctccgcatttttatgttcttttcaaaaacagttaaattgtctcgtaaccttttcatatgtatgtcatgatagaaatcttgatttttatgtcttcctccatcgtggctactattattatatttaattagcttttcgaatttatcagtcaattacgtgtttcatcttaccttttaggaagcacaggaatactcaatatgattactttgtttttgccttcctgatacaaaagatcgtttgactaatgctgcacacaggccagctgcgttgtcgtcacagtctccttccccagcacatgcacacagtcctgccttagtgacagtgatcaaataagaacaagccacatgtaaaataaggatgctggactataaaacaacaccagcctaaaatacgtttcactgtgtcttcctggctggcctggaactcacagagatcttcctacttctgtttctcactgctagaattaaagatgtgcactaccataaccagtagatactagatattttgttttgtttcttctattttaatgttctacttttaattaccagtcaaatggtaaaataattgtttacattttatgtatttgagttagatggagttgtttggttttgattttgctattttttttcttccatgaaacttgttttggatggtatggatagagtattgctttctccagaggtattgttgggtctgaacaaaagataattttatttttatgaatagcagtatcaaagctggagtggcaacacacacctttaatcctagcattcagcaggtggaagtaagaaggccaggaattgaagcccagctttgactacacagcaagctcaaggccagcctagaatagatgagaccctgtctgaaaatataaaataaaatgctggccatggcggtgctcagctttagtcccagcactcaggtgacagaagcagggaaatctctacacatccgaggccagcctggtctacagcgagtccaagacagccagggctacatggagaaatgctacctcaaaaaaccaaaataaacaaaataaataaaaactattactttccaattgtttatttagtgtttcatatttatatgttatctttcccagaaagtcaatagacttaaaaatatatgtaacaatgtttgtaaaagatgaaactataatcaaaatttttgtaaaatatgactagattcatggtattttaagtaaactagataaataatcacttgaaactcaaacctatattacaaaatgaccacttatcataggaaagaaaaggagaaaattaagacatacttattatgaaattgtcaccatataaaaaccagcaattattagtatattacattttaagtaataccttgtattgtctcctgctaaatctcatgggctgtagttttatttgtatctaaaaaggaattgatggaattgaaatctatagcttatcttcttagaacagaactatcttgtaggagtcaccttctaggtaaaactagtgttcctcaaaaaggacctacatttaagcagtctgcaccattagtgactgctattggttcagggctttattaccgctttacgttgagtgttcatttggactttagattctgtgtatgggtttcagaatttcatcatcaatcatgatccctgaaaataatgtttgaagtactacgttcaatttgttttgggggtgagaatggtttgcttttgacagttagcatttcatgtcagctcatgtatccaccaatacagataggactaaggatcaatttgccaagccttaaaatctctcttaggaagactcattctaccattatagaagtggaattacctatgtgaattacactgataagtaccgtcatttgaaagaaaaaaataattagttaattgtttcaaaattaattcaagcttagtctgtatcagagactttttgctagcactgtaacaaaatctctgacagaagcaactgcagaaagaggagttgctcatggcagggaagacatgggcactggagtagcttggtcgctggcacaggatcaggtcatatccagtggtaaatgagaagcaaaaccaagttctaatggtcagagctcacccccagtggccttaaggccatcagctcttgctctaagggtttaataacctcccctcagcactgtccacacacattaggatcggattctgctatgcatataatgtttttcatttcaaatttattttgtactaaagatgaccatgggtactcaaaaagaaaaagaggttgtcatttcagtgtatttcaaatgtagcaattgtaatgctgttaaaggctctgagaaaattaaatactatattatgcttttttggttgttttgtttttgagacatgtcctatagaccaggctagcctcaactttgcctcccaagtgctgggactaaagaatcatttgtaaaagacaagtatttgttaccacttatcttagatgctatacagaagcattaattataatttagataggttcaccaacttcacaaattatatctatttaggcaactggtttagattaagcattaatcaagttgacatttcttttgtatccaaggatatattgctctagcattgtgacacagcaaacctcctgctgtagtagtaactatagacatgtgtgtatgtacatgtatctgtccaagcttggaagttgttgtacaatagtccattagcaggaaatgcttctgtctcaagcagtttggaaaggggggatgctcaagggtagaggggcggctcagtgtgcagctgtcaatgcagcctaagttatgcgcttatatacctgcatagtaggtagtaaccactccagtggaccttcattctttttttttaatcaatttactttttaaaaagatttatttatttaatgtatatgagtacacagtagctgtacagatggttgtgagctatcatgtggttgctgggaattgaactcacgacttctgctcactccagccccactctctctggcccaaagatttatttattattatatgtaagtacattgtagctgtctttagacacaccagaagagggcttcagatctcattactgatggttgtgagccaccatgtggttgctgggatttgaactgaggaccttccgaagagcagtcagtgctcttccctgctgagtcatctcaccagccctcaatttattttttttttaatatttttattagatattttctttatttgcatttcaaatgttacctctttcctagtttcccctctgaaaatcacctattccctctccccacccccttccccctgctccccaacccacccactcccattcctggtcctggcattcccctatactagggcatagaacaggacctagggcctcttctcccattgatgaccgactaggccattctctgctacatctacagctagagccacaagttccaccatgtgttttctttgattggtggtttagttccaaggagctctgggggtactggttagttcatattgatgttcctcctatggggcttcagacccctttagctccttgggtactttctctagctccttcattggggaccttgtgctccatccaatggatgattgtgagcatccacttctgtatttgccagtcactggcagagcccctcaggagacagctatattaggctcctgtcagcagtctcttgttggcatctgccatagtatctgtgagtttggtggttgtttatggggtggatccccaagtggggcagtctctggatggtcattccttcagtctctgctctgaactttgtctctgtaactccttccatgggtattttgttcctccttctaagaaagtttctgagcttctgggctaatatccacttatcagtgagtgtatatcatgtgtgttcttttgtgattgtgttacctcacaatcctccagatctatacatttgtctatgaatttcataaattaattgtttttaatagctgagtagtaatctgttgtgtaaatataccacattttctgtatccattcctctgttgaaggatatctaggttctttccagcttctggctattataaataaggctgctatgaacatagtggagcacatgtccttattacatgttagagcatcttctgggtatatgcccaggagtgatattgctggatcttccggtagaattatgtccaattttctgaggaaccgctaaactgatttccagagtggttgtaccagcttgcagttccaccagcaatggaagagtgttcctctttctccacgtcctcaccagcatctgctgtcacctgagtttttgatcttagccattctgactggtgtgccgtggaatcttagggttgttttgatttgcatttccctgatgattaaggatgttgaacatttttttaggtgcttctcagccatttggtattcctcagttgagaaatctttgtttatctctgacccttattttttttttaatagggttgtttagttttctggagtccaacttctataagtttcagtgtctctggttttatgtggagttctttgatccacttagacttgagctttgtacaaagagataagaatggatcagtttgcattcttctacatgataacctccagttgagccagcaccttttgttgaagatgctatcttctttccactggatggatttagctcctttgtcaaagagcaagtgaccataggtgtgtgggttcatttctgggtcttcaattctgttccattgacctacctgtctgtcactgtaccagtaccatgcagtttactttttacaaaaataattcatttattttttatttcttatgcattgatgttttctttgcatgtatgtctgcatgaagttgtaagattctctgaaactggaattacaggcagttgtgatctgccatgtgcttgctgagaattgaaccctggtcctctggaagagcagccagtgctcttaactgctgagccatctcttcaaccacctttattcttgaattgatcaaactgattgttcctgtaattaattgtgagccaaagtactgatattgatacaagttctgtatccctatttttaagttttatttgttttattattgtattgcgtgaatgccttacctgcatgtatttctgtgcaatacatgtgtgactattgctagctaaggtcagaagatggcattacatcacctgggactctatatacaaaaggttgtgagatgtcttgtgggcactgggagtcaaacctaggaactcaggtctcctggaagagaaataaaagaaaattttctcaaccactgagccatctttccaccctcagcatcccttttctaaaatgcctgaaaccagaattatttccaagcttggaattattaagatacgtttacagatacgtatacatacatgtctattgagagtattctttgggtgatctcaactcccccaaatttttgagcactcagaagattgtagattttagattaggattgtatagtctttaacacagttacctttttactgaatttcctgctgacaacaacagaataatagtatgaactaaagtgttgttgaagcatagaagaactgacaaaacagaactgtatcaacattcaagtcattttaccatctttaacaaaaaaattttttttactttattctcaactttcgcctttccatgttttaaatcttttatttatttatttatttatttatttattttaaactccagattttatttccctcccagtccatcctccaactgttccacatcctatacttcctccatacccccacccccatctccacgaggatgtccccaccctcaccccaccatacctctaaactccctggggcctccagtctcttgagggttaggtgcatcttctctgactaaacccaaagcaagcagtcctctgctgtatgtgtgttgggagcctcagatcagcgggtgtatgctgcctggttggtggctcagtgtctgagagagctcagggatccaggttaattgagactgctggtcctccaaatgagttgcctcctcctcagctcttcaagcttacccctaattcaaccacaggggtcagcagcttctgttcactggtttggggcaaaaatctgcatctgactttttcagctgcttgttgggtctttcagaggtcagtcatgataggtccctttttatgagcattccatagcctcagtaatagtgtcaggggaggtcttagggcctccccttgagttggatcccactttgggcctgtcactggacctccttttcctcaggttcccctccatttccattcctgcagttctttcagacaggaacaattatgggtcagagttttgactgtgcgatggcaaccccattccccattcttcactggatgccctgtctttctgctggaagtgggctctacaagttccctcttcccaatgtagggcatttcatctaaggtccctctctttgagtcctgagagtctctcacctcccaggtctctggtacgttctgaagaatcccctccccccaacctcctatcttctgaggttgcctgtttccattctttctgctggccctcaggatttaagtccttttcccccacccaataccagatcatgttcccctccccaccaccccttttctctctcaggcccctccctccccctttgtggttgctttcttctccctcccaagtgggactgaggcatcctcacttgggtccttcagcttgttgacctttttgaattccttggactgtatcttgggtatgctgtacttaaatacttgctgctattattattattattattattattattattattattattatttggataatatacatttattagtgaatgcataccatgcatgtccttttggatctgagttatctcactcaggatgataattggttcctcagaaaattggaaatagatctacctaaaaacccagcaatcccactcttgggaatatacccaaaagatgccccaccatgccacaggggcacatgttccactatgttcatagcagccttgtttgtgatcgccagaacctagaaacaaccctgatgacccatgacagaaaaatgaatacagaaaatgtggttcatttgcacaatggaatactactcagctattaagaatgagttttgcaggcaaatggatggaactagaaaatgcctttcatttttaaaaactgtgtgtgtgtctgtgtctgtctgtctgtgtaatgtgagtgccatgatgtacatgtggaggtgagagaacatcttggaaatcagttttctccttgcaccatgtatatgggtccctggaatcaaacttgtcttccagtttgacagcgagtgcttttaccccctgagccagtgagtccccttcagcctctctagagtgttcctgacttatctacttgctttctgggaatgtttgacattgttattatatccctggttttcccatagtgttcctaacaacattgacctaactgcttatttgtcttatggaagagcaggctgaaaaggacagtcacatgaatgcagcaagatgacagacctgtcatggttctggagtatctttcattgaggagggacagtcagttttgtacccagaattatttgaagtcattcttttctgtttgtcataaacatggcgtaatgttaaattaattttcttcagctacttttccgtttttatggctgattagtcagaatactgtaactgtgtatatagaggacttgtgctactctggtttgacccctccagtcttttttttttttttttttttttttgctcctattggtgtggagaagaactgctttcaattcatttgcttgcagttacatcttaattctttaaaaaaaaaaaagattaaaatatgtatgtgtatattatatgtttttgtcttctcatgtaaaagtttgtgtgatgaattgttctatatcgtattctgtttttcttattagttcattttaaagataactctatttaaagagacgtgggtttgtctcattcatttcttgttgccttggggaatataccttagttgttttggtctgacttgtccccatacttccattattgccaataatgacatgctctgatcctcgtgcttgaagagtttcatattttgccagtaacttttttaaaacttctttttgtctttttgagatagggtttttctatgtagtcctggatgccctggaactcactctgtagatcaggctagcctcagagactcacctgtctctggctctgagtgctgtgattagaggtgtatgccaccatttctggcctttatgtatattttcaagaataatccatgtatattttttcttctctggatgtgtttatgttttataaaattctgttgttttatttttactgtccactatccatttctgttatccatctttaagaactttcttaacatttataggtattagtactttgtctttatttaaaatatctcaattgtcttgtgtttgtcttttgactttttaatactgagttatattttggttttgacatttgaaaattttctcttttgtttttgttgcttctagactttgagcctcagctaggaagatgtttgcccatgtttggattataaaggggttcagcagcatcttcttgtattgtgtccactctatgctatttatatcttgtctacttaatgtctattctaaatgtgaaatgtggatccaattttcatttttccaaatatccattcagttgtctctccagctcctccattggctactgtcctgtctaggaggtatttctcaatacccattttttcaagaggtcagtaagtgaggtgctgaaaggaacaactttggaaagagccttttagttccacaagtgatatgagaggagttggatgattggcattcaagctgctacatctaattactctaatacttaaatacaagaaattctcaaaattcctcagtgactgctgcaatgtaaattagccttaaaatcatatttgaagacacgtgagaaattttattgtgaatgacagaaaagaaccaatgtaataaaatgaaacgccatcatgcttgaagtaggtgtttctgtagataaaaaaagtgttatcagtaagaggtggcttgtaagaagtaaggtaagtattgtatgtaaaataacacttaagcccagtgtcttttaaggtgtttaaaggtcacaccgttaatcacaaagattgggagacagaggcaggtgtatctgtgagtttgaggacagtgggtctatagagagagagtgccaggacagccagggctaccagaggactcctgtctcagaacacaaacaacaacaataataaatttacatgtatttataatatgtataataattgtttattgataattatatactaaataatagtagtagtatgtagtagtaatagtagcagtagtagtaaaactccactgcccgagaaccttcttgtttttattctacatgggatttttagtatttgaacattaatgttaccaataaatactatatactatcttgaaaagtgccaaaatctgtgctctaagcaactgtcctttcttggacttgtaataataataagagaaggatggcttgttgggcagatgaacatttgacatctgcaaaaggtaggccagtacccactgccgcctccactttaacaaaagttgtgcccacttctgttctgagtgcctcatactcaacaaccttcaggtgatgattacattcctgcatttacaaaaggaggctggggctgcagtgatgggtcagtactttagagaacttgctgctgtcctataggacccaagttcagttcccagtacccgtgttagacagcagctcataacttcctgggacttcagttccaggatggctggtatcctctgtggtctccacagacaccctcacacaggctggtatcatgcatgtgtgggaagagacacacagatacagcccacttctatttttttctcccgtcttccatatcatttgatttttgtctaagtggttagtttatgcttccctaacattttagaaaaatgtttacattttgggggcagtgagatgggcttagaggataaaggttgcttgctgtcaggtctcatgacttgagttctgaattttatccttgaggtggaagaaaaaaatcaactcccacaagtcatcttctaaccccaaatacagcctatctctttgacctccacccccacgccccaaacatttgaagaggaagaggaggaggaagaggaggaggaggaagaggaggggaagaacggagttgcaggggctcggtggttaagagcacttacagaggacttggagtcagttccaggactcacggggcattggcaaatgttagtagtgccatcttctgtcttatatatatgtgtgtgtgtgtgactatatgaatatatacacacatattcaggcaaaactcttatatacataaaatttttaattataaagaaaaaagaaaattttatggtaagtgctcactttttcagggtaaatgtatcccaaacacagcactcagacttcatgttttaatacagtttggtagctgtgtgtttaatctctataaatgaaaatatttacttaatatttgaagtattaaaactttgaccatttaaaaatttccatttttattataccccaaattttgaggtggaaaaaatagaattttatttatttaagatatgtttatatacagcttttcgggggaaatctattgggtaataataagtatatgtagatcatatgtttccaaagtgattaagttattgaaatatctatcattaacatatataaaaggcactctgatttaaaaattacttctgtagctggtaagcataccactgtaataatctacccgtgtacgtgggcttcagtcaggggtcaggtagtccctaaagagtctctcaggtgccaggtgtcatgtcctgtgtgccataccacgaagacaggaacgtgtcggtgccatctcaggatggagggcagtctagaaagccagctgtcactttacagcagctctgtaggtggaggtggcagggagtctgtgaggtctggatggaggtcaggagtagagaactcctggcattgagcctcgtgggccgactcttgattgtttataaaatctcctgctgacagaggcacattaaatgagtcagggggtggcgggaatggctcttggatcttggaatgctgttcttcacacacttgatttagaccatctggagatggttggggattgatagaatcatttggtaaaggagatacaactgtcactgtgggcttgtttggtaggttctcatccaaatcaagaaggggaggtggcagggccagatctgcatcatctgaagacacggctgtaccaactgttgacccatcagcactgtcttctgataagccatttatttgaacttctacattatcagtcttgaggttgctggtatcattaatgtgttcacttgattcaaacaacttaacttctaaatcatctgctagcagtgtgcttttacttggtttccaggtcataagtgagacaactgatgcacgctttgtggatgcctcactctctctgatgttatccatacacatttctggtgtttctccatcagcaaatggagacctacctgcccagttttgatcatttaagactggcttcctcaagtatttccacagtataatcatgagtatagctaccaacatagaaattataatagtaccgattaatatggcagcaattgcattgtggttgtttttatgagcagttcctttgccacttggtggttctgaagtgagtggtggtggtggtggtggtggtgtgtccctttgtaaataaatagttggtgttgattttgtgggctgattatgagtagactctacttctggttttccagaagaggtaggagcaggtgatggtggctgttgtgtggaagtatagacaagatgttttggtggttgtccagtagaattataggtagaaggtgatggctgattggtcaaagtgaacccagatggtgatgtttgaggcaaggagttgttgaccgctgattctgcttgtctggtaatgttataagtaagtgggcttgaagagacataaacagctggtgttgcttgttcaggagtgatttgggcaggtgatgcttgctgtccagaagaaatgttcttgaatcttgttgtctgactcaaagcattccctgctgtgttttgagaatcagttgtaacatataacgacggtgtgattaaagtagacagtgattgctgctctgttgtaattgcttctgtctctgagaaaaacgtattgtccaggtattgacaaagcacaatgaagaccagatacttgaattccatttcagatgttttctccttaccagtgatttcacaatgaaagaaaaagaaatatggttagctatcacctggcgtctagttacattggactcttcattacagtgtctgacatacagtgattaggcatttggttaaatttcattctagtttctacttgacacaatgtgatgctccggtttatagtatagcatctggagttcctgagaagtaatcttaattcttttataaaatctgtttaaccttgcagcccctctaggttcctcagcttctactccttcatttcatattgtcttgagtgtgcaggctcaacctgatgcctgttcgctgtctgttcccagaaataaagtggtctgccttgcagagagagcactggtgaccacagtgccttacactattgcctttatgttctttctctctctctctctcctcaccaaatttgaccttaccgactagtccctcgccagtatttcagtaacccttgtattacagtttttcctttgcaccacttcagttagatcttttttgctcctgtctcctaaatatagacactcagcatccaatctctctctacctttcatttttctttgttctagttctgtaagtgtccactctcacccttctgctataactaccaaacctgtgcaacctgaacctcctttgttctgagtccatttgtatcatgtcttagtgggcatgttttatatatatatatatatatatacacatatatatatatatacacacacacacatatatatacatatatatatgtatgtatatatatatatatatatttcataatcagcaaattcagtagatctagtcccaaggggacctcacacctctggtctgtatggcatcacactcgtgtacacacactcacacatgaacacatacacagaatgaaagttaaaaatacaatctaaaagaaaaaacaaaaaccaagaaaatcctaaagtgattcaagtctctctagcccagttggtcaaataagcaagcccattactgctctcattctgatactggacaaccacctttgcacatcagaccctagtctagatttgataaatttaaaaaaattaagttgctttcaagtgttttaaactcttacggtaaaaattagcaggtaaaaagtaatctcagccaggtgtggtggttcacacctttaatcccagcagaggcaagtaatctctgtgagtttgaagcgagcctggtatgcatagggagttccagtacagccagggcaacaaagagaaaccctgtcttgaaaataatttgatgtttcctcatacttagtagatgaacagaggagttaacttggcaagggggaactttggaaaggttttccagagatattgaagcagatttaaatcttagaatactataaagagctagttaaacacatctgtctcccagcttagacagtgtgcacgggcacctgggcaaggctcagcataggcttgacagctatctttctgcgggatgtcatagatggtgaaactttgaaggcttaagttccgaagttccggctgatactgtccacttaactcagtgtgtgaggtcacctatgtgtgttgttttcagtagcctcacgctctaaagtgacattgtcagtgctgaggataatgggctcttctggacatccccaagcatagtgtctctctctgagagagctgagctgtctcttaacgtgaaggagggacaagctcagactgttagatactagtttctgtgtatgataagaaattcatttttccaggactctgaagatgcaatagaaggttttgacagtttgagtagtttgtatttctttacccagttaccactagcatagtagaatgatgatgacaaatgacacccttcttgttcattctctctcttgtttgtttgtttgtttgtttgttttatgttttaagacactcgcccagtttagcccaggttggccttgctaagatccatgattgctgagatcacatgcttgagccagaggacctagacttacaagaaaagataatgtttttttctagtctgtttcttctttatattttctctctcatgcttgaagcctaaactgtaaaatagctctctgaagccccttgcctggtgcaggttagttacccttgaaccatgcatgacctggttgctacttcacacaaggatacacatctctgtctggagaaaaccttacaaaccaagctttagcttccttgaatacttcctaaacacattaaattatgccattttgctgcctttagtgttttctttttttccctaatccttttttctgctgactatatgtctgaacctgtcttcatcttgtagacctcaatttaaattccccttcataaacccagttctctgactgaccacaggcacagatagcttcccctgggcatcctcggcctgctgtcctgctggtttctttggccctactttgtggatgtgcctcattcctgcttcttcccacctgaatggttgtttttattatgttgtttgcacattttctattattatccccattgccttaaacgagattattttaaaaaacaattccacaaaggtaggaaaaaacaaaggaagaaaatacctctatagagtatgctataaatgggctagagagatggctcagccgttaaagggtaggctcacaaccaaaaatataagagtattcgataaatttgagacttacatacttatttcatttaaccttcacagaagcaaattaaaatgagttgagcagcttgtctgggttgtggctgttagtgacagcatgaggttgtaccatgtgattctaaagtctgatttgtgtctgttctccctccgtttcaggttttctaacgtcgattctccatgcctttcattttagttgctcagtaaatatttaatctgcgctggcctcttggttctttactgtctcactttgactttctgttaagccttctaccataatacaaagaaaacttagttaaattctgtgttttatccatcttttaaggtttttttagggaaacattgaaatttttggcgtggatatgagggtctgactcatctctagatggtcatcattcctatcgttccacacagtaattttataggttacttacccaaaaagctttggttagaaaatggtgttcaaagttttcttttgtaaatgtttttagaaaatgctttccaaagcaacagaagatatagaattgtctccaactaaaaatgtttcctcttttgtgactttgcttaaaataaagaaaccatatggttcctctttttagttagctgaaaaaggaaacagagaaggaaccagctaacacaggaaccgaattataaaacccagtgtggtttgtaagatcagctttgattggttcatcacctctgatgtcagtaggaagctagaggcttcagggtgatgcttccacttgtcagcagtagtaaaagcaaaacccacttttaaaatagcatccaacattcccctgctcatcatttctgtcatgtaccctcctaggatctgccacaggagagtactagaacctcttagaatctcactctagcagctctgcatactctagagaagcatcaagacaaaaagaagacattttggatttaataattttgggggacaggaagcctgactcttttcagatttaatgaagctgtttctgttactgtaacatgcaagcttattcaacatacttgccaactttgtaacttgtacattcctaaatggacactgtttctgcagagaaagatgatggtcagctgatttggggcaggggataaaaaggggattaaaatttagaatagaaagaatgggaataagtattttttttcttttataaaaaggagcactaacaagaaattataaaaaaaaaaggtttaggatgcactagatatgtgggaaaggatcagttgattagaaaagatattgaagaaaaagaaataattggaaatggtagttgcttattaactatcaggaagttactaaagaagactgaagtaggtcaaatgcagttagagatgggggtgggggtgctggggacttagctcagtggtagagctcttgctcttgagagagaaaatgaatgaatggacataggtaaagaggattgttgagaattgtcatttcctgtcattggcctgtatgtgggaacaagaattaacaaagagctgaccatccaggacagaggctacatgaccagtcctcaatccaggctccattcagcttcccctaccctcactgccctgccacaacccagaggtaaccctgacaaccacagagacctaggaacagtctatgtaggacctttcttagaaagcctttactctcctgctcagggaaagctagatttctcaaccttattatagcaatacttctctctatttaaattctgaggtttaaatctgcattttggttctttgtttttttttttgtttgtttgtttgtttttgttttttgtttttttaaagggaaaatgtacatatttttagtgacttcgtatgcaccgagacaatgagatcggaactcatggtggcctgtcgcatactgccagggctacagtgattgcctgccatgcacatggccctgagtttggtccccattaccacaaaattacctaagaaaaattaatgctgttcaattggctatcataagaaatacatatcattttaataaggaattgatgaacttaggaaaacattccttagggaaaaaaggtaagtgtagatagttatgtcagagtttgtctttgaactgtgcatggtgtcttaggcctttaattccagcactggaagtagaggtaaatggatctctgtgaatttgaggccagcctggtctacttaaggaggcccaaaccagccaaggctagatagtgataacctgtctcaaataaacaaacaaaattagatctttcagttattttgatataagaaaaataagtatagctgggtgtggaagcttatacctccatttctggaggcagaggcagggaggtcttagagttagaggccaaccaggtctgcttgtgggttccaggctaaccaaggttatattgtagggagaccctgtccccaaaaaccaaaatcaaaagcaacaagtaaattatagtacacatataagaggtaggcacatagtactagtgctgtctctaaactagtgagattttaaaaccatagtaggaagaaaccagaaaaggaaatcaatctcaaattacaagtagtattttatggccattttttatcagtaaaaatagctaccattgctgaacaccagaaaattcctgagtaataagatttatttgcatgacctaggtggttgtattttcatcttccaagttttaaaaaaaaaagaaagagagagagagagaacttggttaacttgacaagctgtcacagccctagtggtggcacagtatgaaaccatgctgccctgagccttggacttctgctacatgctggagcctttgtagaattatgaacaagaaaggcagaggagaggcagagaggcagaggcctaggcagagccaggcagatctctctgtgagttcaaggccagcctgattacagagttccaggactttaattaattaattaaaccaggatgctataaagaaaagttatgttgataaagtgttaaaataggacctaacccacttccaaattatttttctttgggattgcaggtctttggaagctcagtgcatttttatttattttatgtaattgttccatttagtcacaaggcaagtatcttttgtatataccaacaagtttttacaaaacgttctttctgtgaatgtttctttctgttcatattcttcactaacaggtcagctcagagtatgtggcataagcacacatgtgaatatgcacatacccactttatcataatattttttccttatggaacttttaccttattttttttttttttttttggttttttcgagacagggtttttctgtatagctctgactgtcctggaactcactttgtagaccaggctggcctcgaactcagaaatccacctgcctctgcctcctgagtgctgggattaaaggcatgcgccaccatgtccggccttatggaacttttaaaatgacataatatatgtcataattattacttaaatataaaatttattttatacaaaaatgacatctaatttaatttctctttaagttaaaacgaaggtgaccattgatggtttataaactaaagtgttagacaaaaataatttatgccagtaatggtagtgaatgcttttaatcctagtaacttgtgtgttggagacagaaagatctgagttagaagccggcctgggctgcatgtaaaagcactgactttttttttttttttctttctaaatagtggggaaaatactgatgagataatctaaatctataggaatagacagtctgtgtagaaagtaacttagactctgtcccctctctgtttacaatgccaggccaaaccccaggccttatacatgtggggcaggctctgccccagcttgagaattttttaaacaatattttagagattgtaaatttagtcaaagcctgtagaatttaattttatttttaactcttgccttacttaaaattattaaagtgatttaacaaatattttgactgagtaaacttcaaagggctgataatattaaaatcttgataaaaatctttcagacagtatcaaccctgagtataaatttataaaattctgcacagcaggaccacagaaactttctgtagacatctttaaactgttgagagctgaattcaactaagtatgaaacactaatactgttttagtttttaaaataaataagcaaaactgaaatcagaaatcagagggcctgtgtccaggtgtgcttacctgtgaacttctttcgcagaatgtaaattcttgttctaacaggacatgttggtgatttggctgagagagcaaaggggtgtttcagtgcggattaacggtggtctccagcgcactgagacggcttctgtgcagcagaggaagtttatcagtagccgttacaggaagtgcaatatgccacagaatgactaagagtttgctccttcaccagagcgtattttgaaacacaatctatataactttaagtgcttgtagctgatgtttgtaactgatccctgactctccaggcatggggatccataatctaaaaatttaggacggagtcttgcctgagaaattatctattctgaggtaaattctgagggatatttcttattagaagaaatgaatgttgtgtaggtctcaggcaagtcagtgccttctcactcaccatttcctcctctaaaaacctactgttttggaacattgtgagcactgggtaagatgacacctcccatggcaggtgagccgtgcatgtgagtgttactccttcatcggtagcttaaattgactccatgaggataactgaattattctgtgtctgccacccaacttcatctttgattgcagaaaatgggagcaactgtctgaagtcatttccaatcaggtctgttttacccttgaagaagacaagcagagcctggcataatgatgcatgcctgtaatctcagcattttagaggcagagcaggaggctctctggtgtgttggagatcatcacacacagtgactttgaggccagcctgaattacagaacaaacaaaacccctcactccacccccagaccttataaccacaaaaggactagggcagagcagccagaagagatgtgagagaaagaaagacattcatgatgctctggagagtaaaagtgaaaggggaaagtctgcttgccctctgtgctttaattttcattttatcgacactttgctttatctggttatgatttactaaacatttagggagaggaacttttttttaaaactagtagtaaattcatgagaaaatttgtatcagcagttaagagcactgactgttcttccaaacaaccaagttcagctcccagcacccacatggaagctcacaaccatctgtaactccagtcctagagaggatctggtgctctcttcttgcctctgtgggcaccagacacatatgtagtgcatagacacatatgcaagcaaaatacccatacacattaaaaaagatagaaagaaaataatttgatttcatgtgcctctcaacacacagttcatttaaagatgtaacccagaatttgaagtaacagagttgacagaggtaaatgtgatggtcaagggtaacaccatcgggctgcagagatggctcagcagttaagagcactgactgctcatcagaaggtcctgggttcaagtcccagcaaccacatggagactcacaaccatccataatgaaatctgacatcctcttctggtgcatctggaaacagctacagtgtacttatatataataaataaatcttttatacgggggaaaaaggtaacatcatctaggaagttaggaagaaacacccagtacttgacttgaaagtcagctcaatataactggaatcaggtggagggcgtgagattaggcattgatatttttatttggttctgatgtgtagccaggatgaatcactaattaagaggaaaatgttaagggcttagagggatggcttaatagttaagggcatttgctgctcttgtagagtacccaagtctaacacccacctggcaagtcacagctgtctgtaactctagttccaggggatctgacacccttttctggcaagggcactgcatgaacattgtgcatagacatacatacaggcaaaacacccacataaaataaaaataaatccttacatttttaacaaaggaacatacagggctggagaaatgactcagaggttaagagcacaaccagaggtcttgagttcaattcccagcatagtagctcataaccatctgtaatgagatctagtgacttcttctggcacgcaggcatacatgcaggcagaatgctgaataacagataggtaggtaagtaggtaggtaggtaggtagataggtaggtaggtaattaggtaggtaggttcgtaggtagataggtaggtaggtaggtaggtagataggtaggtaggtagatagatagataggtaggtagataggtaggtaggtagattaaaaaaaaaaaagaaaaaaaaaaagaaacatcctgctcttgcaaagacccaggttcagttcccaggactcacattaggtggttcaacatcacctgtaactccagctctagagtgatactgaataaactagattctgtgagcacctgtactcacaaatgtatacacacacacacacacttcactttcttttattcatgctgctctggagagtaaaagtggaagttgatcatttataagttacttagcatccttagactctaaacattaaccagctttaaagcatttgttatgttttgttgttaatgcttaagacagggtctcaatgtgtaggctaggctagcctcagaaacctctgatttgagcttccaaaatgttgggaatagtatatgcatttatgtttgtataccatgtgtatgcctagttcccaaggaagccaagagcccttggaactggagttgcagccagctctgaggcttgtgtgagtgctgggaatcgaaccagggtcctcttgaagaccagtcagtgctctcctctcttctgagccatctctccagtccctttagatgttattcttgaacactaaaacatttttatatttattcatagccttctgttgtgggagtgaatctgatctattttggttgtgttgtttttcttatttttataacatattctaaaacaacataaatgaaagatacatagtcagctttgttctaaagtctgttttcatttattgtacaaaattaagttttaatgtgttatgtataatagaaaagcagtcttgtcttacgccatatgtaaaggtaaaaagatgtagcctaatattagctgtactaagatagcaactggtacaggttctatctcatccagtgagaatgtaccattgcgttacatagttgaattctacacattgggaatttgacatctgcttggctctaagggcttaaaagaactcttccaagttcaagtacattcagacagaggtcattcactgctgaacaggaatgtttaattacctcatgttatttctattagtttctttagctgctgttgttttactttcttaaaaatatgaagtacgaaacagatataaaccttgagcaagcatacatctccctttctggtctgacgctaaacaaagagcatgtcagactttggatcatctgagcaaacgtggatgggaaataccaccagccagctttatttctaactctgccttcctcattgctgctttgcatttccctttccaacccacagcctagttgagtttttcagttccttcttcgtgctttctctccctggctgctgtaagcacaccaggagattgcaataggaggttggagcctgtgagctcctttgctcttttccaagtgtccgactcagcagtccagagcccactacttgccagaaagtcaccgttgctccgcggctggcgcttgcctacttgctttgaccttttgagagatgagactttgtttgccagaaccacagttgatagaaatagaaaggtacagataaggaaaagcactgcaattacaattaagcaaattagcatggccgtgttgctggtgttctcctcacagacttcctttttaaacgtttccccctgacttttgatctctgctgttggagaactgtttctgaaggcatggggcgtggaggacttgagtgtagatgtggaagctaaaggcacagggggagatgatgcaggcttgtctgtggcgctcaccttgtgacccacggcaggagtgacaaggtttgtgttattgtcactcggatgtctgctggagccattctgattactggaacctgaggcagtgacactgctagcccacaggtgtgtgtagtttggtcttgttccagaagacgacgaggcccacactgttgtcatcaggaaaacaagatgcaggtactgtcctttgtgctccatacctacaggtccactgctatctgttgggacagcaatatcagttgttagtttgtggaagaacagtgtctggcacgtggagtaattgttgttaacaggctgcacttgagatagcacaaggacgccagagatccatgcctaccttttgttattggattcttctcaactgaatttgttgttttgttttttaactgaattttcatttctgttcttagattgtacataaaaattgaaaacttttgttgtacattctgtaatgctgtaagttagcattacaaatctattgaccatgtttaaccttgcaccatagctctacaaattctccttttaagggagtgccctggacctgggcttggagtccgatgcttctgcttttgtgctgtgcttcctctttgaaggctccttctcacagaagtaccaccctctgacaagcacagcctcatcttgaaggaaaggagaacatggccttgaaagtttcgtttcaagttttaaaagatataacaagtggctttttttgtgggagagggagggtggaggttggtggagcctgagagcaagtgtgcatcaaatgagaatgtgaagtgcgtttgtcctttccagcatgatgctaagcagcttgaggactctggtcctaggatgcaactctgtgagtaccgctgattccacctctgttgctgtagctggctatggctttccaatagcagaggcacagtgcttctctcaaccagaacccggaaaaacaaaagacttctttgctctcaagaggtatataaaggtggccacccttattgtcagtttgtaactgacatctttttctcccttattttaacagaaatctacaaaagaaattatagagaaaaattaaaaggaatcactcatcaggctcctggggcccaagaacacagtgcttgactgtgagcagctcaccgtagcattagaaggctgagacagtcaggggcagccttgtggttgcgcatgctcagccctcgtcccacccctcctcccagacatttagtttagtttaaacaaagtttagtttggggctcagagcttcctagaagccagtgtcaggacaagattctgttcttagctcttgttatcagctatctgcttagaggtctctctgggggtgtcatgtctgccccaagtgcagctaacctagcaagagacatttggctacacctttagagaaataagttgtttcttctctttaaaaagtcagcctacctctgcctcctgagttctgggagcaaaggtgggtagccaggaccagatgaggtgtttataatactatacctgttctccagagtcacccttggaaaaatattttattcagagcataaatgagaggagcctgagcaaactctagactgttctaagactcaatgagtgtagttgtcttgttaagattgttttatagctgttactttcaaacttgactatgtggaggagttttttttttcaggtctaggttagggcctaagattctgtctctaaactactcctaagtagtacagataccaccctgctggtcacacttgagccagggaggtttactatggtataatctctggcattcgacaatatcgaaatgctaataaagcacagaagttgagattaacagttgagatatgctaagttgcacagacaaaaatagcatatagtaaatgatgctagttagaaactacagtttgattcatatcttatacgcagagtggagaggggagcccccagtgctctggggtccgatcactattgagattatgactgttggtagatgcttaaagatcaactgcactggcttttgtgcgatagtattccgcttcatcttcaagttggatggtaggattctcacgatactttatacgtcagtcacataccaaaaaaaaaagcactttaaattgatttagtaagaagtgtccgtcctttcctaccagagtagacttatgcagtcagtgttaaatgacttaatgtaggtgattttaatcacattagttcattcacagtgctgtatacatcacagtgttgtacacgctagccgtgtaccacaggacaacataatagatctgctgttggttgtcttcagccagatgtgctgtcatgccctagtaaacaagctgttggcaccatcagactctctctttgctcacaattgcctgagaacagaaactgttcctacatctctattttatgccccagaggccaagttggcttagcaaagttttgattttctggttttggttttgtctcattatttttagtcagataggtcattcctcagctgcagtaatgagaatgtatttccttaatttaaaaacaaaacaacaacaacaactcaaagcttttcaactcatttgagtacaaactcaagaccttcctcatcctgatttaaattccatattaataattataaatttttcctagatctaattgattatgctgtttacttaatttttcatagtggaatagaaaacacatagcgattctacattgttagatatatgtatatacctttgaaaaagcccttcctctctactaacctgaacagttataagtgggaggagtaagagagccgcatgtgctacctaccttcagagctcgcccagccgtcacttcgtaagccacctcagttctgctcttcttattttaagtagaatactttggagactgtgaaacttaaatctgcagggttttttaaagaggatatgtacagctagctttccactcttaaaaccaaaccacagatgacacatttcctttccgctgcaactcaactacatgtcacggggaaagcaaagactgacttgtccagctggcaatgggatgacaagaggctttgtagcgccagtctccaccccctgaatggggagggctttcctctttccttccccttcccccttttctctcccacctatggcttattgtttatgcctactatctgcttttgaaattagtattattcaatggaaattacatgatggcatctttagtgtggcattaaaatcacttttctaattttatatcacagactgatttgaaaacataaatgtggggtccttggaggtgtttgtcagctaggaggatcaccgagtccgtggaggtgtttgtcagctaggaagatcacacacatcactgccgtttcaagctgcgaactgcagcagtgatctgagcagaatttgggccagagaatgcttgtagggtgtggtgtgtgcagttgtgtcattgcctcagattagacacgtctgttcgtccgggatggattacacggttttgtgtgaaatcagatagactcctctgatgatctccttggttctgctgatcgtaccgaagcctgggtcacagcagatcccctctgatcctgtctcactacgatcctcccttcaggttttctgaggtgcttgtttcctcactagccccacacatgtcacgcatctctaacgctgtctttgatcatctcctccctttttctgaatgagcaccacactaatctccagggatcattagacactttctcatctccttaaaaagatgaccacttttaatttatataatttaaatttttatttatttttatggtgtcactgggactgatcgcagttatctacgcctacctttatgtaggttttgatgtcaccaggtttgcatgaccagcacctgctgagccaagtctttcacacctcccctcctttttattttgagtcaagtttattaagttgcccatggtagctttgaatatttttgggttttgctggttttccttttttttttaaatctcctctcacagtccatcccaaccacagcttcccctccctcctctcctcagtctgccccgtacctcctctttcccagatccactgctcctccattttccttcaataaagagcagcctgaaacagcttcttgtggagttgaaactggcctagaactcaatatggagctgaggacgaccttgcctttatggtcatcttgccttgctcccatgtgctgggatcacaggcttttatcaccacatccatctgagcgctaggaattgcacctaagctttcatacatccactaggcaagtactcggtcaactgaccaatgccacagcctccttgattcttactaaaagtcaaaaaagttgcctatattttcaaaagtgattccaaaatatttgcaaaattgagaatattgttttaaagcagcaaagtgtcatgctctctacatacatttttattagtaggcctgtgctggtaccagccagttgatttccagcaagcaggatagtgggctctgacactggcagtccacagagcatagcttgacaaatatccacccccaggcaaacactgaggcctttctgcccctcacggctgttgccttcctttgtttacatctgcatctctgtaagctcacctatgtggatctcattctctagttagtgtagaacacactctttcctttccacctctcctcaagccccacttctcttttctgttcagctcaaacttccttctatcagagtctacactggatttttaaaatatctacatagttttccctatatatttgtaatttcacgttggtcttaccttcttttgaatgtcacactgtttttttcccctctgttgtttctcttgtgagtgatatagactacatcatgcaggctgaatttgtccaaagtgcttaaatccaaatatttgcaggtttagatttccttcagattttgcaatattcacatttacatacacataaaatgagattttaggtggatagtgaatgctaaacacaaaattcgtctgtttcatatgtaccttatacatataactgaaggcaaagttgcactttagtgtatctatggtttgagcattgggtttgaattgtccaccctggcatctgatggcattcagaaagtgtttttcagaataggaatagccaacctgtgtattttctttttcttttttcaactttttgtttgtttatttggttggttggttggttggttggtgtttttgagacaaggtttctctgtataaccctgactgtcctggaactcactctgtagactacgctggcctcgaactcagaaatctgcctgcctctgcctcccaagtgctgggattaaaggcattcgccaccactgcccagcttttttcaactttttaattgactgtgagtttcaaatcatgtaccccacagtcccatctcctcatgcccttgtatttgccctccacgcttgcaaacctcactcccaaagataataaaaaacaaacaataaatgaagtaaacaaaacaaagcatagaaaacatctcatcatggaagctgtagtatgtcacagtgtgtcccacagtatatccctgtgcttcacacatcttcacttgcaaatgttcattgcaatgagtcattggtctctttctgaggtccctggcttctgtcacaccatcagtattggattctcattgggactcctcccagacatcccattgttgccctctgtcatggagttccttcaggtctggaccaacaagattgtccctttcatgagctcccccagttcacagataataaagatttagggatgggccaactcaaagccctggatctgagcctagatgatagctaagctcatcagcatgccaggtcttttttatccacaccaccaggggcaagctctctagcactgctgcagctagcccacttaatgctgccgtcgtcaagaggcagcgtcagttctcctgctcgcaagccctcagagaggcttatccgtactcacacctccagagtcagcccagctgaggcatgggtcccactctctcaagtgctgcagatagcaaagggtcaggccagttctcaccctctcagggcgggcccacctgccttctctgtgagggccagctctactatattgagcaggcaaggtgcagggcctgctctcccaagtgctgcagctggtggtggtgccagttcactctctgtcatgaccagctctcccagctgcctcaagtggtgggggggggtgtcttttatcatttattctttttaatcttaaactgtttgtttcattttaaaaataatttaacttgtcattttattttttgacaagattaaaagtttttacatgaagatacttatcataactcagagataatggagcataaggaacagtgggcctgagttagtcaagcacagcactcttccgagcttccttctgtgcctacttgtgctctttcagttgtgagccaagtgtgcctggggaagcgggggaaactgcgggtgaatgtgtaaggaccaaatcaagtcctgaggaatgaatggtgtttgaatgcctcaggtccatggcagtggcaaagcttctctcacacacccccatacacccatggtgggctgggaaggactgcagagccgtcctctcgtccctaggatgttggcagggtgtacaaatatgagtgtttaccaacagttgaccagtgtgtgccaaagttggcaattgcagctctctttccccctggtcggtaaagctggagactgctcacttacagaagtctcctgtcaagactaggtggcctcgctgtacctaatacatttcctgagggttaggcttgctgcagttgttggtgcagcaccatcagagtgcacacagcccacctccccccagcttgtctgcttgtgcatttgtgtcagccctttcttgattccttcactgctccagtcagatttccaggacccaagccaagtggacgtggtgtatgacctaatgtggtttaatcaaaacatggaacattagcttatacagctgaacagcctggataaatctaaccatgggggagaattttatctatgactcagattatagccaaactccagactgtcttttcacttctcagctccttctctttgggttttgaggaagacttttccttcctatcccaagataaaatttataatccctcggctgagcagtaatgatgcagccctttaatcccagcactcgggaggcagagggaggtggatctctgtgagtttacaaagtgaattcctgcatagtcatagctacaaagagaaaccctgtctttgaaacataataaacaagcaaacaaatcccagggctgtgtattttcttaattacaaacatggagaaaagctctcaaacccccacaattcgaactatgatttagcctgggatttaagcctctggcttcattgtcctgacttgagtctttgtgttcattgctgagccaccttctgttcaaggtcagctccatggattggcctcagcttctgagcatcttttccagccactggcctctctgaggagtacccagtgtctttcactgtcttctttcttgataggcagatttgttgctattgccataatttttaaggagtttgtttcttctctctttatccttattgcttaaagcctggaaaatataaaacaaaaaaatccatactttgaagacttgttttatatcattgttctctttagaaaattaatcagaaccagagagatagctcagcattaaaggctaagctcagaactagaaatatgaaaagattaacgataaaatttttcaaaggggtcagtgagatggcccaacaggtgacgatgctgtcattataagcctgacaacctaaatccagtctgcacagcatacctggtagggagcgaggggagctgactcttgcccccatgggtgtgctgtgttgtcttctggcttccacacgcatgcacacgctcacaccgacatgcacacacaattagtaaaggtaaacaaaaatacttatattctgtacattcagaacattttaacaatctatcctttttttgttgccttccttaggttcaaaactggccagatcaatggtgatctgctgatataccatgtcttgctgactttaaagccatattatgcaaagccatatgaaattgtagtggaccttacccatactgggcctagcaatcgctttaaaacagacttcctctctaagtggtttgttgtctttcctggctttgcctatgacaacgtctctgcagtctatatctataactgtaactcctgggtcagggagtataccaaataccatgagcggctgctgactggcctcaagggcagcaaaaggctcattttcatcgactgtcctgggaagctggctgaacatatagagcatgagcaacagaaactccctgctgctaccttggctttggaagaagatctaaaggttttccacaatgctctcaagttagctcacaaggacaccaaagtttctattaaggtaacctctggtctgttttaaatatttgttgcctttcctgactaaccaggttatattgtgatctctacaaatgttctcatagttgcatatctaatattagttccatccagatgtgggaagaccaagacttctatctttattgtggttctacagaaaattgcacacttacaagacactctcataaagcctgagtggtggcacagtggttaagagcactggctgctcttctagagatccaggattcagtccccagagcccgcatggtgggtcataactgtctgtaactccagttccaagggatcttctggctcccgaggacaccaggcacacatgtgaagcagagatatatatgcaggcaaacactcatacacacaaaatagattaatttttaaggtacttagtttgggtaaggggcaaaaaaaaaaaaaaaaaaaatgctatagactgaactctgcccagtggttggctgtgtggaatggaaaggacctggcgacatagttctgttgattgcatcatggtttttcagagtggtgagttttacccccttcagtatttataaaattcttggccttttttaaaagaaaaatgatttttttctgttggatccagtttcttttgagagtatttataagtaagtgttaaagtaaactaaataatctcatagctaacatggcgtggggggggaatgagttgggttttggagcttctgagaattctgtgtaactggaatctattccttcctcacaccgtttctcaggttggttctactgctgttcaggtaacttcagcagaaagaacaaaagttttggggcaatccgtctttttaaatgatatttactatgcttctgaaatcgaagagatctgcctagttgatgagaaccagttcactctaaccattgcaaaccaaggcacaccactgaccttcatgcaccaagaatgtgaagccattgttcagtctatcattcatatcaggacccgctgggagctgtcacaacctgactccatccctcagcataccaagattcgaccaaaggatgtccctgggacactgcttaatattgcgttactgaatttgggcagttcagaccctagtttacggtaggtatttctctcccacccttcctttttttttttttttttaattaaattcacttcaagttgaatagtatctcactgttgttaactgagtgccactgttaagggcaagggaaggcctaaagtttaatgaatcggatacattactgcgtcctacctgtgtcatctcaggagttttctctaaagaaatcttctggtgctcttcctttgcctcagcaacagagcaacatgaacaaaaagaatattactgtctggagagcatcacagtcaaataccacgttctgtcgcggctgtggccaagtgcaaggcaatgtatacctggaaactgacagagaacactgctgggcatcgtgcatgaggcgcctaggcattgtctgctgcacagctcaggcagaagcacagcccagcctgtagactcagcagatgtggtttggtggggagctgctatgttgtaacacagcttgctttcaggcacagtggggaactctcctttttggtaaaatattggtaacaatgccttcctaatgtacctatcaggtgaaggtttgacagtagcatttgcagtcaggtctataacacaggccaatggtttgtgcttagcgaatggtgttttcccacttcctattcccacctcctttctcttccttttctttccatgtgtggatgattctttatcttcggtatcttaagaaggtcgagaatttcacttatggaggtagaactttcctagtctgaattccaagacgctccagaatctgaaatctcttatgtactttgtccagactttctgacatgtcactttattaagacgagctctctctgtgtagctcaggctggccaagaacttgctggaattaaggtcactttcaccacccccaccccaatttcagagcttttaatcatagatgctcattctgcaaaatctatgtaaatatttcaaaccctgaacatatctgaatatggtcattttagataagagatgcttaattctcagattcaggaactctcccttaggatataacataacccagggtttatgctgggccttataagctttcaaatttgcctttatttagaaggaaaaaaaatgtgtccagcaagatgtctcagtggataaaagagctcatcacaagcctgaaggagagaactaaatcccaaaagttgttctttgacttccttgtatgtgtccacatgcatgcgtgcgcgcgtgcaaacacacacacacacacacacacacagtacataaatgaataaatgtaattaaaatttgtaagtcagatgtgtaacatatgtatctgatacctgtactcagaagacacacacgagtggatctgtgaggtctgcatagcaaactgtgggatagccagggctacataataagactatctcaggaaaaaggaaagcaggacaatagtcaacagatttatttttatttttatgttacttccataggcctcatggactctcacagatggcttggtaaattgtatgtgtacttggctctccttaccttagaaggctctttgacacgtacccaagttatggaagcccagttttttatgactcttaggtaatataaaatagcatcagcatagtatgacttatcagtcagagaaagataagcataaattcacagacagtaatatgtattctcatgtttagggaaattgagctataaggcctgtctttacttttcgattccaaatagatctttattgtttatcagttgggtattttgtctttctaacctggaattacagtcctcctggcgctgcttccactgaatgctaggggtacaggcctgtgccacaatgccttgccacttgccatctctgttaaataatgctaatggccaccttggcttaagtgaaaccatcccactttccaagttagtaaaggatagcatcccagagaaaataaaacacctttgggcaaacgtcccatctccatagcttttcctcctgtgtcaacatgtcagaaactcagacgtagtgaaagcctgaagttcactgagaagcccagctgtttgttttgctgcattttaaaactgagcctgatgggggtgggtgggtatgggggacttttggtatagcattgggaatgtaaatgagctaaatacctaataaaaaatggaaaaaaaaaactgagcctgagatttggtggggtggggtggggtgggggtggaatgacacgtgttattttgaagtgctagggattgaacccacaggctcatacatgtaaggaaaccattctacctctgagctgctacagcgcaaacctcaagactttgttaatttttgtagtttgcttaaatacatatgtatgtatttataatatactttctgttctaatagaccataggtaatacattattggttccagtggttatagatcatagattaaggtcatagaatagaaaatgtagttgcagctttttaactagagttaatttttgttttaacctctggtttacaatgtaaattggacaacataaacattccgaggttatccttactttaacactttaaacattatttgattaggtgcctcttgtggccctggctgtcctggaactcactctgtagaccaggctgccctcaaactcagaaatcctcctgcctctgccaccggagtgctgggattaaaagcgtgcaccaccactgcctggcctagatgcctcctcttaaaacataaagttctcttgctatgtagccctgactgtctggaacttgatgtagaaaaggctggcctcatattcatagcctacatctgcctccctagtgccaagatgaaaggtgtgcactgccagagtcctcctcactctccttctctgtttaattggatctgtgagcatagtgttgacttcactcataatacatggcatgcctttattcagtcatttacttctattgatcacccaagaccctaaatctttactggtttatgctcccatgaagatttctaggaaggccagcacctcttaagagtgtcctgggctcttctcgtccggcgctgacttcaggactggtttttctcactctcctgtttggggcttgccgcacattctgcctctagtcagttgtaacactgagaaagaatcgaccgtgctttgtgataaaacctagagttgtatgttgtggggaaaatgtaactacaaacaaagaaaatgtaaaacaatctccttcatgtcttctcttaggtctgctgcctataatctcctgtgtgccttaacctgcacctttaatttaaagattgaaggtcagttgctagagacatcggggttatgcatccctgccaacaacacactcttcattgtctctatcagtaagacgctcgcagccaatgagccacacctcaccttagagtttttggaagagtgtatttctggatttagcaaatctagtaagtaatgactttccttaatattaaaaatgacttttaagacaattcaaagaaaactcttttgtttgggaatttactaggagtctctcacttgcttttttttttttttttttttgtctgtggtaccctgtaactaaaggacctctgaaagaaaatcctggtgggatgtacaaagagacctatcagaactctgtgggaccctcttccctgtaggctgttggacagatttccttctttatttcagcgccatgaactttaccacttctttttttagataagatattaaggaaatagttgcttttccttttatagttgagttggaactatgatttttattggacatctgttggtagatgatgccagatccagagtcagcactgagtttgttttaataaatttcattaatttaatatttattctttttaacatctgtcctccttcataccctgtactaacatagctgctgatctttgcctggcttagttgctgacattttcttctccatataatacatacagcttttccccctgcattctgcattcaaaatcatatcttaatatctcagtattaggtgattaagtgctttaacagttcatcaagactgtgtctgattggagctggagagatggctcagtggttgaaagcacaggttactcttgcataggaccctggtttgattcctatcacccacatggcagctcacagccacctgtgaagccagtttcaggggatctgatgccttcttttggatttttcaggcactgcatgcacatgctgcacagacatgcatacaagcaaaacacccttacatgtaaaataagataaattagttaaaagataaaaagactgcataggtacgttttgttctatttttttccgtcaagtggaagatgtaggagtgtaactctgaagagagattgtacatttgagaaacaagaaaagtacaacgttattagtaactataaatgcgtgaagatacctgagtgagtggacaggcatactgtgtcttgcacaaacagctcttctgggactatttcatatttaatacagtcccatcaaagagtttgaaattcccatggaatttgaaattttcaaaatattttaaattttactgaaaataaacagctaagaaaatgttataaagaaagagagtgcagatgtgatagtacagatgtctcctcacttacatgttgtaatggcatagtaatcaaaacatgaatgttcaaaactcagccagcagatctatttaagagaaacagacagctcaagtgtcacaaactgattagtgagatgaaatcacttaagaaataagtttgaaaagtgtaggttacctacacaaaacataccagtgtaagttctgactgcatttagaagcattggtagaggtggggcttagatgcttttatgtgagtagtgtgtgtgagagcagcacacccaggaggaaggtgcagggaggaaggaagagatcgcttcacgagactctggaagatctccacagaaaaaagaacacaccggtgtgtgactaagctgggctgggaggtggcttcactgaacatggaaagattaacgtccttagttcagggctcctctctgtagcttagtaaatgagtcacggtagcataatactaaaaaaaaaatatttttaagtttgttaataaaaattacatattgaaagaattgtgaaaaacgtcttttaaagattaaatcctgagggtctgtagcattgtaaacaagaacaatgtttctagaaagacatttagaagtagattcgacccttaagaatatttccatctggggctggagagatggcccggtggataagagactggttgttcttccacaggtgccaggttctatttccagcaccaacacggcagctcacagctgtataactccagttcagtggatgcagtatcctcacacagacataaatgcaggcaaaacaccagtacatataagataaaagtaaacaagataaaaataaagttaaagaatattttacattttttgacattatagttctactttttaatattttcctgaaaaaaatcaatgctaaggaaccagcaagatggcacaataggaaaagtgtcatgccacaaagcctgataacctaacttcaatccctggggcttatgtaagggtggagggaagaagccagtcccacagagttctcctctgacctcaccaggacacacatacccttgcacacacattttttttaaaagaattaatgcagagatgtttatagcatattgtttttctgttgctactttaaaactaagatatatcttgtcatagtaacgttcccagctgttaagtgagtagatgttaattaatgagctttgacagggaataatcatgaaaagatcttctagatcatagcctatagtattcctagtgtccgtcagcttctctcagtaccacctcctcaaactcagagatccgcctgcctctgcctccaagtgctgggattaaaggtgtgtgccaccaccttctagcttggctttcttactttaaatttagtttttttcaaagtgtctttacctcttatcaaaatgtttgtctaggcctaattcaagataaaaatctttatcttcaaccttctctctggtcctttgttgtgggaaatattaaaaaagagagagagaccattccgcgctatacccagctactctctggccccagaggtctcagtcttgctgcttccactagccccagctccagttcacctgcctcagagccgcttgtacctttccagccatctacgccctgcaactagccatcacaaatccccttaacccagtaaatcaaaccccccccctttttttttaattggatatcttttcttatttacatttcaaatgttatcccctttcccagtttcccctctggaaactccctatcctacccgccctccccctgcttctatgagggtgcttacccactgcccacccacttctgcctccccaccctggcattcccctacactggggcatgtagccttcccaggaccaaaggcctttcctcccattaatgtctgacaaggccatcctctgctacatatgcggctggagccatgggttcctccatgtgtaatccttggttggtggcttagtccctgggagctctgggagatctggttggttgatattgttattcttcctatgggttgcaaaccccttcagctccttcagtcctttctctaactcctccattggagaccctgtgctcagtccaatggttggctgagagcacccacctctgtatttgccaggctctaaaagaggctctcaggagacagctctatcaggctcctgtcagcatgcacttcttggcatctgcaataatgtctggtatctgtatatgggatggagccccaggtggggcagtctctggatggcctttccttcagtctctgttccacactctgtctccatatttcctcctgtgagtattgtgttcccccttctaagaagcactgaagcatccacactttggtcttccttcttcttgggcttcatatggtctgtgaaatgtatcttgggtattccgatattatttagtctaatatccacttatcaatgagagcataccatgtgtgtgttcttttgtgattaagttacctcactcaggatgatattttcaagttccatccatttgccttagaatttcatgaagccattgtttttaataactgagtagtattccattatgtaaatgtatcgcattttctgtatccattcctctgttgaggggcatctgggttgtttccagcaggcttttataaataaggctgctataaacacggtggagcatgtgtccttgttacatgttggagcatcctttgggtatatgcccaggaatggtatagctgggttctcaggtagtactatatccaattttttcaagaaccttcagactgattgttgtacctgatggttgtaccagattacaatcccaccaacaatggaggagtgtgttcctctttctccacatcctcaccagcatctgctgtcacctgagttttcaaaactcttaaaacttataattatcagtcagttttatatatcaatgaattctcaattcccaagatgcccatacaataattttagagccagttgataatgacacaagctgcccacctagattagacaggttatcccaatcattctatccttctatgatattcatagctatctgtggctatttaaagccacatggaatctgaatcctctttctcttctgttctctctcccgttgctaaaaatctccacccgccttccttttccactgcccaatcacaggcttcttgctgggttaatatttaaattaactggaggaaaattctgctgcatccttcatgactgaatcattcctgaggctagagaggtggagcagctgtcctggctgttccttcagaatacctgggtccgattgccagtacccatgtaatggctcgcagtgtttataacccatgtaatggctcactgtttataacccatgtaatggctcactgtgtataacccatgtaatggctcactgtgtataacccatgtaatggctcactgtgtataacccatgtaatggctcactgtgtataacccgtgtaatggctcagtgtttataacccatgtaatggctcactgtttataaccctggtcccaggggatcagacactcttttctggccttattggacaccaggcaagtatgtggcacacaaacatacatgtacacaacatactcatcatacacataaaaattaaaatgtttgtcattttcttctactatctgtgctaatggagtattttcttcacaggtattgaattgaagcacctttgtttggaatatatgaccccatggctgtcaaatctagtccgtttttgtaagcataatgatgatgccaaacgacaaagggttactgccatccttgataagctaataacaatgactataaacgagaagcagatgtatccttctattcaagcaaaaatctgggggagccttgggcaggtattgaatttacactgacacttatccagtgcctcttttgtgctagtaattcttggtttccatgttacacagagcaccctgttctgtccctcagaagcatgtagacacatacccagccctgtaaatagctaatgcatctcagagctctcttccttgcataattttatagagtttagctataggcacctgtcgtcattcctagtaaatagcatctaaatatgtacttagtctctatcaccactgatgtctgtcacttcttctcagtgatgctatttacaacatctgcttgcatgtatagttgtagcatagatacaactttccttaacctgacaagggaggtgcacgttattccttcaaaataatcacttaaggaagcagtgcccttaacttagacaatgttgtaaaccctataaatgattttaattggctttggagccatttttctgactgactggtattattaaagtaattagattggtcatgtgttactgtcttggagcacagacatagtgtctaagcagctgaagatagtcgtgcaaagatgcttaacctctgaaggagtcaagtggcaccctcttccttccctgcatggtttacaggtctcttaagtctagaactttgaaagtctctagtaaaacaagatgtccattacttgggctcttttgagtatttcttcattaaaggcagcatgcttgacagcaacatgacttgcttgtctcaccagatcacagacctgctggatgttgtgcttgacagtttcatcaagaccagtgcgacaggaggcttagggtctatcaaagctgaggtgatggcagacacagctgtggctttagcttctggaaatgtgaaattggtgtcgagtaaggtaaccactttttctgtacctcttggactatgccatagtatatctatttatcatcttgagagtttttgtcttataaccagctaagtttaaacagatttgagtgagagtgtgtgtgagagtgtgtgtgtgtgtgtatacgtgtgcatgaatgtctgtgtacacgcatgttgtggcacacatggaggagtcaggatagtttgtgggagtcagttatctccttccaccagatggcccccaaggtatggagctggatgctgtgcaccctaacctgccgagccgtctcatccatcctgaatttattttttagatttgcttaggtttcttttatgtgtatgtgtgccacatgtgtacagtgtccgcagaaatcagcagaggttgtcagaatccctggaactgaagctgcagaaggttgtgatctgccatgtgggtgctgggaaccagtgttccctctaagagcagcagatgctcttaacctctgagtcatctctccagcaccctcaattttacgtgtgatggaacttttagtcttatgtttgtaaaacttgttcttctttacaggttattggaaggatgtgtaaaataattgacaagacttgcttatccccaactccaactttagaacaacatcttatgtgggacgacattgccattttagcccgctacatgctgatgctgtccttcaacaactccctcgatgtggcggctcatctgccctatctcttccatgttgtcactttcttagtagccacaggtcccttgtccctccgagcttccacacatgggctgctcatcaatatcattcactctctgtgtacttgttctcagcttcactttagtggtaagtccctaggaggtgatctcgcttcaccagttctttctcagctttaccttaccagactgctataggtttctcactgtaatagtattgactcaccaggcctacaagcaggaatttgaaattttatcaaacaagaaaataataaaaataacttgcacaccatagaaagctacaataagggctttctttgtcatgcagatacttgtaattatcatataacctaaaagtttattattagttgatagtgttggcattactagtgcaggtttattatatagccactaatgtaatgcatcaggaatttgatttagggagcatggttgtgtgatttttgcatgatatttacattttatttagttgaagatgaaacatactactttagagttaaaatattggaattttctttttcttttacagaagagaccaagcaagttttgaggctcagtctaacagagttctcgttacccaaattttacttactgtttggcattagcaaagtcaagtcggctgctgtcattgccttccgttccagttaccgggaccgctccttctcccctggctcctatgagagggagacttttgctttgacgtccctggaaacagtcacagaagctttgttggagatcatggaggtatagaaagaaaaatgacaagaaaccaaattaaaatcgtatttaaaatgtgtaatatgaaaggtataatgtcacaggagggagagacaggtagattgtgtgaacttgaagccagctgaatctatgtagggaattctaggccagccaagcctacataataacacctcatctgaaaaaaaaaattctgtaatatacagaagaaatactggtttattctgttacagtacacactgtcctttagaatgtgttctttctttacatttatcttactttatgtatctgaatgttttgctggcatgtatgtgtgtacaccacatgtgtgcctgttgtccaaggttgagagaagaatccagaagaggacatcaaattccccagaaccaaagttacggatggatatgaaccagtctgtggattctagaaacagaagtcatatctttcctctgccacaacaagtactcttaactgcctagccatgtctctagcccctagaatgtgttttttatagcagataacacttaaagacatgagaatattaaatattcctagaaacatttatgtacacatatatatttagagtattctctttttcaggcatgtatgagagatattccaacatgcaagtggctggatcagtggacagaactagctcaaaggtgtgtccttggttgaatagtaactagaactgtgtgtgtattgttgaaagtagctattgcagcagcagcagcaatctcgtattataatgtgcatacacacaaaggttttcataagttccttggctcttttcattgcagatttgcgtttcagtataacccatcgctgcagccaagagctcttgtggtgtttggctgtattagcaaacgagtgtctcatgggcagataaagcagattatccgaattcttagcaaggtacctattcctcttttcccaaagatttgttccaacttacagtgtatacttcaaggttttaaaaacacactaaaacgtaataaatgttattggcactgcaattatatatttgttaagcatttaaactttttttcttactgcaattctttgaagtgatgaaatcttacctaactacctttaagttcaacattgtggcacacgcctttaatcccagcactctagatacagaggtaggcagatttatttgagagtgtgaggccaacctggtctacgtaagcgagttccaggacgtaattgaaagaacttgtctcaaaaagaaaaagagaaaaaaaagtatcttctaaaaggagtatttacctctttttctagtcaggtatacttaatcagtcttgaaagctgtatagctttaatataaagctatgtcatttgtaattactataataacgcccttcttattagaatgtaatatagaaatattttaaaaataagtatagagtattcaccatttgtagaaattgtcaaatacctaaatgtttctcagctaaatctgagatttattataggaagtgatgttttatttcaatgaaaagtaaaacaaagatttctgtttctctaaaaggcacttgaaagttgtttaaaaggacctgacacttacaacagtcaagttctgatagaatctacggtgatagcactaacaaaattacagccgcttcttaataaggtaatcattgatattgattctgcgtgtgcttttcttatacagagtttaggaaatagggtggattgaaaagagtataaagaagaaattatagtcagcatggagcctcttgtcacagagttagaaaataaggggtagtggcctagcctggtggcccacacctttaatccatcactcacgaagaagcagcctggtcaacatagcaaatctcaggacagccagggctacatagaaaatacttgtctcaaaaggaagggaggtgggttggagaaagaaggatggggagagaggtggggtagagaggaaaggaaaaggaagggttgattggaaagagacaaagtagagcctgtgtcacaagtcttagtagtttgaagaagaggaagaagaagtatagagtatcttttctcccgtgcttgtttgtgatatttttttctctttggtactagaagaaagttgagctgggtggtggtggtgtaagcctttaatcacagcacttagaaggcagaggcaggtgatctttgtgattttgaggtcagcctgatctacagagcaagttcaaggacagccatagctacctagagataatgctgtcttggggggtggggtggggagagttgagtatcatgtatggatctggtagtgcttagagatacacagagttcaccagtggcctgggtctgggttgggtatggatgctgagatgtggacaagtaaagtagcctaccactcagtgcgttgttagtgatcactgctggagggatggaagccaggagcagtgcctgctcatcagaggcgtctgcatgctggcttagggtgtaatcaaggaatagtacttactcagtatgtattagaccctgggtaccgtctccaccaagggagggggaagagtaggagggaggcatggagtacatatgaataagagtttatactagtaagagtgatacgaagttgtagtgtctaactagagctagaagtaagtaggacagtggggtgctagatagaccaaccttgtagagagttgacagagaaaagtgtaaagattgagtagaattaactagcattcaacagtcttcaggaaggagtttgaaatgatcgtttcctaggtgacagtatggtaaaaagcaggacacaggtgacccagagaagggaggaagtgcctgtagaaggacggttagcctggacactgtctgcagtgtaaccaggaggtggcaggtgtcagtctactatagagaatctgccaactctgggtggtggatttgacatccagcattgggagaatccaggggaagctcaggctctcaggctaacttacggtacttgtaatcagatacacagagccagccaatgcgcatcggtctgttcatagttctcagagaagaggaagcacattcacttagtgggtagcctgctctggtttatgctgcagcatcatggaagacagtgtgtcttggttcacctcactcactggagcggatctttttttctaggactcgcccctgcacaaagccctcttttgggttgctgtggctgtgctgcagctggacgaagtcaacttgtattcagccggcactgcacttctggaacaaaacctgcacaccttggacagtctccggatattcaatgacaaggtgcgtaagctgtcctctgaggtcacattgctcacagtgagtcttctcttccttttctcctatggctctctagatgtcagaagaggtccataatctagatattacagtaacgtgttttattgtgaatatagttccttagtagctcactaaaaactgtttaatccatagttcctatataaaaatagccaaggacagtgtgccctacaactagtgattagaatagacataaggagggccggaaagatggctcagcagcactgacttcagcacccgaatggcagctcacaaccatctctaactccagtctgaggaatctagtgccctctctggcctccttggacactacacatacatgatgcacaagcatacatggaaagaaacacccatgcacataaaataagcaaatacatttttttttaattttaaaataatactgaagaggaataatagctaccacaccaggtcctgtgcattcattactggttatctttagtagcattcttcatccttgtttatttttatttagtgtgtgtgtgtgtgtgtgtgtgtgtgtgtgtgtgtgtgtgtgtgtgagagagagagagagagagagagagagactatttttttcagttaatcaataagaaaacttatttttattgactgtgtacttgaaggaaaatctgtacaattagtaacagataagcaagttggagactcgccagacaatttttgccaagtctcactttaaagtataccattagcagcccccttcacattgatcaacataggtaggggttggattttggtttagagtatagaggataaaataaagcagcccagaattgggctagtgatctggcttagcaagcagaggcacttaccacccagcctgacgacctccgttcagttcccaggcctcacatgtgtgctgagtaaatgcaaaccgttacttcacagccaatgcaaaagtatgttccttttgttttggagaaaaacaaatagcttaagagaaaaaagaatgttcttttgaagaaaatgtgtgtgcgcatgtgcacacattcaaaattatcttgaaatgaactgatctatgtggaaatagaacatggcctgagtgtgaagataccccggtctaaagtacttgtatgtttgtatgtttgtttgtttgtttgtggtatagaatgtttcccttcatgtatatcatatgtgtatcacatgtgtgcctggtctggtgctcctgaggttagaagaagggaacttctgagttacaggtgattgtgaagtgccatataggagttctgggaagcgttctcaggtcctctgtaagaacagcaagtactcttgactactgtgccatctctccagcccctaagtgcttgctcactgtacataatgtgatatagactcaaaacagctggaaatctaggaaatgtgaaactatgtagctgtccagcagccacgtggtaaactggatttacctgaaagaggggctggaaataaggtaagggggtaagaaaaggataaagccaagacaaaggttcagatcaaggctcaaagtttaataataagcattgcatatataaaggaaacaaaaccacaaaatccacccccttcttcagctggagtatgttgtagagcaagatcaatacaagcagctgagacttcaaagtttccatgggaacctgcaactgcagctaaaacagatgtctctgtccaggttgataagacctgtcatggcgaatgttcaaggtctgtttagtctgctcaaggctgggaaaaatgctcagccttttcaaggctgggaaaggcctactcaaagctgagaaggctacaaaactaaattatagatagaagataccttgaagtttatcagtcagacctctgttcacaaaatggaaaagagtaaagaagttactggaatatgtctggctctgagcttcttcccttctctactaacttcattgctctgctctggaattgattgagatcatggtggttgcaagtgatggctagctattggctatttgtatgttaaggatatttacaaataaatatctgaagagataatttctttcttacctttacatcagagttaataaagcttattaaaatcagcagactattctctgggatgtagagttagagtaatagtgcttgtccttcggtcctgctccttgagaggctgaagcagagccagtcctgtaggagttggatatcagcagacaaatgtagctgggcatttgatgagtggctgtaatattagcacttgagaggtgttgacacagaatcaggggttagtcagtcttttctacatagcaggttcatatagctcagtggtaagagtgcttgcctagcatacttaagactctgggttcgatccccaggaacccctgaccccaacatacaaaacacacacacacacacacacacacacacacacacacaccctgttgtaaattaaagcaatttgagttatctactattttattatttatcttttttactgtcttataccagttaaatatagtagcgtaaatgttcttataggtgtgtctgttatctaaaaataatttctctgaaactgaaagtactacttagcctgtgagagctgttaaacacaagtaaaaaagtgactttttaagcaaaatatctgaaccaagaatacaaagtatgcttggggttctagtactggaaaacgagaaggaaaatttctgtgcgaactccaccaagtgtctatctcctgattgtttttaatagagtccggaagaagtatttatggcgatccggaatcctctggaatggcactgcaagcagatggatcactttgtcggactcaacttcaactctaactttaactttgcactagttggacacctcttaaaaggtaaagagactttttgttagaatgttttgtggaattgtatctagaagccaaaagtaactaagaagaattgattacttgagataaattgctgtaatctagcatatatgctacactttaaaatgaaaaacatatctgtataagttgtttcaattggtatttaactagaatctagtttacatatcagaccttaaaagaacaaagtagttagtagtaaaattcccccaagacttaattgctgtgttactagttactagaacactgcacatgatgttatgtcagtgtgcatattgcgaatgttattgtacgaagaaggcttagggatgaggtcagtcatagaacactgggtaactttccagcattgccaaggaataaaagagatttttcagtttagagcacactgctgtttggatatgatcgtagacactctttgacttgtttctagcatgttttcttttatttttttattttatttatttattttttttttttttttttttttttggttttttgagacagggtttctctgtgtagccctggctgtcctggaactcactctgtagaccaggctagcctcgaactcagaaatccacctgcctctgcctcccaagtgctgggattaaaggcgtgctctttctgtgtacattagagtcctgctattctggtacctctcttccagtttcattgctgtttctatagttaaccatctccaactagactggagctaatgtgcttctacctagctttagctgctcattgccagcttcataacttcagagctatgctttaataaggtgcttatttataaaataaataaataatgttaaggcagaggcaggagagttcaaggccaccctagtccttagctttatagtgaaacactatcccaaaatcaggaaaaagacaaaaaacaaaaataaagaagcaaaaaaaagggggggaaataatttttaaagatgtatttattttatacatacgagtgatttgcctggatgtatatatgtgtagcacctgagtacttgttacctgagaactagaggtataggcagttgtgaacccctctgtgggaaccaaattctggtccttaatttctgagtcattgctgtggccccaaaggagaaacactttttaaatattagcacccttacttcaagtgaaatctcaaggggagctctaatgcgcagttttgtttgtatttatttctaacctctatgcttctttaggaaatggaaaagtcaagaatgccctttgtttcctaatgccttctcctttagggtttcaaggaacaccctcttctacacattttagagttcttaatcatatgtataattaacttcacatttttatgttttaccttcacaaacggctattcttggatggcaggaattttccttttgttgtagagttacttgtcacagcataagagctcaaacatttgttcatggactaattaactggttatttgttgttttttttctttttatagggtacaggcatccttcacctgccattgttgcaagaacagtcagaattttgcatacactactaactctcgttaacaaacatagaaattgtgacaaatttgaggtgaatacacagagtgtggcttacttagcaggtaaacgcacgtaattgactaaatcagcctgactccactgttgtcttagaatcagcaaatgatgtccttgcctagctttggccttccagctagtctttagtccagtagaacactcacagttcagtcctttcgtatttgaaaaggtaaaggttttgccaaaatagttttcattataaaagaatttgcactggaatctgaaatatatcccggcaggccgttgtagccttctcttctgtcctctatgtaaatttcataagcatcacttgttatagtctctcaaaatggacatgatgcttcggaccaatctactgctgtctccactccagttttctacagggcttctgtctcttcagtatgaattctttgtactgtttgacctgggctgcctgtccagtccctgctattttttttaaagatttatttatttagtttaattatatgagtacactgtagctgtcttcagacacaccagaagagggcatcagtttccattacagatggttgtgagccaccatgtggttgctgggacttgaactcaggacctctggaagagcagtcagtgctcttaaccatgagccacctctccagcccccagtccccactattttattaaagtgcttttgtatgtcttctctgactttctctactgtattctactcacagaatgcagactgaggtatggtttgatggaagatgcccattctctctttaacaaatttccggttttgccagcttgttttgtttgaagcatgcaaccttgaacaaaccgtttacattccaaaatattttatcactgcatttcagatatatgccttgcctactttttgtgattattgaaagcagatatgcaatcaagtgcttgagaaagtaaggtgtttatcaaattgctttgttttatgtttatgcagcctttcaaagcagtctgtaaactcttgaggataagtctatcccgtgtgtttatacacttcatcctctcactctccaggcctttttatgtacatataaaatagtacatagtaatagtaatagcctcttaagtttggaagaaatgaagcctgttttaccagcttttccttttcctattagctctactcacagtgtctgaagaggttcgaagtcgctgtagcctcaagcataggaagtcccttcttcttactgatatttcaatggaaaatgttcctatggatacatatcccattcatcacggtgaccccagctataggtaagtgggcaggctctcatcattacatagatggagtcaggctttagtttccatgtggtggagatcggcagcagaggactctaaaagggagcagagtggcagctccagatggtctggcaagagtagctatcaaagtttgctctacaggtcatggtattttatataggcagtattaaagttattctaatctgctcttatattatcattagttcacctctttaaacacaaaacacttgaataaggaagaaagacaatcttgaaaagtttgcagaaaaggacctaaggaaaagcctaacatgaaatacaagtaccattggatccctgatgctaagaactaagcgagggcaggagggtcagctgagtgggtaaaagcacttgtattcttgcagaggtctcaggttctcttagttcccagcacccacgtgattgttcatagccatctataccctaagttccagaggatctgacattctctttggactaccttggatagcagacacattgcacatatacatacatgcaggcaagacactcatacacatagagtaaataaatattttaagaaacaacgacaaaaagtgatgtaggagggtaaaaaacattcgtatgaactgtttattattgtcattaccatttaaaacctttctgtagtgtagttttattgttattgctttgatgaaagctctatgtgtctttggctggtctggaactccctatataaagtaggctgaccttgaactcagagagatctgcccccaccaagtgttaggattaaaggcattcaccaccgtgcctggtttctgcagtgtaggttcatgtgagagaatcataaaattatgactactgttcttcatggctttatgtaggttttccccccaatataacatgaagttacataaattccatctttggggtattattctataatgtgaattaaacatatcatgttattaaatttactaatatcttgcttttttgtagtaaaaagactcctccccaaggacttgaccgagactgcaacaatgtatgcaggctttcctaataaacaccgtgctgtgctcagaagtcttattctttagccaatgccatgagtttatttttttttttttttgacccttcttttggctatggaaaggaaaaagtaatgttacctgtattcaggaaagcttaattctcaaacttaattttatcagtttttaaataattcagtaatacagttgcctatttagacttattttctctgattataaaattcaatgtaataagttcaagagttctattactcagcatcagttaatgacagtgtatttattctgtatttgaaaagtgctaagaaaatggatgttacgtgttctcaccacaataaatgacaaatatgtagggtaatatatgtcctatattagcatatttaggcattttcaaatacctttttaaaaaacatgttgttcagctgggcagtggtggcgcacgcctttaatcccagcactagggaggcagaggcaggcggatttctgagttcaaggccagcgtggtctacagtgtgagctccaggacagtcagggctacacagagaaaccctgtctcgaaaaaaaaagaaaggaagagaggagggagggagggagagagggagggaagaaaaaaaccatgttgttcagtaaaaatgtacaacttttttcttgtcaaattaaaaagtttggagccatatgtggtagtaaatgcctgtggtcccaacacttacaaggtggaacaggaggtttggaattcaaggtcatcctagctatatatcgagttttaggccaggctcagctacctaagaccttgttccagtgacaaacaaaataggagctagaggtatagctccgttggtagaggatttttttctggtatgcagaaggccctgagttcagtcccagtgctgcagaagactgactgactgtagcatgcacacctgcctgtctctgactgtggggtgcacacctgacttcttggcacctaggaagtagaaacaggaatggaagctcagtgccatccttggcttcatagcaagtttgaggccagcctgggctcaatcagtaaatagataagtcgttctgggtttcaccagtttagggatagaatactagccgtgcacgtgtgaggttccggattcaatccctgtcctgcagaaaagaaaaaaagcttaataaaattatgcactatagttcttcctgtttacctgcctagggatacattaagagttatacactaagagccagctatcatggtacatatctgtattgctagcattctggaaactaaggcaggaggattagaaattcaagaccaacttagagcacatagcaagttctgggccagcctgggcaacttaatggaaagttatcttaaaaaaaaaaaaaaaaaaaaaaaaaaaaggaagaaaagtttttgtcctatggctctttaaaatgcagtttttgaattaattgattgccattgttaggaaataggacagctattaggaatgagtgaacagtggttatatttattatcttcttgttaattaattcttctaaattgtttcaatttttcaggacactaaaggagacccagccatggtcctctcccaaaggttcagaaggataccttgcagccacctacccagctgtaggccaaaccagtccccgagccaggaaatccatgagcttggatatgggacagccttctcaggccaacacaaaaaaattgcttggttagtttatctttattttatataaattttcacattattgttagtgtgaaaaatggttagttactttccctcttggaaaattaattgaaactatttagattgccaacttttttttgtttgtttgtttttttgagacagggttttttctctgtgtagccctggctattctggaactcactctgtagaccaggctggcctcgaactcagaaatccacctgcctctgcctcccgagtgctgggattaaaggcgtgtgcaatcactgcccagctagattgccaatatttactgttttgatgtaacaaattcttgtgacttttgaatttaatttattttatgtgtatgagtgttttacctgcatgtgtatggatgcataccacatgtgtacctggtgcccatggctgcagaagggtgttatagcccttggaactgaagttacagacattggtgagcttcctgtgcttgctggggagtgaatcctctggaagaggagcaagtgttcttactcactgagcatctctccagcccttgtgtggctggctcctctaagggagttgattttaatggatgagtttggttcagccgtgtcttcagacagagaattcagaatgagactttggaatggctttgagtttgatttggtttttatttctgtgtttttaaagtctatttccaagtactgtggcttttgatttgggggccctggacggcagtgatgagagtggttagctatctagaggagaggaagcactgctgtatagagggctgggatgctaatgtcccctgaagtgccattcagaagtagaatggaccgccctaagagatctggaaccatataatctttgaaacaacaaaacaaggtatttttaataactataagacaatattccttttagaaattcttgtctgtgtatatgcgtgcagacaggtagagattggaggcagtcttggactgtcagttctctccacctttatgtgagatctgcgcattggactcaggttatcaggcaacaaggcaggtgcttttacccactaagctatcttgtcgacccaaaataatgatttttgacagttctatcaacattcctatgagaaatgcttgcacaatgctaagcctttcatgtccagtaactgatgagtgagttcctgaaagaggacactcgctgacccacagagcaagtgtgaggcagtgcttgcttgcccttcattggctgccactctaaatcgttactcaaattattgatgtgtctaacctgtgataaataatatgagtgtggactctggttacccatgtaaacatacttagtatcatgagatagtattatgcaaaggtttgctcataaggaaattggtaagcaaacaacaaagtgtaacacaaataaccttccagtaaaagttgaaaggagaaataacaaatgccagccattgttacagttcagttgagtctgtcgtctctcttctatttgagttcccttagttaatcctgtgtcatcagtgatttctggttacttcgtgttttgtcattatggattttcataccaaagaagttgtaagtgaaaaactaacctcagaaaatgcagtattgaattccttcaaactctgttctaagtagaaaaagtagggtctatgctctttagagaagggcttatcctttggtagttatgacttaaaatcagctggtgacaacagtgtatagcagtggcattaaagcagtaatgcttaacattactgaggctcttaggaaattaagaggtaatatttgagccagatttcagagatttagaccatgctagccaggtggacggacacaggataaggaaaggcatgcatgcaagaggaagcatggtaagggaagagagtgtgggagcagtggccgtgggtcagaacatcagagcaggtgaaggaggctggagaagcacagcgtggctgtgagagacaaaccagacagctggctgcatggtagctcaactctagtcccagcctttctctggcggcattggagccagaggccggtgcatctctatgagggcagtatggtctatgcagtgagtgccagcagagccaggggtatgtggagagatcctgtctcaaaagaacaacaaagactacagtgataggagatttaccacatcatacatccaacagagatcttcattaaggaaggaacaagatgcatctgttttatttgtttgtttgtttgtttgtttgtttgtttgttgttttcctacattttcctgacagccatgtagagaaaagtctttttcaaggggaccatttacaagattgattcagcaacctaagaggaaaacccagagccagcacacactaaggcaggagctgtgtgtgaggtctgtttccaaaggagagtgaccaggacagagagatggacggggtgggagggagaagactgtaaacgatatcataggtttctggtcaggtgtgactgtgctgctgctgagcctcatgaggtaaaggcaagctagaggccagcctagccatgtaatgtgtttcatggccgtaccccattggtaaataaaattaaaaattaacttaaatggcacttttcctggctgagctgaaactattattttctactactaactatatatctggaggaaatcaaaccagtgtgtggaagaggccgctgcattctgtgtggactgcaagacttgtcacagcaacacagaaaggaagcagcctccgtgtccatccgctaatgcacagatgaaggaagcatagttctacagatccacaggcagtagccatgaaaacgaaatcctgtagttggtgacagcatggataaaattagagattagtgtgttaattaagccagacacaaaatgaaatgttacatgatgcccctctaatgtgagagagaagatatggctcttatgagtgttaaggacagagtgatgtcttagggtttccatttctgtgaagaaactccatgaccaaagcaactcttataaatgaaaacatttaattggaactggcttacagattcagagattctgtccattatcaaaaaaggcaggaaacatggcagcgtccaggcaggcatagcatggtgcaggaggaaggtctatgtctttttccgaaggcaaacagaagactgacctccagtcagctaggaggagggtctcaaagtccacccccacagtgacacacttcctccaacatggccacacctactccaacaaggtcacacccactaagagtggcactccttggacgaagcatattcagacaccacagatgtcaccagagactggtaggcactaaggagcaagagggctactgtgctcttgtactcagggcgactgtggggagctacagtgcacacctacatttcaaagctagaaggagagttttgagtgtgtgtcaccttaaagaacctatcaatgagctgggtgtgatggggcatgcccagaggcaggtagatctctgtgagttcaaagacacccagaactgtgcgtaatgtgagactctgtctcaaaaccaaacaaactgataaatatttgaagagttagataattgagctgtaggaagagaaggagatgacagagtagaagaaaagggacagtaggacaagatcagtagcatccctacctccaagcactgtagaaagcactagtaggcttcaggatccttagcagtgtgaatacagtctaaccacctaatcactcatgacttcttccgtttgcatgaaaggaagagactgacctgagtgtagattcctttggccttggtatttgtgatttgtgattattcattagtcttggtgcatgagggcaacagaacactgaactgtcaaataccacttgtcagatcttgtaataattcaattatgcctttgaattcatttaagatatatatttcagtcttttgccttttcctatgtgtgtgcttctgagcattaaaccaggggcataagaattccaggaagaccaacagagtcaactaacttggtccctatgggctctcagagtctgaaccaccaaccaaagagcatacaggggctgggtctacgcctccccatttatgtgtagcagatgtgcagtttggtcttcatctgggtctggaacagctgggtcggggctgtcccaacagctgttgtgtgcgcgtggtttatgttctacccaccaggctgccttgcttggcctggtggagagaaaatgtctggccttgcagagacttgaaatgccagggtgggagttacccagggggtctctatttgctccgagaagggagggaggatggggaaaggatttcgggaggaggtaacctggaggggggcagtgaatggaatgtaaagtaaataagtacgaaaaataaaattaaattaaaacaaacaaacaaaaaatagggaacttaactcactagcaagttctctaccactgagctacatactcagccccagattgttttgtagaactgctacaagaagagacatcccctgagtgtaatgagcaaaggtaaataaatgctgaataatgccatataaatatttgtacttaaataagagaaagacgtttaaataccagagtacatgattgggtataccctcaaagccaaggtgagatgagactacttgttgcccttttgaagggttgtgtgtctgcttgttagcacttctgggcatgcatatctttacagattaaagtcacactttaatttttccctgtatttggagattgctcatctgttagtgactgtttcttttttttttttaagatttatttattatgtgtaagttacactgtagctatcttcagacactcgaggagatagagtcagattttgttaccgatggttgtgagccaccatgtggttgctgggatttgaactcaggacctttggaagagcagtcggtgctcttaaccactgagccatctctgcagcccgactgtttcttgataaccaactcaatttccttacttaaaggggccatttaagtttttctatgctttgcactgatcaaaatctaatccttgtatttgttatgtatacttggtggagtctagtttattcttgggatagtgaatataacctaaagttcctttttaggctagtaaagatcctccttttctggaaagctgtggggccagacgccttagagaggaaacggagaataatgctaagaaactctgctccagggatgtctcagcttgcgctcaaaagtaaaagcttaaattattagaatattgtgatttgtagacactgtggttaataaactttcatattctgtaacttttgttcataggaacaagaaaaagttttgatcacttgatatctgacacaaaggctcctaaaagacaagaaatggaatcagggattacaacacccccgaaaatgagaagagtggcagagactgactatgaaatgggtgagacacaaagctgataagtaatgaagatggctgcaaaccacgggaagcacagtgaagccacagttgcttccatccaggcctgagggctcaggctgcagtgcagagcatgtgccctggctcaagtgggcaggaaaagaaatcagccagttatgccagtggaatgtgcggaaggggcagaggcagcaggtccacagaggcctgggctatacttgaagagacaggagaatctccatgagttcaaggatagcctggtctacgtagacagttccagaccagtgtgtgtggcacaacactgcaagtcactagctgttatattgctgcatacataacaactctgtatgatagtaatattgataattaagatgcctgtttaaggaactgtaacattaagatgtaacattaaaatatgttgagtaaattatactttgtctactaatagaagtacttacattaatccatatcctacagcagaaacccaaaggattccctcctcgcagcagcacccacatttacggaaagtctcagtctctgaatcaaatgttcttttggatgaagaagttcttaccgacccaaagatccaagcgctgcttcttactgttctggtaaggggaacatcctcctcccgtccactcattcattcattcattcattcattcattcgtccattcattcatttttgaggcagggtttcactatgaaaccctagctgtcctatacctcactctgtagaccaggctggccttgaactcccagagatccacctgcctatacctctcatgtgctgggattaaaaatgtgtaccactactcctggcaggattttcctttttgagggtttttcgtccttaaatttttattctagtttgctcttagcaggcccttaaatatggcaaacatggaagaaagatattttcatgtcattaaaacaaagtttcaacataaattgtttacctgtttttgcatcttggcaggctacactggtaaaatatactacagatgaatttgatcaacggattctttatgaatatctagcagaggccagcgttgtgtttcccaaagtgtttcctgttgtgtaagtatctcctgttgttggttaatcgccctgtctttatgtcaggtgctctgtaaaggtgtaggaaatgtacttctcagtggtgtcttctgcctatagagtgggcagggtggctaccattgttatcctagagagggatgactatagttttccaggttgagactacgaagagctctggagaggagcacatgcttagcatgccagggcctgggtttgacccacagcacccaaaacaaaacacagagctgtggggctaaagggctgaaaagatagctcagcagttatgagcatgtatgattttgcagaggacttgagttccagtggcctcagaggacactaaacatacattcatatacccacacaagcaaacacacatgcatatacagaactgaaaagaaaaaataaatctttttctaaattcatactttaataatggctaaagttgctttgggcttatctattaccaaaaccatctttgctttgtttgttttgttttgtttgcttgtttttccttaatcgtattgatttattgtagtggcttagcttaatgagtattaatgtacagttttctcaagagcaaactgatagatcgctctatttaaaccagcctacatgactgtcttggggttggtctaaatcttttcctttaaacattgtgtttattttagtgcacacatacatgaatataatggcacacatggagaggtcagaggacaactttagggagtcggtgctcttctgccaccacagtggtcctggaggacagactaagctcatcagttgtggccgctgtcaccttgctccagtgagccattgtgctaacccttgcttctctttttattagaattctgtactgattcatagctgagggaaaatagaattgccctcttctctaggaggttggttttacttttaatacttgaacttcaaagcctttgctctagtttggtttctgttactctgataaaatactgtccaaaacagtttggggaagagaccagagagatagctcagcagttaaaagcatgcctgctcttctagaggattctggtacaactcccagcacccatacagtggctcacaactgtctgtaactctagttccaggagatttgacgccctctactggcctctgtggacacaggcacacatgtgttacatagacatgcatataggcaaaactgtcatacacataaaataaatttaaaaagaaaagaaaagcaacttggggaggaaaggttttatttcacctatgggttacaatccaatcattgagggatgctggggcagaaactaaagcagagactgtggactaatgctgcttactggctttgctaattgtggcttgatcagttatccttcccgcccccttgactggggctggcctaagtctcagtgggctgtaccctcctgcattagttaccagtcaagaaagtggtccacagaccattttgatggagacggctcttcagttaagagtccttcttcctggatatgtcagctgacaactatgacagaaaggtgttggcaaattaaagaaactttaaaaggacctttgtgtggaacacagaacaataaagagctccaaggtgaaggataggtctagggcagaagtctggctaaagcctttgctgtgtcagtgttaaatatcgagtcgtatccctttatacagtgcaaagctgttaggaaagctttagttggtagtgagtcgctgcactctggtgttatgctgagaatgagttggaagaaacagtgcagatgcgggaagattgttgtaaggatactattccaggagaccaatatctgcaatataaggagagacagacttgaaatcacatattggaggtaaggattacagaacttgatattggactgagtgttgactagggtagttccctaaagaggactgctagattcatggcttgcagggaagagtggatgacagtggtgacatacgtcccagaagaatcccatgcctatgaaaggggagtagaatgagtttggtattggacatcttggaacagctatgtcaaacaagtaaagatactatagttagactttggtttaataaacatgaatacatcactgcagtttattgagcatcccacatttgttgttgtctaattccattttaaagtttatgaatttcacatatttaggtgttgcctttttaaaatagatttttattaatagattgcaagtgatctggaaatggtttctttgtaagattccccatgccaccccttccaaattaattttactggcctaccttggcactggttagtattaaatgtcattgtaaccctggacgtacatagaaacagacagccgaggagctagagtgcagagtgtgctcacgggcagacagagccaagcctgttttggacaacgtttccttgtacagtttgacacggtcgtgtgatagctaccaggtatttgctttactgtatttccctaatgacttagaatgacaacacacacatgctcattcactggataatttagaaaagtgccagaaaggtaaaagtccctgtctccagttttgccatgttgttctaagggatatgtatattacactttccagtaaatccttttatttaatgttcctctgtttacttttgtttttccaggcacaatttgttggactctaagatcaataccctcttgtctttatgccaagatccaaatttgttaaatccaatccatggaattgtacagagtgtggtgtaccatgaggagtccccgccacagtaccagacatcttacctgcaaagtaaatacatataccaggagcgggtgcttgctgagccacagctgcggccctgttggagaatgcctggctgcagtgtagctgcgggataggctcctgcatggctctcgctcttcatttcatcttctgattctattagttacatgttcagtataactgcttgaccactgtaaaaatgctatctattctaaggacattttagtcgtctttgacactgattttaaaatgtcttattaaatatatgcagagtttgtctgtcagctatacagcttaatttttgttactatttaaagctgccttgcttgttgtaagagtagcatttgattttttgcaggttttggttttaatggcttatggcggtttgcaggacccttttcaaaggtaaacaatattttttttttctaatttttgataagccagagtctttaactgtactcatgagtctgttggagaatacacattaccttcaaaccaaagtaacatttcaaaataaaaattgttttagaaagattttttccaaagaggcaatacattcaatatattgatatattaattttattttaagttaggtttgaaatctcagaagggtatggaaaacctctataaaacgtattctgcctgtagacctctgtacatgtggcaataactcacacacctgtcttgtgactcgtgaagagtgtgatgcatggtaaatacacctcagggacacatggctacatctgactatcagatttgttcttggctgttcactttctttgactggcatttgttggtatactacatgaaatagtatttaatttttttgtagatggtctcttaaaataattgaagttccttgaaggcagggcttctgccccacacccttcacacacacacacacacacacacacacacacacacacacacacacacaccatgtcctagatgaagggctgttaaatcaagatgagttttttatacatttttctagttctaagagttggatttagtttattttgtactgtctgttgatatgcacaggttgtcattaaaaagatgggcctgaagtcacagaagtgtgtcatgcaggggttttaacaggcggatggtgggatgatgatgatgctctgcctgtctcatctgctttgggacgttggcgagatgtcactgccgaggactgcattgtctataaagtagtcaattcctctgtctctgcatggctttcagaaattgcaggttcatctggaagcttttaggggaagccaaatacaattcctagctgtatgttccacagttctctctaaatactattccagacgtccccctccccccttaatgatttagactacaaaggaagaaagaaaaacaatccaccaagccccagatatcattaaccttttcttggcttcagagggaacttttttttaatggagctaaaataatgtcctattttccattacagcaaacacaaatccctgactatgctgagctcattgttaaatttcttgatgccttgattgacacgtacttgcctggaattgatgaagaaaccagtgaggagtccctcctgacacccacatctccttaccctcctgcactgcagagccagcttagtatcactgccaaccttaacctctctaattccatgacctcacttgcaacttcccagcattccccaggtcagtaaatgtgatcgttatgtgattgtgagcaatgatacgataccaacattaggaactcccttgtggtcagagcatagcagattttggtcctttccctcctgaggttcacttcccatttctttcctatgtaactgaatgttgttactcttcagagctgagtgctttccatcaagttctatagcagagggggaaatgcatagtgatgttcagtatccacagagatttggaccaaaagcacaaactaagctatattacctacaagtgaacatcagctatactaacattaccctaaggccttatatgcctctggtgcagtataagcaccataaaacacacacatacaaagtctagtagtcaccccactttgttgctggtaacaacaggtcagccatccatcagccactgacaagcctgaaggtctgggattaggtaaacaaccagacaaaaagttctcataagaaaaaaataacatcttggagctgcggagataactaggttggtagagtgtttcccttgaaagcccaaggacctgtgtttagtcctcagaacctatattttgaaacggtatttgtggtggctcatggcttgtaatcgaggcacccaggaggttgaggcagaagaatacctgtgagtgaatagcctacttggagagttccagccagtgatgtgcaggtccacgtgtacacacacacacacagacgcgcacgcacgcgcatgcgaaaaggaaatcttaaaccccatcattataatctttactgtagagtcactgttggatcaagtgagaaaagtaggtcagtggaattttgggttttatttattatttatttacttatattctcagtccagggtctcactgtatagccctagctaccctagaactttctatgtagaccaggctggcccagactcatggattcacctactttgtctcccaatgccaagattaaaggcgtgtgtaatcatagacaatgaaatttagaactctatacactgagcagtcataggtaagagtccccgaggtactgagagagaaaagcaggaacggcacctgcccagctccaagttcagttgatgtctgtctgaatggcttcataagctctgcttgagcctagaggtgatgcccactgcctagtgagcacaagccctgctgtgtgaacagagggaacagtgtgcactggcccacggctgatgtttgggtcaggtgctcagttgaaaagattttcttctaagttagttaaaatgtttaaaaaggatttcttaagttacctaagttccattacctgaaaaggtcatgcggtagtctataaggacattcttagaagtggtgttttagcaggcgttttctttatacaaatcaaaccataactattctgggctgctcgagatgtataaatagaatctccataaatacttgtctcagtgtacatgaacatttccattcgtgtggtagtctggaagattctaaagaaataagccggtataatacccaatccatatcataaatttacagttacaagttctaaacagttacactcagttcttacgctttgttcctaatttacttaccagtcagggaatccttctatctcctagtcgtctgcccagctctcctcatgtagtcagtgggtttgttccatcacttgttctgtaggacaagtgtgaccccacacccgaattagcatcatctgatgttagaggcatagctcttgagtcttccctgcctgctgggtgaaaccccaagtatggagcccagtcaacctcctcgggagcatgggtgattcttctgcacactgggctttgagatgctgccataggctggctgtgctcctggcccatgacttatgttgactgtgactcacatctggaatcccaggcaagagaatcactttgaatttgagtccagatgggctacagaatgagactctattttaatttcaaacaaacaaaaaaactacatagaactatatgcacgtattacttcctgaaaagtagttaaataaagccatttccaaagtatgaagatctggtttagactcgactatagagtcgtcgctggctttttacattatttggggagcatttgaagcaccccaggaatagctccctggctgccctcagtctcatggcagtcctcagcctcagcccctaaagtcttgggattacaaggtgtgtgctaccatacccagctgaatacttagtttgtgagtgtataggcactttcacaaatttaaagacttttcttagccaggcagtggttgtacatgccgttaatcccagtacttgagagccagaggaaggtggatttgtctgagttccagggcagcctggtccacagagcagttctaggacatccagggctacacagagaaaccctgactcgggagggagaaaaagttttcttttactttttttttaaggtgcgtgaataatttacctgtgtctatgcttctgtacatgcatttcccgaggaggccggaaaagggcaccagatcctctgtagttgaagttacagatagttgggaactgccatgtggatgctggaaattgaacccaggtcctctgagagagcagccagtgacctaaacctctgagccatctctttaggccctactttcacacacttaaagatgaaagatgccttcaatacagggactgatagtttgtgcctgtgggtgttagaattgagttttaagtgaaagttatttcttacttatttagtagtatttaacacattctaagacagttctttttttttttaaagatttatttattattatatgtaagtacactgtagctgtcatcagacactccagaagagggagtcagatcttgtaatggatggttgtgagccaccatgtggttgctgggatttgaactttggaccttcggaagagcagtcaggtgctcttacccactgagccatctcaccagcctcctcccccttttttttcttaaacatagaatttatactgtattgctttgtagaaaataaccaaaattggagccagtgaaaggactaactggatagagatgtttgtatgcagttctgttgccaagtgtgaaccgacctcaagagttgtcttttgatagccacacttaaactcatgcatgaacacacacacacacagagtcatcttcagctacataatgagttccagacctgcctgggctatattatgagactgtctcaaaagaaaagaaaaaagtgcatatattcacaccagcaggtctgtttgaggccttacctgcctctgaggctctcagggtattaaggatggtgcagtgtactcaagtgacttattttaatgctttgtgatacttctcatggtgtgcttagaagagtcagtaacttctgcttatttacagattattcctaggaaattactggttagaatcccataaataaagccagcttccttctgcaaaccagggaaggtagcaagtgtctaacagctttcccctgcttttcgctcctctggacatcattcccttctttgtcctctcctcatccccctgaagctcctctgcacgctctaagccaacaatttgcatatagcctctcccactgtggccttatacagaacatcgcttcctctaaactcaagctaggcccacagcttgagacttccccagtccctagaagttgagttgaaggctcaggtacttgaaaacaggaacttgaaaagtggttgcttggtgacatttctggacatacagaactatataatcagtatggcctgtttggttcagttgccacttctacctaccctgtccttggttaaccaaacactatggggcatcagcagagaagcagaccgaggtctttgaggaagaggggattttagcttagaaaatagttgtttctcccacccccaaaaataaagctgaccccatcataaaaccaaacccatcctaaagctatcctaaaactaactgttctgactcatgctgtaaagaaagtgtccttaactgactgtcagcactaagcagacatgtagcagcacactgctgcctgattcagagaggacctgttggcgtcttgtaatctttgtattgctgcagagagatgaggaagcagtggggcagcaggagaagcccatccattcttggattcccgcagtgccgagtctgtgtgtccagtcatacaagggccgctaaatacacccttgccatccatctctccacagacgctttttccacagcataaacatcgccaaagctctcacacttggcttctttttaagacgttttgtgttctttacattagctccgctccagtaattttacaaattccagcattaaattgaagtcctatacatttgtcctaaaactccatttgcttattatttaatctcttttattcgaggtattagaaacatcttagtctatttttaaaagattattttatctgtgcaattcagaaaagttcttcatatagattgttacccaacttcttagcagccctgtaaggtaggcagtgtacccttaaccctcggactgcgcagaggcgagagtcagcatccagtggcttagtggagggcaagcagctgggggttccagcttcagcacccagatctttcactcttattatagaggcagcgagagttctccacccgattaggactcagactttgaggctaagaatctagctcagtggtggagtgctgtgtgtatacacaaggccctgggttcattctctgctgaaaaaagcagagcataagctttatccttcagcgtgcttgccagctcatacggagaaacgttttccaacaggtttgctctgctgtttgtagggaagtgagcaatgcagtttgaacccaagtgggctcctatataggtgatgacatctaagttctcccagactactcaggtatttccttacgtgtgttagtatcttatctgtgtgttattttccagacaggagctgcagctcagtagtaacacgataagcatgttctgatacctgccttcaaggaactcaggccatagtagggaagcaggctagcatctgagtgtgatttggcagttcttctcccagctcgtgcggtccacagtgttagccaacacctgctgcctcatcttcatccggagccagtgcagctcgctgaacactgggagtgcaggtggtctgctgccctgcgtgcacgtaactggcgcctgcccgagtgcagctgctttcagagcttataccagcaggcatgggacacagccgcttcagtgtgatgtccttttggtggcaccttctggagtctttgatctcatggatttttgcttttgtacccatggaaggaagaagggaaggaggactggtgacttagggatataagaacacagaatatgaagctttcagtggagacgtgcaaggtcaggcctttctctcaagtgtgaagtaaggcctgtgtcagggcaggagcctgctccacgtgagcagtctgcgcccttcagcagcacatggaggcatttctagattccaccgtagaggggagggaggtgtgagagaatgctgacaaattatcagaagaaaattatctgagtgctaggttcactccatttcctgggccctgctttcctaagactgtgggttggtgtaaatgtaattcatttttattgctttttaaaaaataactctcctagagcttgtttataatatctaccttttatttattctttgacaatttaatatacatatacagtgctctccaaaaatttatgcaattttttccttgattttttttgtttgtttgttttttgtttttgtttttcgagacagggtttctctgtgtagccctggctgtcctggaactcactttgtagactaggctggccttgatctcagaaatccgcctgcctctgcctcccaagtgctgggattaaagacgtgcgccaccactgcctggccttgatcattttagtaaaacttttttgttctaattaggcttaggaatcctctaacactgtatttatttgccttccgacttcctcattaggaaataagatatagtgaagagattcctattaaggaaataatctcggttgaggaaactcgggccttgaagtcacaggtcacgtgcacgtgtcaaagatgacagagtgacaacctgtgtcaacttccgagggaagctggccgggaagcatccctctttctaatgtacatggtgccaagtaagggctgcacgcatgagggctgtgaattagagggccccagctatcacattttaaagtggaaacatttgttgcaaaccaatagttattgaaagtgattagctagattttataaagaaaaaaaaacatgaatgataactggtccctttctgggtggtttcactccagctgaagagataagatgtttatgcaggttgttgttataggcaaaagctagtgactacaaggagggcatagaaggtggttctggtaggagacggatgggagaggacgggagtggaactgtgttgaatgaaggctgtgtcttccagagaacagtcatcccaggtgcagttctcctcagcctacaaactgccgcatggatctgtcccacttcctgtaacacaataaatatcttgtggcttaaaataatactttattgcccaaaaatggaaatgtttccattcccaaatgtaatgattctttttaagttcaagtagtccataaagttaaagttagacctgggataacgctgcgggccatgacatgagcagatggtttcctgcctccccacccccagttaagtgtggcctgcccttccctgctcctcctcctcgtgtgtctgtgaacagtttatatcagctaccagaatgcctcctgccaatggctatgctagacatgatgagtacagtatctatttgggaagcaaattcttttgaagggtagaaggcagaaaagtacacaggtcataagtttacagtataatgaactttttagaagcaaacccactcataatgaagatccagggccaggcacagtggcacatgaaggcaaaggcaggcagatctctgtgagttccaggacagcctagtctgcgtaccaagtttcaagacatgtagggctacacagagagaccctgtctcaatcaactaatgatcaaaatcctaccagggattgtgaaggaacatgctcgctgcctaaactgccttcctcacctccttcagactgttcttttctatctttatttgtaacctttatcaatatgctgagatttttctaaatttgcccttttgttctgatcacctttctgaaaataacgtttacattatttgtaaaatacattataggacccttgagtgaggttgagacaagtgtagtgactctccatgattgaaatgaagccaagatccgggcatggcctgcgtggtaggtcaccttttcaggagatgccctcattcctccagaacaggcattgaggccgattaaaggagaagtatatgcctttttctgaaatggcggctatgcagaaagatggatacatggctagaatctgccctctgctggacactcatggtacaactgggagaaggtactctcctaaggcttcctggatggccagcctttcaccctacctccctccagctgttcttgcaacttctcttttctcttacgctgtttcacaacaatgatagaaaattcagcttagcaaggtgtgaggcaaagtatgtggcaaggcctttgtaaatgtcctggcagtttactgtgaatgtggagtatgctgggactgctcaccattccaatctcacccacaagcaatgaatgagattgggtcctgagctagcgtcaggagaggaggagtaaccagctgttgtgtctctccaggactcgacaaggagaacgttgaactctcccccaccgctggccactgtaacagtggacggactcgccatggatccgcaagccaagtgcagaagcaaagaagtgctggcagtttcaaacgtaatagcattaagaagatcgtgtgaagcgttctttgtttcactcttcaaaccaacctaacatggcttctcactagtgacccctcaccttgcactgctgcacttcgtgtcttatgatcccatctggtcgccgtgtcgccagacggtcatctcttggagcattgcctaagtttaatgctgcttttctttgatgtttttccttctactttggcatgtgtctggttgagcacttgttctgaggacagcagagacagcaggcggtcaggaggcctgactgagagcgtggaccgtgggtgtggatgaaccctgcagtgctgccgctgccgcaagccacgggccgtacgcggaggacggccttctgtgttcccgtcttgcagagtgaaggggtcgtcttagttacacacttataagtttgggggagaaatcatattttaaccccagtgtatttaatcttctagctgtggacttttttttttttttttttttaccttatgtagttgaaggaaccacagaggccaagcctcaataaagccacaggccagggactgagggaggggcaaactaatattttgtaacgaattcttaagaaatactaacatttgagtcttagcaataagtacaggaaaataagcgtgacacacacatcttaacattgctgaattaaagctattggttctgaggccttatacatacttggtcatccaacctgggtaatttttttccagttgattatcttttaatttttacatatgaaggtgttctgttctttttttttttttttaagccaagactatactaagtatagaaactacacttgtgtttgcacttgctttctcctctttcctaagtgattctaagcagggtaatttgcagacagagtggtgagactcgtttccacaaggtaattttcatagctctttccattggctccgtagcaaaatggaatggtacgtgacatagggtaggtgatatttttattttgttaaataattttccaagaaacagaatatgctgtatattatcataaatttctttgataagatgtatttttaaaatcttttaatcttactcctctcctccaaataaaatcaggaatctctagcaaaacatttggattctatctgataggattgcatttagtcactgtgaagtctggccggcctgtgtggtatggacacaggacctctaggatcgctgctgtgcagagtggctggaccagtgggactcaggcccttccaagggatgcacacccagctgcttcatggtacccgcaggatgcaagacagtttgactttagtgagcacagtagtacatggatgctctcagttaagattgaactatatttatttttaaaaggtattatccctctacttccaggttcccttcatgtattaagacataatggctttgggagggaccaaaagaaacccagtagggtgtggacaggtcctgtagtgctggctcactagtggatttcagtaagttaaactccacagctaagtcaataaataatggtacatttaagtattctgactttaataatataacacgtttcacacttatccatacagtaacaatgtaatatgttaatgtaaataaaattgcttttgatattcagaaataacaatttaatttttttaatttgtttacagccctgggaaaagtaagaaccatttgccaaaataaaaggaaaccccttagtgttagtagtgattttaacatagaatcactggagactactggagacagatgcagcaaactgagctcttgtaaaggctgccttagaataactgtcagagcagataaccaaggctgggaggctgagatgccagctgagtttagccgcaggaggcccgtggcttagctgccaggcccggctccccaccgcagtactgctggggtgcaccccgctctggctcctgcaaccgtgggcagcacagactgaggctgctgtaactctagttgcttggcttttttaaagtcattgagttccattactggcccattactgttttgcttcccccatcaaaacaggacaacttataaatgtgcactcttcctgtagcgggtttccccatagttcttaaactgccccacttgagctcctatggaaagatcaaacggagccacttctgaccagtacatcccaggaaactggggcagcattccagttttatctaatagacagaacttccagcttttgaggaaagtctatctttgcaagcaactgaacctacagagcttaaagtatcactagctgcccctcccccaaaggagactctaattacaggagcagctgaaggtctgagtaatgtcccattttacacaatttggtgtgagttctgtgattcattttcaatttgtgtttccctgacttaaaagaaaacaaaaaaacactaacggctgtgtttgtgcgtttggctggtactcctcccctgggctcccatgccctcactgtggggacactgcactctgctggacagttactcttgcctgcatagtgctgaggccggagcctggacagtgcagactgccacagccccagtggggggactcgccccagcaaccacttccttggggggtttaaggttgcaagtttcctctgggagatctggcttttgttttccaggtttggaggagtttccccccccccctttttttttctacattactccccaagcatattgaagcatgtcttattcaatgttatgcaatggacttccacaaaaattcacttagtgtcagccacacaatttttttttaatgcggtatattcccctgtaaatagtttgtgtaaaatttgacagaaaagtctatttactacattgtaaatacatgtgatgatatattgtattattttgcttttttgtaaagcagttagttgctgtacatggataacaaacaaaaatttgattattcttgtgttcgtattgttaacttcttcctgcgactgcgttccatcatttaaagaaaatgctgtgtattgtgaactgaccttgtatatgattaacttactcccctccccaaccaggggttccctgcctacaaccttgttgataatgtaaccagcaggagaacctctgcctgacacacagactccactgctgtggggaaacatgttgacgtctgtcgcagagcatcggcctcacttgctcctgtcctgtgtatgccctccctcccacccacccccccacccacccccttttttttttaaagtaaaatgtaaattcaatctgctctaaactgtgaggagttatttatcacatgcagccaactgtttgtttctctcttcctccatgatctttagaacattagaccttgtccacctttcaggtgtgttgtggattgcctctgctcaccctaagggaaagatctttctccaaaagtaaagtcattgagttccaacaaacaggggtctgtccaacacagaggcaactgtcactctggcataggtgaacttactttccagagagtagcctgtcattacttccaggctccgctaatgtcgtgagcaacttccctgagtgctagtatatcactcaaggagagctactgcccacccctgtaggagacggaagcctcctggccctaggagtagaatacttctctctgagcaaatgacccaaagtgtgcagggctttttatgggcaggtggagacgagaggtggtattctaccttattctaccttgggagctctggaatattctggtaccaccccaggcaaaagcagacccacgggggtggggagggtctgagagagtatgtatatttaaagcatctctggcagttttgctggacacccaggcttgaagacccctgaaactgagtactcagtgctgcaaatagctacctgtccctggggcctaaagcaccttagtcaaaattacccatatctctgcaacaatccagattgcacctcacgattcctagacagcaggctctttgacttggccaaggtttgccagcacagatgctgtcctctgggtatcctcatccacttggccatagtgaacagtgtggccatgggatgctgaaaatcaactggtaacctttaaactgaagggacagcctctccctgcaccctgcagctgcttcctccaggtaaaatagggaggccacactgccatcttgcctgggtcctttctgcccagaagttaagagtgtggccagttgtaagtctttggggtgaggggtggggggagtcaacagctgtaatttccactgccggaattccaaacaaatacccctgcaagaggtttggcctctgccggctgtgaacttgtgactttattaggaaaatggacacgtaactgatcggcatgtgtcctaagatacagggtttttgttttgtttttgtttttgtttttttgaggggtgcacaccccacccccccccaaaatacttaaaagacctaccttagcacaaggccacacaaacaggcactctttccagcccagtgattctagatgcttcaatagaattagaggccagagagtttttcatagcagcttgttggtttgtggagcagaggcagaagggaatgcattgcttgatctctgcctctacccgagctccaccactgaccattcacactagggttctgcaggagacaaaatttctagccaagaaagctggagagaaggctaagcggttaagaacatgggctattcttgcaagggactcagattcgattcccagtgcccacccatatggaggctcacaaccatctatctatatctccagttccaggagatctgatctgatcaccgcgtctgcctttcctgggcactgcacttaacatatgtgcatacaaaacacccagacatataaaattaaaaatctttaagaatcatcaccaaaacactgccactgctgccaccatcatcccaagccatgctgagagcggctctactcctattcccctggctccctgcttaaactaggggctcagacaaggggaagctgtggtcgcaaatgctcggtaacacttaagaactaacactaggttctatgttgctggggaactacacaggcagaaaaacagcaaagaagccctcattgataataccagcccccatgcaaaatcccaaacaaaatagaacctgtgtaaaagatccattgcaaaactctagtcctagggctagggtgacatgttcagagacaccagccagtcgtcagaactgatggaaaatgagaatcaagaaaagccatgctctagtgcaggcatttcccagtcatttcccaacgatttcttcagcttgcacaaccatacatgtacagaaagagttcatttcacccacaaacagcggggagggaaggaaggaaggacaggcagagcagccttcctttaaatacttcaaaagtatttaaaactgggagagagagagagagagagagagagagagagagctagctcagtggggttcaattcccagcacccacatggcagcttacaactgcctaactccaggatccaacaccctcatacagacaggtttgcaggcaaaacacactaaatgtttgtttatttgtttgtttgtttgtttgagacgggatttttcctggctgtcctggaactcactctgtagaccaagctggctgtcctggaactcactctgtagaccaagctggcctcgaactcagaaatccacctgtctctgcctcccaagtgctgggattaaacacatgtgccaccactacctggctaaaaaaatttttaatttaaaacttgtagagtgggagcaaagctaggaatggtaatgtgggtgaatgtggtcaaaatgtatgatacactgagacaaatatgccataatgagacataattttgtagaatgaatatacactaaggaattttagaaactggtagtggctgggaatgtgctcaatggccgagcactcaccaaacacgtacacggtcctgggttcaatccctagcactgaaaaaggcccaaaaacttattgtcattggattagagcaggtccagtttatactgtagttcattttcaccctgctatgtacatcactagccagcagggggctctactcagccagttttgtcgaggcgcaagatcagccagcacaaaggcaggcattgtactgtcccctccaccctgaagaacttggactgctttgggtgttcagtacagtgtctacaaccacacacaactggtgagcacataaactgtgactatcagaattagaagtatatttttaaaaagaaataacaacagcaacaaaacaacaaggttttctctgtgacatcctgactgtcctgaaacttactagaccaggctggcctcaaactcacagacatctacctgcctctgcttctacccaagtcctgggattaaaggtatgaaccactacatccaggtctatctgcagtttgtatgctggggaggtgacacaatgggtcacattgcttgttctcttcaaacatgaggacctgagttggagtccacacatacaaagctgagagcatggttgtatatgcctgtaaccccagcattggggatcccagagggatccccaaagcttgccgggcagccagcctggcacaatatgcacatttccagttcattgagagtccttgactcaggatataaagatgaagcatgacggagagacatctgatgtcccctctgtggatgtcctctctggcctgggcatgcacaagcatgcacatgcaagtacacagatgcttgcacacttaagcttgtgcactaccacggaggagggacatgggggaggtgcagtttccattttgaggaaatgtgaatgattaggtgtgatccataggtaccagactgcacataggtgtgatccacaggtatcagactgcacataggtgcgatccatgggtgccaggctgcacataggtgcgatccatgggtgccaggctgcacataggtgcgatccatgggtgccaggctgcacataggtgcgatccatgggtgccaggctgcacataggtgcgatccatgggtgccaggctgcacataggtgcgatccatgggtgccaggctgcacataggtgcgatccatgggtgccaggctgcacataggtgcgatccatgggtgccaggctgcacataggtgcgatccatgggtgccaggctgcacataggtgcgatccatgggtgccaggatgcacataggtgtgatccatgggtaccaggctgcacataggtgcgatccataggtaccagactgtacagaacagcacagaggctcaagaccacatgggcagttacttctgctcccagtttctggggcttccacgtgcttcattcaccaagtcacacaggtcagaaggaactgtcctatgtccataatgaagtgcaccagaaacgcaggcacgaacatcaggagtcactccatagagaaacttgtgtcttctcagtgaaagacgtctgattgtacctgctttgactgtctcacagcctaaaatgtcctcaggttcccccaaacaaaatcctatgcaaacattaaaaggctcaccaaggctctttatcagcttcaaataaatagctcagaaaagtcagtttcaagaaaagacaggtaggaaaaaaaatgggcaaaggacatgaaagaataatccagaaatgtcacatgctgctgagtactgtgcgatgacgtcctgttagtaaacacgaagtgtatgctgcctggttttatgtcaacttgacacaagctagagttaactgagaggaaggaacctcaactgagaaaatgccccgagaagagcctgtgtagacatcttcttaattaatggttgatgcggggagggtggtgccatccctgggctggtggtcctgggccagccatgaggagcaaaccagtaagcagcactcttccatggcctctgcatcagctcctgtctccaagttcctaccctgcttgggtttctgtcctgacttccttcaatgatgaatgacaatgtggaagtgtgagccgaataaaccctttcctccccaacttgcttttggtcctggtgtttcctcagagcagtagtgaccctgactgagaccactcgcaagctgaaatggtggaataagtttttatttcttgaaaggaggtcttgtttactatgctgtccaagctggcctggagttcctgagctgggactccaagtgtgaactccagcaccgactcagatgccatctcatctgtcaaattaacagatgggttgactagttcctggtgatgagccccaccgtgctgcagtgggcttgcccatgccctgagtacccccagccttaaagatatctaccactgcctttgaaccactctaggaacccagagaaataagtaaggagactgtgacgttgattaatgttcgaatacctaaagacaactgcaatggtaggcttgctacattcatctaatacagtggttctcagccttcctgatgctgcagccctgtagtacagttcctcgtgttgtgctgacctctggccctaaaactattttcattgctactttataactgtagttttgccacattggcggctcacagtagcctataactggtctaggtgacctggcatcctcttctgacctcctcaggcatccgtaggcgtgtggcctactcttgcccaggcatacacacatttaagtaaagttaaatctaaccagaaaccaaggtggatggctccttaggaatgaatgagacgtccatgcaccacacacatgtatgtgcaaaagctcacacgagaacacacatgcacacacacacacacacacacacacacagagtgggtttttgctaatttagattccggggtgggagggggataggttcgtttctccttccttgggggaatatttacaggattaatataagaaggaaagcctgacaaacagttccggggaaaacagcagtcactgcagcccttccctgccctcccaggacttctgctctcagctcccaggctctctgggaagatacgtgtgcactcaagtacacagggccaggcgtccacttctgagcccaggctccgtcctccgttctttgggcttgcatccacctgttcacgctctctctctgagggcagtgtctgtgtccttggctctctttcctgaaactgtttttttctgaacttggaacattcccttcagccctgagaagaaagctggtgtcctggccagagcaaggggagtggatgggcagggccttaccactagccatgacaatgcttccgaaggaaggaccaggtgacctctgagccagcagaggagtgagcacagctgcctcaggggggcctcttggataatgtgacccagggatggggaagtggggacgacccatggagaggaacagcctgtgccagctgtgagtgtctactgatgagctctgcatggagggctgagtgtgacaaactgagaacaacctgtcttgaatagatgatgatgacgatggtgatgatgatgatgatgatggtgatggtgatgatgatggtgatgatgatggtgatggtgatgatgatggtaagtaacaggaagctggagagatggctcagtggtaaagaacactggctgctttttcagaggaccaaggtttgactcacagcacccacatggcagcttacaaccacttgtaactcctgtcccaagagattcgatgctctcttgtagcctccttgagtactgtatgtacatcatgcagagacatacattcaagccaaacacctgtacacataaaataaattaaaaagggggtggggagatggctcagcagttaagagcactgactgctcttccagaggtcctgagttcaatacccagcaaccacatggtggctcacaaccatctgtaatgggatccaaagccctcttctggtgtgtctgaaggcagtgacagtgtactcccctatataaaatgaataaatttttaaaaaagaataaattgaaaaattaaaagtaacaaaaagaatcctggaaggaatgtcagccaccattatcctgcttctgagagttggagaggctctgggtggacagccctcctcacccacgctctggcagacaaggaagaatgaagttttatgacaccggaccacactagtgtagcccaggccaaccagactccatcacccccagggcgcgctgcatgatgggaagtgtgtgagcgctccacactctgccgctgaggcgcattctgagacaggtgaaggaggagaataatttaccaccttctcccctccagagtgataattattcatgacttgagaaatagcatcagcagggggatcaggaagaacctgcgagttctgccccatttctgggcagcctggatggtgaggccggtggatggactacagaggaagaaatacagccctttagggctggagctggagcgcagttggtggagaaaaatacacgatgccctgggttgcatcgtcaatgctgaataaaccatgcgggatggctcaggcctgtaatcctagcccttgcaggggagggggttggaggcaggaggatcagaaggatcaagatcatcgtggcttcgtagcaagtcagagtccaacctgggctccatgagattccacctcagcaatacattccctgtagactagctctgagtctatactgatacacggataggccactatgcgccagacattgggcaagacacatggcacacaagctcacattgaatcctacgagatctctgcaaagcagagactacgtacgacccctgcttcagacaggaagactgacccagagcatcacgcagctgaaagagcatcagacctttgcccggctcagctgccaacatgacctaggaccaacagcgcacatacgtgctgttgggcttaccacaaactacccaaagcctggtggcttaagcaacgcaaatgtgatccctctcagttctggaagtcaggaggtcaaatgcatgcgttggcaggatcgcgcccctgcaaatggtctctctccgaccccttcagcttcctggactgtggctgaagggctcttgtcggttctacccatggtcaggaagccccctcctgtcattgagcttgtctctgacccttccttcattcgcgaggttgcattaggatccttgctctggagcacggaggagcagccaacaagaaggagacttcctataggaggcgccacctccacagaatctgcaatcgagcaaatgggccacaggagttggaagagacaaggcgcagagccagtcaccccaggcctggaggcaggagggaactaaggtatttccgagaggcaggaggcggtcctgatgccaaggcttgtaacctctgctctggagaaatggcagacagagttcagaattgtcccaggagtctgatacgggatagctttggaatttgtttccaatctgcctttggagagcttgggatgtggtcttgggctttgggcttggttcccctgtgatcgatctgaggcctcacgtagagcagttgaggtgagcaaggaaggtctcttgctttccaggttgtgttaccagggtgggctctgagagacatttttgcagctcccaccagggggcaggccccagctgcaacctgctttccatttatcattcattcattcattcattcattcattcatgtgttagtacctcacagagaggcatccacctaccaagaaaagaaaaacaaaaacaaaaacaaaaatcacttttcaggacggtacacctcccctctctagtggttgactccatgaacacggtagactctgatccttaaagccacaaggctttcttcccagggagattggacctctggaagagtaaagcatcaaatggggggacagcctggctcacccttggagtcctgactccaggggagactaagcagtcgccactcaggacatccatatttaagactcatcctgaagaccagaatggaattggaggctcagagagggaggccctgtgtggtccttgtgccaaactgggtacaagtcccctgcactccctgttcacaccactgaattgctctgggctcacacttgaccagagatcaaaaacatgaggacactaagacatagcataacccttagagtttcccaccatgcacaccctagcaaagttttagaaatgcatggggatttggaagaagggctcagaactgaggtgagacagactgaggaagaagcctgcgcatatctgggggctcaggcaaggtctgtgcttgagttgggcgcaaccactcctaagtggtctgttgtgctgaacaaggttgatgggtagacgggagactaggcttgacctctgctcagttgaacttcactaggagaaggcaaaattggttgggtcgtccacacccaggatggagtcccgagctctgagaggctgccagcaaaataagagaggacaggagctacgggttcccaagccaccggtgtttctgggccctgttgacactaagcctaatggaagacacttcctcccaccaccacttctagtcccctccacccgccaccattctaaggttccctgctcctccacactgcgcccatccctttccttcaacaagcggaacggcttctcaggggtctccgcttccagggaagcgaaagcagcaatcgaatactaggcaaggaacacctgcaacacccagcgctgacaaaggacgcggccggtgcacactggctagccgcggggtgcacgggccgcgctgagttccaaccaccccccaccccccaactccagctcaggtctaggaggggcggagcctggggaggctcgggtccttttgtctgcagccccgccccgccccgcccccacgcgggcccgcggcgcgcggcagacacgagcggctgacacgagcggccgccgcgggcggaggctgcgcgccgcagacccgggcggtgcgagcgcgatggcgaaggcggcagcgcggggcttgggctagctgccggcggcgcggatggcgggtggcgcgggctgggcgggcgcccccgcggctctgctgcgctccgtgcgccgcctgcgcgaagtgttcgaggtgtgcggccgcgaccccgacggctttctacgcgtggagcgcgtcgcggcgctcggcctgcgcttcgggcaaggagaggaggtaaggagctcgggcgcgtccccgggccggggaaaccgcagggaccccgcgcagtcacattccgggcctctctgtggatcacatggcatgcccgcggtggccggccggcccacctgccgttccccctggtctgtctccaatcccccttgatgtttggggaggggaagaggtgcccttaaaatccagtctctgagcaccccctcccacacacaaccaagtcacagggctatgtgtgcaccgtgccaggcctacgggtgacagggataagcagggatgttctgcagtctctggtccttagctgtacctacccaacctagaaaagaagggatgtctgctccgggccaccctggattctggtccagttcctggtgaccttccactcaagctaaatgggcaggcctagctggcagcagactgtgctggctgcagagggccaagcaggaccaagccgggagtggttagctgagcctctggtgttggtgttgggccgcatgggtggcagagagcagaattgtgggtactgtcagccaatgtgaaatggcagggtctgaactgccagtgtgtaacgaatacctatgcgttgggctagtgtcctcctgccatcctcacaggggctagtatccgtgtctgagagaagggcaggacaccgtgttaatgaaaccctgcagtgttgagcgtctctggattcaaaagacctggttgaactttgggtttctaaggtcatctgagaccctctgggccttggtttcaactgctgtactggatggcaagtgggaggtgatgacaacccctttctaggtggctgggcactcgccagaacctggaaatccccgagagcaggaggtggaggagggaggcaggtgtcaggtgtgaggactctggtccccagtctcagacagcttactactgcagttctccttaaagtcctttatctcctctctggtttgctcgggagcatctcctgctgctacctcagcctttcttctacagaggatgccagcgtcccacttcttggccaataccttctacctgagcaggctgagcagcccaggaggctacaggctgctggtgtggagaattctccttgctttgggcggaaacctgggatccagaatcagaaaacctcaggcatggggatggcccccactggggcctctggcagagggctggctggagccgtttaatagtattcctaggctggacaaacacctcccatccttagatcctcttccctccgcattccagacaccaaccagcttgtcactgggtcattgtggttctgcacaggaacctacctgggtttcccttctgcactgtagcctataaacctttgaaaacatcactcctctacccttgtcccttgccaccctttcacccctgtctgaagctccaaaccgtttccaagccaactaccaggagctagattcctacagaggctgctggtgaattgtcagactgttttcttagcattagtgggcctggacctgatcaatacacactcatggggtgggggctaccttttcagtggtcctacacactctccactcttaccaagtttctggctactagaacctctggagatgtgtttggaaaacttctgcctaggcagagctcctctaccctggggccggccagcggttcttgtgctttcctaaatccacgagtcgtagcaggagtttctgtgactacagcaggttgcaaatgtggacagtcaaaaatagatccgttatatttctgtcccccagggaggtgacactctggtcacctccttcacaagctgctcctgtgcttgtatgtagcgttctccatgaaatgagatcatactgcaccatgtattctaacctagtgcacacacacacaacacacacacacaaagagagagagagagagagagagagagagagaaaaatgatcctcatatttgaccttatataagctatcatcaaatgtactgtgcagacctgttccacgtgtctctatttggccccaaaatgtccacttctgatgttttttgttttgttttaagctgtgctgcgcacctgttccatgtgaccctggcacggccccctccagtatcctgacttgttaacgaggtcaggccgattgtctctcatttgtttcttaaatctaaaccggtggtgcttcccttgttcctactcagtttgatcttgtctt

SEQ ID NO: 88 - DNA, 265718 bp, Mus musculus
aagacaagatcaaactgagtaggaacaagggaagcaccaccggtttagatttaagaaacaaatgagagacaatcggcctgacctcgttaacaagtcaggatactggagggggccgtgccagggtcacatggaacaggtgcgcagcacagcttaaaacaaaacaaaaaacatcagaagtggacattttggggccaaatagagacacgtggaacaggtctgcacagtacatttgatgatagcttatataaggtcaaatatgaggatcatttttctctctctctctctctctctctctctctctttgtgtgtgtgtgttgtgtgtgtgtgcactaggttagaatacatggtgcagtatgatctcatttcatggagaacgctacatacaagcacaggagcagcttgtgaaggaggtgaccagagtgtcacctccctgggggacagaaatataacggatctatttttgactgtccacatttgcaacctgctgtagtcacagaaactcctgctacgactcgtggatttaggaaagcacaagaaccgctggccggccccagggtagaggagctctgcctaggcagaagttttccaaacacatctccagaggttctagtagccagaaacttggtaagagtggagagtgtgtaggaccactgaaaaggtagcccccaccccatgagtgtgtattgatcaggtccaggcccactaatgctaagaaaacagtctgacaattcaccagcagcctctgtaggaatctagctcctggtagttggcttggaaacggtttggagcttcagacaggggtgaaagggtggcaagggacaagggtagaggagtgatgttttcaaaggtttataggctacagtgcagaagggaaacccaggtaggttcctgtgcagaaccacaatgacccagtgacaagctggttggtgtctggaatgcggagggaagaggatctaaggatgggaggtgtttgtccagcctaggaatactattaaacggctccagccagccctctgccagaggccccagtgggggccatccccatgcctgaggttttctgattctggatcccaggtttccgcccaaagcaaggagaattctccacaccagcagcctgtagcctcctgggctgctcagcctgctcaggtagaaggtattggccaagaagtgggacgctggcatcctctgtagaagaaaggctgaggtagcagcaggagatgctcccgagcaaaccagagaggagataaaggactttaaggagaactgcagtagtaagctgtctgagactggggaccagagtcctcacacctgacacctgcctccctcctccacctcctgctctcggggatttccaggttctggcgagtgcccagccacctagaaaggggttgtcatcacctcccacttgccatccagtacagcagttgaaaccaaggcccagagggtctcagatgaccttagaaacccaaagttcaaccaggtcttttgaatccagagacgctcaacactgcagggtttcattaacacggtgtcctgcccttctctcagacacggatactagcccctgtgaggatggcaggaggacactagcccaacgcataggtattcgttacacactggcagttcagaccctgccatttcacattggctgacagtacccacaattctgctctctgccacccatgcggcccaacaccaacaccagaggctcagctaaccactcccggcttggtcctgcttggccctctgcagccagcacagtctgctgccagctaggcctgcccatttagcttgagtggaaggtcaccaggaactggaccagaatccagggtggcccggagcagacatcccttcttttctaggttgggtaggtacagctaaggaccagagactgcagaacatccctgcttatccctgtcacccgtaggcctggcacggtgcacacatagccctgtgacttggttgtgtgtgggagggggtgctcagagactggattttaagggcacctcttcccctccccaaacatcaagggggattggagacagaccagggggaacggcaggtgggccggccggccaccgcgggcatgccatgtgatccacagagaggcccggaatgtgactgcgcggggtccctgcggtttccccggcccggggacgcgcccgagctccttacctcctctccttgcccgaagcgcaggccgagcgccgcgacgcgctccacgcgtagaaagccgtcggggtcgcggccgcacacctcgaacacttcgcgcaggcggcgcacggagcgcagcagagccgcgggggcgcccgcccagcccgcgccacccgccatccgcgccgccggcagctagcccaagccccgcgctgccgccttcgccatcgcgctcgcaccgcccgggtctgcggcgcgcagcctccgcccgcggcggccgctcgtgtcagccgctcgtgtctgccgcgcgccgcgggcccgcgtgggggcggggcggggcggggctgcagacaaaaggacccgagcctccccaggctccgcccctcctagacctgagctggagttggggggtggggggtggttggaactcagcgcggcccgtgcaccccgcggctagccagtgtgcaccggccgcgtcctttgtcagcgctgggtgttgcaggtgttccttgcctagtattcgattgctgctttcgcttccctggaagcggagacccctgagaagccgttccgcttgttgaaggaaagggatgggcgcagtgtggaggagcagggaaccttagaatggtggcgggtggaggggactagaagtggtggtgggaggaagtgtcttccattaggcttagtgtcaacagggcccagaaacaccggtggcttgggaacccgtagctcctgtcctctcttattttgctggcagcctctcagagctcgggactccatcctgggtgtggacgacccaaccaattttgccttctcctagtgaagttcaactgagcagaggtcaagcctagtctcccgtctacccatcaaccttgttcagcacaacagaccacttaggagtggttgcgcccaactcaagcacagaccttgcctgagcccccagatatgcgcaggcttcttcctcagtctgtctcacctcagttctgagcccttcttccaaatccccatgcatttctaaaactttgctagggtgtgcatggtgggaaactctaagggttatgctatgtcttagtgtcctcatgtttttgatctctggtcaagtgtgagcccagagcaattcagtggtgtgaacagggagtgcaggggacttgtacccagtttggcacaaggaccacacagggcctccctctctgagcctccaattccattctggtcttcaggatgagtcttaaatatggatgtcctgagtggcgactgcttagtctcccctggagtcaggactccaagggtgagccaggctgtccccccatttgatgctttactcttccagaggtccaatctccctgggaagaaagccttgtggctttaaggatcagagtctaccgtgttcatggagtcaaccactagagaggggaggtgtaccgtcctgaaaagtgatttttgtttttgtttttgtttttcttttcttggtaggtggatgcctctctgtgaggtactaacacatgaatgaatgaatgaatgaatgaatgaatgataaatggaaagcaggttgcagctggggcctgccccctggtgggagctgcaaaaatgtctctcagagcccaccctggtaacacaacctggaaagcaagagaccttccttgctcacctcaactgctctacgtgaggcctcagatcgatcacaggggaaccaagcccaaagcccaagaccacatcccaagctctccaaaggcagattggaaacaaattccaaagctatcccgtatcagactcctgggacaattctgaactctgtctgccatttctccagagcagaggttacaagccttggcatcaggaccgcctcctgcctctcggaaataccttagttccctcctgcctccaggcctggggtgactggctctgcgccttgtctcttccaactcctgtggcccatttgctcgattgcagattctgtggaggtggcgcctcctataggaagtctccttcttgttggctgctcctccgtgctccagagcaaggatcctaatgcaacctcgcgaatgaaggaagggtcagagacaagctcaatgacaggagggggcttcctgaccatgggtagaaccgacaagagcccttcagccacagtccaggaagctgaaggggtcggagagagaccatttgcaggggcgcgatcctgccaacgcatgcatttgacctcctgacttccagaactgagagggatcacatttgcgttgcttaagccaccaggctttgggtagtttgtggtaagcccaacagcacgtatgtgcgctgttggtcctaggtcatgttggcagctgagccgggcaaaggtctgatgctctttcagctgcgtgatgctctgggtcagtcttcctgtctgaagcaggggtcgtacgtagtctctgctttgcagagatctcgtaggattcaatgtgagcttgtgtgccatgtgtcttgcccaatgtctggcgcatagtggcctatccgtgtatcagtatagactcagagctagtctacagggaatgtattgctgaggtggaatctcatggagcccaggttggactctgacttgctacgaagccacgatgatcttgatccttctgatcctcctgcctccaaccccctcccctgcaagggctaggattacaggcctgagccatcccgcatggtttattcagcattgacgatgcaacccagggcatcgtgtatttttctccaccaactgcgctccagctccagccctaaagggctgtatttcttcctctgtagtccatccaccggcctcaccatccaggctgcccagaaatggggcagaactcgcaggttcttcctgatccccctgctgatgctatttctcaagtcatgaataattatcactctggaggggagaaggtggtaaattattctcctccttcacctgtctcagaatgcgcctcagcggcagagtgtggagcgctcacacacttcccatcatgcagcgcgccctgggggtgatggagtctggttggcctgggctacactagtgtggtccggtgtcataaaacttcattcttccttgtctgccagagcgtgggtgaggagggctgtccacccagagcctctccaactctcagaagcaggataatggtggctgacattccttccaggattctttttgttacttttaatttttcaatttattcttttttaaaaatttattcattttatataggggagtacactgtcactgccttcagacacaccagaagagggctttggatcccattacagatggttgtgagccaccatgtggttgctgggtattgaactcaggacctctggaagagcagtcagtgctcttaactgctgagccatctccccaccccctttttaatttattttatgtgtacaggtgtttggcttgaatgtatgtctctgcatgatgtacatacagtactcaaggaggctacaagagagcatcgaatctcttgggacaggagttacaagtggttgtaagctgccatgtgggtgctgtgagtcaaaccttggtcctctgaaaaagcagccagtgttctttaccactgagccatctctccagcttcctgttacttaccatcatcatcaccatcaccatcatcatcaccatcatcatcaccatcaccatcatcatcatcatcatcaccatcgtcatcatcatctattcaagacaggttgttctcagtttgtcacactcagccctccatgcagagctcatcagtagacactcacagctggcacaggctgttcctctccatgggtcgtccccacttccccatccctgggtcacattatccaagaggcccccctgaggcagctgtgctcactcctctgctggctcagaggtcacctggtccttccttcggaagcattgtcatggctagtggtaaggccctgcccatccactccccttgctctggccaggacaccagctttcttctcagggctgaagggaatgttccaagttcagaaaaaaacagtttcaggaaagagagccaaggacacagacactgccctcagagagagagcgtgaacaggtggatgcaagcccaaagaacggaggacggagcctgggctcagaagtggacgcctggccctgtgtacttgagtgcacacgtatcttcccagagagcctgggagctgagagcagaagtcctgggagggcagggaagggctgcagtgactgctgttttccccggaactgtttgtcaggctttccttcttatattaatcctgtaaatattcccccaaggaaggagaaacgaacctatccccctcccaccccggaatctaaattagcaaaaacccactctgtgtgtgtgtgtgtgtgtgtgtgtgtgcatgtgtgttctcgtgtgagcttttgcacatacatgtgtgtggtgcatggacgtctcattcattcctaaggagccatccaccttggtttctggttagatttaactttacttaaatgtgtgtatgcctgggcaagagtaggccacacgcctacggatgcctgaggaggtcagaagaggatgccaggtcacctagaccagttataggctactgtgagccgccaatgtggcaaaactacagttataaagtagcaatgaaaatagttttagggccagaggtcagcacaacacgaggaactgtactacagggctgcagcatcaggaaggctgagaaccactgtattagatgaatgtagcaagcctaccattgcagttgtctttaggtattcgaacattaatcaacgtcacagtctccttacttatttctctgggttcctagagtggttcaaaggcagtggtagatatctttaaggctgggggtactcagggcatgggcaagcccactgcagcacggtggggctcatcaccaggaactagtcaacccatctgttaatttgacagatgagatggcatctgagtcggtgctggagttcacacttggagtcccagctcaggaactccaggccagcttggacagcatagtaaacaagacctcctttcaagaaataaaaacttattccaccatttcagcttgcgagtggtctcagtcagggtcactactgctctgaggaaacaccaggaccaaaagcaagttggggaggaaagggtttattcggctcacacttccacattgtcattcatcattgaaggaagtcaggacagaaacccaagcagggtaggaacttggagacaggagctgatgcagaggccatggaagagtgctgcttactggtttgctcctcatggctggcccaggaccaccagcccagggatggcaccaccctccccgcatcaaccattaattaagaagatgtctacacaggctcttctcggggcattttctcagttgaggttccttcctctcagttaactctagcttgtgtcaagttgacataaaaccaggcagcatacacttcgtgtttactaacaggacgtcatcgcacagtactcagcagcatgtgacatttctggattattctttcatgtcctttgcccattttttttcctacctgtcttttcttgaaactgacttttctgagctatttatttgaagctgataaagagccttggtgagccttttaatgtttgcataggattttgtttgggggaacctgaggacattttaggctgtgagacagtcaaagcaggtacaatcagacgtctttcactgagaagacacaagtttctctatggagtgactcctgatgttcgtgcctgcgtttctggtgcacttcattatggacataggacagttccttctgacctgtgtgacttggtgaatgaagcacgtggaagccccagaaactgggagcagaagtaactgcccatgtggtcttgagcctctgtgctgttctgtacagtctggtacctatggatcgcacctatgtgcagcctggtacccatggatcacacctatgtgcatcctggcacccatggatcgcacctatgtgcagcctggcacccatggatcgcacctatgtgcagcctggcacccatggatcgcacctatgtgcagcctggcacccatggatcgcacctatgtgcagcctggcacccatggatcgcacctatgtgcagcctggcacccatggatcgcacctatgtgcagcctggcacccatggatcgcacctatgtgcagcctggcacccatggatcgcacctatgtgcagcctggcacccatggatcgcacctatgtgcagcctggcacccatggatcgcacctatgtgcagtctgatacctgtggatcacacctatgtgcagtctggtacctatggatcacacctaatcattcacatttcctcaaaatggaaactgcacctcccccatgtccctcctccgtggtagtgcacaagcttaagtgtgcaagcatctgtgtacttgcatgtgcatgcttgtgcatgcccaggccagagaggacatccacagaggggacatcagatgtctctccgtcatgcttcatctttatatcctgagtcaaggactctcaatgaactggaaatgtgcatattgtgccaggctggctgcccggcaagctttggggatccctctgggatccccaatgctggggttacaggcatatacaaccatgctctcagctttgtatgtgtggactccaactcaggtcctcatgtttgaagagaacaagcaatgtgacccattgtgtcacctccccagcatacaaactgcagatagacctggatgtagtggttcatacctttaatcccaggacttgggtagaagcagaggcaggtagatgtctgtgagtttgaggccagcctggtctagtaagtttcaggacagtcaggatgtcacagagaaaaccttgttgttttgttgctgttgttatttctttttaaaaatatacttctaattctgatagtcacagtttatgtgctcaccagttgtgtgtggttgtagacactgtactgaacacccaaagcagtccaagttcttcagggtggaggggacagtacaatgcctgcctttgtgctggctgatcttgcgcctcgacaaaactggctgagtagagccccctgctggctagtgatgtacatagcagggtgaaaatgaactacagtataaactggacctgctctaatccaatgacaataagtttttgggcctttttcagtgctagggattgaacccaggaccgtgtacgtgtttggtgagtgctcggccattgagcacattcccagccactaccagtttctaaaattccttagtgtatattcattctacaaaattatgtctcattatggcatatttgtctcagtgtatcatacattttgaccacattcacccacattaccattcctagctttgctcccactctacaagttttaaattaaaaatttttttagccaggtagtggtggcacatgtgtttaatcccagcacttgggaggcagagacaggtggatttctgagttcgaggccagcttggtctacagagtgagttccaggacagccagcttggtctacagagtgagttccaggacagccaggaaaaatcccgtctcaaacaaacaaacaaacaaataaacaaacatttagtgtgttttgcctgcaaacctgtctgtatgagggtgttggatcctggagttaggcagttgtaagctgccatgtgggtgctgggaattgaaccccactgagctagctctctctctctctctctctctctctctctctcccagttttaaatacttttgaagtatttaaaggaaggctgctctgcctgtccttccttccttccctccccgctgtttgtgggtgaaatgaactctttctgtacatgtatggttgtgcaagctgaagaaatcgttgggaaatgactgggaaatgcctgcactagagcatggcttttcttgattctcattttccatcagttctgacgactggctggtgtctctgaacatgtcaccctagccctaggactagagttttgcaatggatcttttacacaggttctattttgtttgggattttgcatgggggctggtattatcaatgagggcttctttgctgtttttctgcctgtgtagttccccagcaacatagaacctagtgttagttcttaagtgttaccgagcatttgcgaccacagcttccccttgtctgagcccctagtttaagcagggagccaggggaataggagtagagccgctctcagcatggcttgggatgatggtggcagcagtggcagtgttttggtgatgattcttaaagatttttaattttatatgtctgggtgttttgtatgcacatatgttaagtgcagtgcccaggaaaggcagacgcggtgatcagatcagatctcctggaactggagatatagatagatggttgtgagcctccatatgggtgggcactgggaatcgaatctgagtcccttgcaagaatagcccatgttcttaaccgcttagccttctctccagctttcttggctagaaattttgtctcctgcagaaccctagtgtgaatggtcagtggtggagctcgggtagaggcagagatcaagcaatgcattcccttctgcctctgctccacaaaccaacaagctgctatgaaaaactctctggcctctaattctattgaagcatctagaatcactgggctggaaagagtgcctgtttgtgtggccttgtgctaaggtaggtcttttaagtattttgggggggggtggggtgtgcacccctcaaaaaaacaaaaacaaaaacaaaacaaaaaccctgtatcttaggacacatgccgatcagttacgtgtccattttcctaataaagtcacaagttcacagccggcagaggccaaacctcttgcaggggtatttgtttggaattccggcagtggaaattacagctgttgactccccccacccctcaccccaaagacttacaactggccacactcttaacttctgggcagaaaggacccaggcaagatggcagtgtggcctccctattttacctggaggaagcagctgcagggtgcagggagaggctgtcccttcagtttaaaggttaccagttgattttcagcatcccatggccacactgttcactatggccaagtggatgaggatacccagaggacagcatctgtgctggcaaaccttggccaagtcaaagagcctgctgtctaggaatcgtgaggtgcaatctggattgttgcagagatatgggtaattttgactaaggtgctttaggccccagggacaggtagctatttgcagcactgagtactcagtttcaggggtcttcaagcctgggtgtccagcaaaactgccagagatgctttaaatatacatactctctcagaccctccccacccccgtgggtctgcttttgcctggggtggtaccagaatattccagagctcccaaggtagaataaggtagaataccacctctcgtctccacctgcccataaaaagccctgcacactttgggtcatttgctcagagagaagtattctactcctagggccaggaggcttccgtctcctacaggggtgggcagtagctctccttgagtgatatactagcactcagggaagttgctcacgacattagcggagcctggaagtaatgacaggctactctctggaaagtaagttcacctatgccagagtgacagttgcctctgtgttggacagacccctgtttgttggaactcaatgactttacttttggagaaagatctttcccttagggtgagcagaggcaatccacaacacacctgaaaggtggacaaggtctaatgttctaaagatcatggaggaagagagaaacaaacagttggctgcatgtgataaataactcctcacagtttagagcagattgaatttacattttactttaaaaaaaaaagggggtgggtgggggggtgggtgggagggagggcatacacaggacaggagcaagtgaggccgatgctctgcgacagacgtcaacatgtttccccacagcagtggagtctgtgtgtcaggcagaggttctcctgctggttacattatcaacaaggttgtaggcagggaacccctggttggggaggggagtaagttaatcatatacaaggtcagttcacaatacacagcattttctttaaatgatggaacgcagtcgcaggaagaagttaacaatacgaacacaagaataatcaaatttttgtttgttatccatgtacagcaactaactgctttacaaaaaagcaaaataatacaatatatcatcacatgtatttacaatgtagtaaatagacttttctgtcaaattttacacaaactatttacaggggaatataccgcattaaaaaaaaattgtgtggctgacactaagtgaatttttgtggaagtccattgcataacattgaataagacatgcttcaatatgcttggggagtaatgtagaaaaaaaaagggggggggggaaactcctccaaacctggaaaacaaaagccagatctcccagaggaaacttgcaaccttaaaccccccaaggaagtggttgctggggcgagtccccccactggggctgtggcagtctgcactgtccaggctccggcctcagcactatgcaggcaagagtaactgtccagcagagtgcagtgtccccacagtgagggcatgggagcccaggggaggagtaccagccaaacgcacaaacacagccgttagtgtttttttgttttcttttaagtcagggaaacacaaattgaaaatgaatcacagaactcacaccaaattgtgtaaaatgggacattactcagaccttcagctgctcctgtaattagagtctcctttgggggaggggcagctagtgatactttaagctctgtaggttcagttgcttgcaaagatagactttcctcaaaagctggaagttctgtctattagataaaactggaatgctgccccagtttcctgggatgtactggtcagaagtggctccgtttgatctttccataggagctcaagtggggcagtttaagaactatggggaaacccgctacaggaagagtgcacatttataagttgtcctgttttgatgggggaagcaaaacagtaatgggccagtaatggaactcaatgactttaaaaaagccaagcaactagagttacagcagcctcagtctgtgctgcccacggttgcaggagccagagcggggtgcaccccagcagtactgcggtggggagccgggcctggcagctaagccacgggcctcctgcggctaaactcagctggcatctcagcctcccagccttggttatctgctctgacagttattctaaggcagcctttacaagagctcagtttgctgcatctgtctccagtagtctccagtgattctatgttaaaatcactactaacactaaggggtttccttttattttggcaaatggttcttacttttcccagggctgtaaacaaattaaaaaaattaaattgttatttctgaatatcaaaagcaattttatttacattaacatattacattgttactgtatggataagtgtgaaacgtgttatattattaaagtcagaatacttaaatgtaccattatttattgacttagctgtggagtttaacttactgaaatccactagtgagccagcactacaggacctgtccacaccctactgggtttcttttggtccctcccaaagccattatgtcttaatacatgaagggaacctggaagtagagggataataccttttaaaaataaatatagttcaatcttaactgagagcatccatgtactactgtgctcactaaagtcaaactgtcttgcatcctgcgggtaccatgaagcagctgggtgtgcatcccttggaagggcctgagtcccactggtccagccactctgcacagcagcgatcctagaggtcctgtgtccataccacacaggccggccagacttcacagtgactaaatgcaatcctatcagatagaatccaaatgttttgctagagattcctgattttatttggaggagaggagtaagattaaaagattttaaaaatacatcttatcaaagaaatttatgataatatacagcatattctgtttcttggaaaattatttaacaaaataaaaatatcacctaccctatgtcacgtaccattccattttgctacggagccaatggaaagagctatgaaaattaccttgtggaaacgagtctcaccactctgtctgcaaattaccctgcttagaatcacttaggaaagaggagaaagcaagtgcaaacacaagtgtagtttctatacttagtatagtcttggcttaaaaaaaaaaaaaaagaacagaacaccttcatatgtaaaaattaaaagataatcaactggaaaaaaattacccaggttggatgaccaagtatgtataaggcctcagaaccaatagctttaattcagcaatgttaagatgtgtgtgtcacgcttattttcctgtacttattgctaagactcaaatgttagtatttcttaagaattcgttacaaaatattagtttgcccctccctcagtccctggcctgtggctttattgaggcttggcctctgtggttccttcaactacataaggtaaaaaaaaaaaaaaaaaaaagtccacagctagaagattaaatacactggggttaaaatatgatttctcccccaaacttataagtgtgtaactaagacgaccccttcactctgcaagacgggaacacagaaggccgtcctccgcgtacggcccgtggcttgcggcagcggcagcactgcagggttcatccacacccacggtccacgctctcagtcaggcctcctgaccgcctgctgtctctgctgtcctcagaacaagtgctcaaccagacacatgccaaagtagaaggaaaaacatcaaagaaaagcagcattaaacttaggcaatgctccaagagatgaccgtctggcgacacggcgaccagatgggatcataagacacgaagtgcagcagtgcaaggtgaggggtcactagtgagaagccatgttaggttggtttgaagagtgaaacaaagaacgcttcacacgatcttcttaatgctattacgtttgaaactgccagcacttctttgcttctgcacttggcttgcggatccatggcgagtccgtccactgttacagtggccagcggtgggggagagttcaacgttctccttgtcgagtcctggagagacacaacagctggttactcctcctctcctgacgctagctcaggacccaatctcattcattgcttgtgggtgagattggaatggtgagcagtcccagcatactccacattcacagtaaactgccaggacatttacaaaggccttgccacatactttgcctcacaccttgctaagctgaattttctatcattgttgtgaaacagcgtaagagaaaagagaagttgcaagaacagctggagggaggtagggtgaaaggctggccatccaggaagccttaggagagtaccttctcccagttgtaccatgagtgtccagcagagggcagattctagccatgtatccatctttctgcatagccgccatttcagaaaaaggcatatacttctcctttaatcggcctcaatgcctgttctggaggaatgagggcatctcctgaaaaggtgacctaccacgcaggccatgcccggatcttggcttcatttcaatcatggagagtcactacacttgtctcaacctcactcaagggtcctataatgtattttacaaataatgtaaacgttattttcagaaaggtgatcagaacaaaagggcaaatttagaaaaatctcagcatattgataaaggttacaaataaagatagaaaagaacagtctgaaggaggtgaggaaggcagtttaggcagcgagcatgttccttcacaatccctggtaggattttgatcattagttgattgagacagggtctctctgtgtagccctacatgtcttgaaacttggtacgcagactaggctgtcctggaactcacagagatctgcctgcctttgccttcatgtgccactgtgcctggccctggatcttcattatgagtgggtttgcttctaaaaagttcattatactgtaaacttatgacctgtgtacttttctgccttctacccttcaaaagaatttgcttcccaaatagatactgtactcatcatgtctagcatagccattggcaggaggcattctggtagctgatataaactgttcacagacacacgaggaggaggagcagggaagggcaggccacacttaactgggggtggggaggcaggaaaccatctgctcatgtcatggcccgcagcgttatcccaggtctaactttaactttatggactacttgaacttaaaaagaatcattacatttgggaatggaaacatttccatttttgggcaataaagtattattttaagccacaagatatttattgtgttacaggaagtgggacagatccatgcggcagtttgtaggctgaggagaactgcacctgggatgactgttctctggaagacacagccttcattcaacacagttccactcccgtcctctcccatccgtctcctaccagaaccaccttctatgccctccttgtagtcactagcttttgcctataacaacaacctgcataaacatcttatctcttcagctggagtgaaaccacccagaaagggaccagttatcattcatgtttttttttctttataaaatctagctaatcactttcaataactattggtttgcaacaaatgtttccactttaaaatgtgatagctggggccctctaattcacagccctcatgcgtgcagcccttacttggcaccatgtacattagaaagagggatgcttcccggccagcttccctcggaagttgacacaggttgtcactctgtcatctttgacacgtgcacgtgacctgtgacttcaaggcccgagtttcctcaaccgagattatttccttaataggaatctcttcactatatcttatttcctaatgaggaagtcggaaggcaaataaatacagtgttagaggattcctaagcctaattagaacaaaaaagttttactaaaatgatcaaggccaggcagtggtggcgcacgtctttaatcccagcacttgggaggcagaggcaggcggatttctgagatcaaggccagcctagtctacaaagtgagttccaggacagccagggctacacagagaaaccctgtctcgaaaaacaaaaacaaaaaacaaacaaacaaaaaaaatcaaggaaaaaattgcataaatttttggagagcactgtatatgtatattaaattgtcaaagaataaataaaaggtagatattataaacaagctctaggagagttattttttaaaaagcaataaaaatgaattacatttacaccaacccacagtcttaggaaagcagggcccaggaaatggagtgaacctagcactcagataattttcttctgataatttgtcagcattctctcacacctccctcccctctacggtggaatctagaaatgcctccatgtgctgctgaagggcgcagactgctcacgtggagcaggctcctgccctgacacaggccttacttcacacttgagagaaaggcctgaccttgcacgtctccactgaaagcttcatattctgtgttcttatatccctaagtcaccagtcctccttcccttcttccttccatgggtacaaaagcaaaaatccatgagatcaaagactccagaaggtgccaccaaaaggacatcacactgaagcggctgtgtcccatgcctgctggtataagctctgaaagcagctgcactcgggcaggcgccagttacgtgcacgcagggcagcagaccacctgcactcccagtgttcagcgagctgcactggctccggatgaagatgaggcagcaggtgttggctaacactgtggaccgcacgagctgggagaagaactgccaaatcacactcagatgctagcctgcttccctactatggcctgagttccttgaaggcaggtatcagaacatgcttatcgtgttactactgagctgcagctcctgtctggaaaataacacacagataagatactaacacacgtaaggaaatacctgagtagtctgggagaacttagatgtcatcacctatataggagcccacttgggttcaaactgcattgctcacttccctacaaacagcagagcaaacctgttggaaaacgtttctccgtatgagctggcaagcacgctgaaggataaagcttatgctctgcttttttcagcagagaatgaacccagggccttgtgtatacacacagcactccaccactgagctagattcttagcctcaaagtctgagtcctaatcgggtggagaactctcgctgcctctataataagagtgaaagatctgggtgctgaagctggaacccccagctgcttgccctccactaagccactggatgctgactctcgcctctgcgcagtccgagggttaagggtacactgcctaccttacagggctgctaagaagttgggtaacaatctatatgaagaacttttctgaattgcacagataaaataatcttttaaaaatagactaagatgtttctaatacctcgaataaaagagattaaataataagcaaatggagttttaggacaaatgtataggacttcaatttaatgctggaatttgtaaaattactggagcggagctaatgtaaagaacacaaaacgtcttaaaaagaagccaagtgtgagagctttggcgatgtttatgctgtggaaaaagcgtctgtggagagatggatggcaagggtgtatttagcggcccttgtatgactggacacacagactcggcactgcgggaatccaagaatggatgggcttctcctgctgccccactgcttcctcatctctctgcagcaatacaaagattacaagacgccaacaggtcctctctgaatcaggcagcagtgtgctgctacatgtctgcttagtgctgacagtcagttaaggacactttctttacagcatgagtcagaacagttagttttaggatagctttaggatgggtttggttttatgatggggtcagctttatttttgggggtgggagaaacaactattttctaagctaaaatcccctcttcctcaaagacctcggtctgcttctctgctgatgccccatagtgtttggttaaccaaggacagggtaggtagaagtggcaactgaaccaaacaggccatactgattatatagttctgtatgtccagaaatgtcaccaagcaaccacttttcaagttcctgttttcaagtacctgagccttcaactcaacttctagggactggggaagtctcaagctgtgggcctagcttgagtttagaggaagcgatgttctgtataaggccacagtgggagaggctatatgcaaattgttggcttagagcgtgcagaggagcttcagggggatgaggagaggacaaagaagggaatgatgtccagaggagcgaaaagcaggggaaagctgttagacacttgctaccttccctggtttgcagaaggaagctggctttatttatgggattctaaccagtaatttcctaggaataatctgtaaataagcagaagttactgactcttctaagcacaccatgagaagtatcacaaagcattaaaataagtcacttgagtacactgcaccatccttaataccctgagagcctcagaggcaggtaaggcctcaaacagacctgctggtgtgaatatatgcacttttttcttttcttttgagacagtctcataatatagcccaggcaggtctggaactcattatgtagctgaagatgactctgtgtgtgtgtgtgttcatgcatgagtttaagtgtggctatcaaaagacaactcttgaggtcggttcacacttggcaacagaactgcatacaaacatctctatccagttagtcctttcactggctccaattttggttattttctacaaagcaatacagtataaattctatgtttaagaaaaaaaagggggaggaggctggtgagatggctcagtgggtaagagcacctgactgctcttccgaaggtccaaagttcaaatcccagcaaccacatggtggctcacaaccatccattacaagatctgactccctcttctggagtgtctgatgacagctacagtgtacttacatataataataaataaatctttaaaaaaaaaaagaactgtcttagaatgtgttaaatactactaaataagtaagaaataactttcacttaaaactcaattctaacacccacaggcacaaactatcagtccctgtattgaaggcatctttcatctttaagtgtgtgaaagtagggcctaaagagatggctcagaggtttaggtcactggctgctctctcagaggacctgggttcaatttccagcatccacatggcagttcccaactatctgtaacttcaactacagaggatctggtgcccttttccggcctcctcgggaaatgcatgtacagaagcatagacacaggtaaattattcacgcaccttaaaaaaaaagtaaaagaaaactttttctccctcccgagtcagggtttctctgtgtagccctggatgtcctagaactgctctgtggaccaggctgccctggaactcagacaaatccaccttcctctggctctcaagtactgggattaacggcatgtacaaccactgcctggctaagaaaagtctttaaatttgtgaaagtgcctatacactcacaaactaagtattcagctgggtatggtagcacacaccttgtaatcccaagactttaggggctgaggctgaggactgccatgagactgagggcagccagggagctattcctggggtgcttcaaatgctccccaaataatgtaaaaagccagcgacgactctatagtcgagtctaaaccagatcttcatactttggaaatggctttatttaactacttttcaggaagtaatacgtgcatatagttctatgtagtttttttgtttgtttgaaattaaaatagagtctcattctgtagcccatctggactcaaattcaaagtgattctcttgcctgggattccagatgtgagtcacagtcaacataagtcatgggccaggagcacagccagcctatggcagcatctcaaagcccagtgtgcagaagaatcacccatgctcccgaggaggttgactgggctccatacttggggtttcacccagcaggcagggaagactcaagagctatgcctctaacatcagatgatgctaattcgggtgtggggtcacacttgtcctacagaacaagtgatggaacaaacccactgactacatgaggagagctgggcagacgactaggagatagaaggattccctgactggtaagtaaattaggaacaaagcgtaagaactgagtgtaactgtttagaacttgtaactgtaaatttatgatatggattgggtattataccggcttatttctttagaatcttccagactaccacacgaatggaaatgttcatgtacactgagacaagtatttatggagattctatttatacatctcgagcagcccagaatagttatggtttgatttgtataaagaaaacgcctgctaaaacaccacttctaagaatgtccttatagactaccgcatgaccttttcaggtaatggaacttaggtaacttaagaaatcctttttaaacattttaactaacttagaagaaaatcttttcaactgagcacctgacccaaacatcagccgtgggccagtgcacactgttccctctgttcacacagcagggcttgtgctcactaggcagtgggcatcacctctaggctcaagcagagcttatgaagccattcagacagacatcaactgaacttggagctgggcaggtgccgttcctgcttttctctctcagtacctcggggactcttacctatgactgctcagtgtatagagttctaaatttcattgtctatgattacacacgcctttaatcttggcattgggagacaaagtaggtgaatccatgagtctgggccagcctggtctacatagaaagttctagggtagctagggctatacagtgagaccctggactgagaatataagtaaataaataataaataaaacccaaaattccactgacctacttttctcacttgatccaacagtgactctacagtaaagattataatgatggggtttaagatttccttttcgcatgcgcgtgcgtgcgcgtctgtgtgtgtgtgtgtacacgtggacctgcacatcactggctggaactctccaagtaggctattcactcacaggtattcttctgcctcaacctcctgggtgcctcgattacaagccatgagccaccacaaataccgtttcaaaatataggttctgaggactaaacacaggtccttgggctttcaagggaaacactctaccaacctagttatctccgcagctccaagatgttatttttttcttatgagaactttttgtctggttgtttacctaatcccagaccttcaggcttgtcagtggctgatggatggctgacctgttgttaccagcaacaaagtggggtgactactagactttgtatgtgtgtgttttatggtgcttatactgcaccagaggcatataaggccttagggtaatgttagtatagctgatgttcacttgtaggtaatatagcttagtttgtgcttttggtccaaatctctgtggatactgaacatcactatgcatttccccctctgctatagaacttgatggaaagcactcagctctgaagagtaacaacattcagttacataggaaagaaatgggaagtgaacctcaggagggaaaggaccaaaatctgctatgctctgaccacaagggagttcctaatgttggtatcgtatcattgctcacaatcacataacgatcacatttactgacctggggaatgctgggaagttgcaagtgaggtcatggaattagagaggttaaggttggcagtgatactaagctggctctgcagtgcaggagggtaaggagatgtgggtgtcaggagggactcctcactggtttcttcatcaattccaggcaagtacgtgtcaatcaaggcatcaagaaatttaacaatgagctcagcatagtcagggatttgtgtttgctgtaatggaaaataggacattattttagctccattaaaaaaaagttccctctgaagccaagaaaaggttaatgatatctggggcttggtggattgtttttctttcttcctttgtagtctaaatcattaaggggggagggggacgtctggaatagtatttagagagaactgtggaacatacagctaggaattgtatttggcttcccctaaaagcttccagatgaacctgcaatttctgaaagccatgcagagacagaggaattgactactttatagacaatgcagtcctcggcagtgacatctcgccaacgtcccaaagcagatgagacaggcagagcatcatcatcatcccaccatccgcctgttaaaacccctgcatgacacacttctgtgacttcaggcccatctttttaatgacaacctgtgcatatcaacagacagtacaaaataaactaaatccaactcttagaactagaaaaatgtataaaaaactcatcttgatttaacagcccttcatctaggacatggtgtgtgtgtgtgtgtgtgtgtgtgtgtgtgtgtgtgtgtgtgtgtgtgaagggtgtggggcagaagccctgccttcaaggaacttcaattattttaagagaccatctacaaaaaaattaaatactatttcatgtagtataccaacaaatgccagtcaaagaaagtgaacagccaagaacaaatctgatagtcagatgtagccatgtgtccctgaggtgtatttaccatgcatcacactcttcacgagtcacaagacaggtgtgtgagttattgccacatgtacagaggtctacaggcagaatacgttttatagaggttttccatacccttctgagatttcaaacctaacttaaaataaaattaatatatcaatatattgaatgtattgcctctttggaaaaaatctttctaaaacaatttttattttgaaatgttactttggtttgaaggtaatgtgtattctccaacagactcatgagtacagttaaagactctggcttatcaaaaattagaaaaaaaaaatattgtttacctttgaaaagggtcctgcaaaccgccataagccattaaaaccaaaacctgcaaaaaatcaaatgctactcttacaacaagcaaggcagctttaaatagtaacaaaaattaagctgtatagctgacagacaaactctgcatatatttaataagacattttaaaatcagtgtcaaagacgactaaaatgtccttagaatagatagcatttttacagtggtcaagcagttatactgaacatgtaactaatagaatcagaagatgaaatgaagagcgagagccatgcaggagcctatcccgcagctacactgcagccaggcattctccaacagggccgcagctgtggctcagcaagcacccgctcctggtatatgtatttactttgcaggtaagatgtctggtactgtggcggggactcctcatggtacaccacactctgtacaattccatggattggatttaacaaatttggatcttggcataaagacaagagggtattgatcttagagtccaacaaattgtgcctggaaaaacaaaagtaaacagaggaacattaaataaaaggatttactggaaagtgtaatatacatatcccttagaacaacatggcaaaactggagacagggacttttacctttctggcacttttctaaattatccagtgaatgagcatgtgtgtgttgtcattctaagtcattagggaaatacagtaaagcaaatacctggtagctatcacacgaccgtgtcaaactgtacaaggaaacgttgtccaaaacaggcttggctctgtctgcccgtgagcacactctgcactctagctcctcggctgtctgtttctatgtacgtccagggttacaatgacatttaatactaaccagtgccaaggtaggccagtaaaattaatttggaaggggtggcatggggaatcttacaaagaaaccatttccagatcacttgcaatctattaataaaaatctattttaaaaaggcaacacctaaatatgtgaaattcataaactttaaaatggaattagacaacaacaaatgtgggatgctcaataaactgcagtgatgtattcatgtttattaaaccaaagtctaactatagtatctttacttgtttgacatagctgttccaagatgtccaataccaaactcattctactcccctttcataggcatgggattcttctgggacgtatgtcaccactgtcatccactcttccctgcaagccatgaatctagcagtcctctttagggaactaccctagtcaacactcagtccaatatcaagttctgtaatccttacctccaatatgtgatttcaagtctgtctctccttatattgcagatattggtctcctggaatagtatccttacaacaatcttcccgcatctgcactgtttcttccaactcattctcagcataacaccagagtgcagcgactcactaccaactaaagctttcctaacagctttgcactgtataaagggatacgactcgatatttaacactgacacagcaaaggctttagccagacttctgccctagacctatccttcaccttggagctctttattgttctgtgttccacacaaaggtccttttaaagtttctttaatttgccaacacctttctgtcatagttgtcagctgacatatccaggaagaaggactcttaactgaagagccgtctccatcaaaatggtctgtggaccactttcttgactggtaactaatgcaggagggtacagcccactgagacttaggccagccccagtcaagggggcgggaaggataactgatcaagccacaattagcaaagccagtaagcagcattagtccacagtctctgctttagtttctgccccagcatccctcaatgattggattgtaacccataggtgaaataaaacctttcctccccaagttgcttttcttttctttttaaatttattttatgtgtatgacagttttgcctatatgcatgtctatgtaacacatgtgtgcctgtgtccacagaggccagtagagggcgtcaaatctcctggaactagagttacagacagttgtgagccactgtatgggtgctgggagttgtaccagaatcctctagaagagcaggcatgcttttaactgctgagctatctctctggtctcttccccaaactgttttggacagtattttatcagagtaacagaaaccaaactagagcaaaggctttgaagttcaagtattaaaagtaaaaccaacctcctagagaagagggcaattctattttccctcagctatgaatcagtacagaattctaataaaaagagaagcaagggttagcacaatggctcactggagcaaggtgacagcggccacaactgatgagcttagtctgtcctccaggaccactgtggtggcagaagagcaccgactccctaaagttgtcctctgacctctccatgtgtgccattatattcatgtatgtgtgcactaaaataaacacaatgtttaaaggaaaagatttagaccaaccccaagacagtcatgtaggctggtttaaatagagcgatctatcagtttgctcttgagaaaactgtacattaatactcattaagctaagccactacaataaatcaatacgattaaggaaaaacaagcaaacaaaacaaaacaaacaaagcaaagatggttttggtaatagataagcccaaagcaactttagccattattaaagtatgaatttagaaaaagatttattttttcttttcagttctgtatatgcatgtgtgtttgcttgtgtgggtatatgaatgtatgtttagtgtcctctgaggccactggaactcaagtcctctgcaaaatcatacatgctcataactgctgagctatcttttcagccctttagccccacagctctgtgttttgttttgggtgctgtgggtcaaacccaggccctggcatgctaagcatgtgctcctctccagagctcttcgtagtctcaacctggaaaactatagtcatccctctctaggataacaatggtagccaccctgcccactctataggcagaagacaccactgagaagtacatttcctacacctttacagagcacctgacataaagacagggcgattaaccaacaacaggagatacttacacaacaggaaacactttgggaaacacaacgctggcctctgctagatattcataaagaatccgttgatcaaattcatctgtagtatattttaccagtgtagcctgccaagatgcaaaaacaggtaaacaatttatgttgaaactttgttttaatgacatgaaaatatctttcttccatgtttgccatatttaagggcctgctaagagcaaactagaataaaaatttaaggacgaaaaaccctcaaaaaggaaaatcctgccaggagtagtggtacacatttttaatcccagcacatgagaggtataggcaggtggatctctgggagttcaaggccagcctggtctacagagtgaggtataggacagctagggtttcatagtgaaaccctgcctcaaaaatgaatgaatggacgaatgaatgaatgaatgaatgaatgaatgagtggacgggaggaggatgttccccttaccagaacagtaagaagcagcgcttggatctttgggtcggtaagaacttcttcatccaaaagaacatttgattcagagactgagactttccgtaaatgtgggtgctgctgcgaggagggaatcctttgggtttctgctgtaggatatggattaatgtaagtacttctattagtagacaaagtataatttactcaacatattttaatgttacatcttaatgttacagttccttaaacaggcatcttaattatcaatattactatcatacagagttgttatgtatgcagcaatataacagctagtgacttgcagtgttgtgccacacacactggtctggaactgtctacgtagaccaggctatccttgaactcatggagattctcctgtctcttcaagtatagcccaggcctctgtggacctgctgcctctgccccttccgcacattccactggcataactggctgatttcttttcctgcccacttgagccagggcacatgctctgcactgcagcctgagccctcaggcctggatggaagcaactgtggcttcactgtgcttcccgtggtttgcagccatcttcattacttatcagctttgtgtctcacccatttcatagtcagtctctgccactcttctcattttcgggggtgttgtaatccctgattccatttcttgtcttttaggagcctttgtgtcagatatcaagtgatcaaaactttttcttgttcctatgaacaaaagttacagaatatgaaagtttattaaccacagtgtctacaaatcacaatattctaataatttaagcttttacttttgagcgcaagctgagacatccctggagcagagtttcttagcattattctccgtttcctctctaaggcgtctggccccacagctttccagaaaaggaggatctttactagcctaaaaaggaactttaggttatattcactatcccaagaataaactagactccaccaagtatacataacaaatacaaggattagattttgatcagtgcaaagcatagaaaaacttaaatggcccctttaagtaaggaaattgagttggttatcaagaaacagtcgggctgcagagatggctcagtggttaagagcaccgactgctcttccaaaggtcctgagttcaaatcccagcaaccacatggtggctcacaaccatcggtaacaaaatctgactctatctcctcgagtgtctgaagatagctacagtgtaacttacacataataaataaatcttaaaaaaaaaaaagaaacagtcactaacagatgagcaatctccaaatacagggaaaaattaaagtgtgactttaatctgtaaagatatgcatgcccagaagtgctaacaagcagacacacaacccttcaaaagggcaacaagtagtctcatctcaccttggctttgagggtatacccaatcatgtactctggtatttaaacgtctttctcttatttaagtacaaatatttatatggcattattcagcatttatttacctttgctcattacactcaggggatgtctcttcttgtagcagttctacaaaacaatctggggctgagtatgtagctcagtggtagagaacttgctagtgagttaagttccctattttttgtttgtttgttttaatttaattttatttttcgtacttatttactttacattccattcactgcccccctccaggttacctcctcccgaaatcctttccccatcctccctcccttctcggagcaaatagagaccccctgggtaactcccaccctggcatttcaagtctctgcaaggccagacattttctctccaccaggccaagcaaggcagcctggtgggtagaacataaaccacgcgcacacaacagctgttgggacagccccgacccagctgttccagacccagatgaagaccaaactgcacatctgctacacataaatggggaggcgtagacccagcccctgtatgctctttggttggtggttcagactctgagagcccatagggaccaagttagttgactctgttggtcttcctggaattcttatgcccctggtttaatgctcagaagcacacacataggaaaaggcaaaagactgaaatatatatcttaaatgaattcaaaggcataattgaattattacaagatctgacaagtggtatttgacagttcagtgttctgttgccctcatgcaccaagactaatgaataatcacaaatcacaaataccaaggccaaaggaatctacactcaggtcagtctcttcctttcatgcaaacggaagaagtcatgagtgattaggtggttagactgtattcacactgctaaggatcctgaagcctactagtgctttctacagtgcttggaggtagggatgctactgatcttgtcctactgtcccttttcttctactctgtcatctccttctcttcctacagctcaattatctaactcttcaaatatttatcagtttgtttggttttgagacagagtctcacattacgcacagttctgggtgtctttgaactcacagagatctacctgcctctgggcatgccccatcacacccagctcattgataggttctttaaggtgacacacactcaaaactctccttctagctttgaaatgtaggtgtgcactgtagctccccacagtcgccctgagtacaagagcacagtagccctcttgctccttagtgcctaccagtctctggtgacatctgtggtgtctgaatatgcttcgtccaaggagtgccactcttagtgggtgtgaccttgttggagtaggtgtggccatgttggaggaagtgtgtcactgtgggggtggactttgagaccctcctcctagctgactggaggtcagtcttctgtttgccttcggaaaaagacatagaccttcctcctgcaccatgctatgcctgcctggacgctgccatgtttcctgccttttttgataatggacagaatctctgaatctgtaagccagttccaattaaatgttttcatttataagagttgctttggtcatggagtttcttcacagaaatggaaaccctaagacatcactctgtccttaacactcataagagccatatcttctctctcacattagaggggcatcatgtaacatttcattttgtgtctggcttaattaacacactaatctctaattttatccatgctgtcaccaactacaggatttcgttttcatggctactgcctgtggatctgtagaactatgcttccttcatctgtgcattagcggatggacacggaggctgcttcctttctgtgttgctgtgacaagtcttgcagtccacacagaatgcagcggcctcttccacacactggtttgatttcctccagatatatagttagtagtagaaaataatagtttcagctcagccaggaaaagtgccatttaagttaatttttaattttatttaccaatggggtacggccatgaaacacattacatggctaggctggcctctagcttgcctttacctcatgaggctcagcagcagcacagtcacacctgaccagaaacctatgatatcgtttacagtcttctccctcccaccccgtccatctctctgtcctggtcactctcctttggaaacagacctcacacacagctcctgccttagtgtgtgctggctctgggttttcctcttaggttgctgaatcaatcttgtaaatggtccccttgaaaaagacttttctctacatggctgtcaggaaaatgtaggaaaacaacaaacaaacaaacaaacaaacaaacaaacaaataaaacagatgcatcttgttccttccttaatgaagatctctgttggatgtatgatgtggtaaatctcctatcactgtagtctttgttgttcttttgagacaggatctctccacatacccctggctctgctggcactcactgcatagaccatactgccctcatagagatgcaccggcctctggctccaatgccgccagagaaaggctgggactagagttgagctaccatgcagccagctgtctggtttgtctctcacagccacgctgtgcttctccagcctccttcacctgctctgatgttctgacccacggccactgctcccacactctcttcccttaccatgcttcctcttgcatgcatgcctttccttatcctgtgtccgtccacctggctagcatggtctaaatctctgaaatctggctcaaatattacctcttaatttcctaagagcctcagtaatgttaagcattactgctttaatgccactgctatacactgttgtcaccagctgattttaagtcataactaccaaaggataagcccttctctaaagagcatagaccctactttttctacttagaacagagtttgaaggaattcaatactgcattttctgaggttagtttttcacttacaacttctttggtatgaaaatccataatgacaaaacacgaagtaaccagaaatcactgatgacacaggattaactaagggaactcaaatagaagagagacgacagactcaactgaactgtaacaatggctggcatttgttatttctcctttcaacttttactggaaggttatttgtgttacactttgttgtttgcttaccaatttccttatgagcaaacctttgcataatactatctcatgatactaagtatgtttacatgggtaaccagagtccacactcatattatttatcacaggttagacacatcaataatttgagtaacgatttagagtggcagccaatgaagggcaagcaagcactgcctcacacttgctctgtgggtcagcgagtgtcctctttcaggaactcactcatcagttactggacatgaaaggcttagcattgtgcaagcatttctcataggaatgttgatagaactgtcaaaaatcattattttgggtcgacaagatagcttagtgggtaaaagcacctgccttgttgcctgataacctgagtccaatgcgcagatctcacataaaggtggagagaactgacagtccaagactgcctccaatctctacctgtctgcacgcatatacacagacaagaatttctaaaaggaatattgtcttatagttattaaaaataccttgttttgttgtttcaaagattatatggttccagatctcttagggcggtccattctacttctgaatggcacttcaggggacattagcatcccagccctctatacagcagtgcttcctctcctctagatagctaaccactctcatcactgccgtccagggcccccaaatcaaaagccacagtacttggaaatagactttaaaaacacagaaataaaaaccaaatcaaactcaaagccattccaaagtctcattctgaattctctgtctgaagacacggctgaaccaaactcatccattaaaatcaactcccttagaggagccagccacacaagggctggagagatgctcagtgagtaagaacacttgctcctcttccagaggattcactccccagcaagcacaggaagctcaccaatgtctgtaacttcagttccaagggctataacacccttctgcagccatgggcaccaggtacacatgtggtatgcatccatacacatgcaggtaaaacactcatacacataaaataaattaaattcaaaagtcacaagaatttgttacatcaaaacagtaaatattggcaatctagctgggcagtgattgcacacgcctttaatcccagcactcgggaggcagaggcaggtggatttctgagttcgaggccagcctggtctacagagtgagttccagaatagccagggctacacagagaaaaaaccctgtctcaaaaaaacaaacaaacaaaaaaaagttggcaatctaaatagtttcaattaattttccaagagggaaagtaactaaccatttttcacactaacaataatgtgaaaatttatataaaataaagataaactaaccaagcaatttttttgtgttggcctgagaaggctgtcccatatccaagctcatggatttcctggctcggggactggtttggcctacagctgggtaggtggctgcaaggtatccttctgaacctttgggagaggaccatggctgggtctcctttagtgtcctgaaaaattgaaacaatttagaagaattaattaacaagaagataataaatataaccactgttcactcattcctaatagctgtcctatttcctaacaatggcaatcaattaattcaaaaactgcattttaaagagccataggacaaaaacttttcttccttttttttttttttttttttttttttttaagataactttccattaagttgcccaggctggcccagaacttgctatgtgctctaagttggtcttgaatttctaatcctcctgccttagtttccagaatgctagcaatacagatatgtaccatgatagctggctcttagtgtataactcttaatgtatccctaggcaggtaaacaggaagaactatagtgcataattttattaagctttttttcttttctgcaggacagggattgaatccggaacctcacacgtgcacggctagtattctatccctaaactggtgaaacccagaacgacttatctatttactgattgagcccaggctggcctcaaacttgctatgaagccaaggatggcactgagcttccattcctgtttctacttcctaggtgccaagaagtcaggtgtgcaccccacagtcagagacaggcaggtgtgcatgctacagtcagtcagtcttctgcagcactgggactgaactcagggccttctgcataccagaaaaaaatcctctaccaacggagctatacctctagctcctattttgtttgtcactggaacaaggtcttaggtagctgagcctggcctaaaactcgatatatagctaggatgaccttgaattccaaacctcctgttccaccttgtaagtgttgggaccacaggcatttactaccacatatggctccaaactttttaatttgacaagaaaaaagttgtacatttttactgaacaacatggtttttttcttccctccctctctccctccctccctcctctcttcctttctttttttttcgagacagggtttctctgtgtagccctgactgtcctggagctcacactgtagaccacgctggccttgaactcagaaatccgcctgcctctgcctccctagtgctgggattaaaggcgtgcgccaccactgcccagctgaacaacatgttttttaaaaaggtatttgaaaatgcctaaatatgctaatataggacatatattaccctacatatttgtcatttattgtggtgagaacacgtaacatccattttcttagcacttttcaaatacagaataaatacactgtcattaactgatgctgagtaatagaactcttgaacttattacattgaattttataatcagagaaaataagtctaaataggcaactgtattactgaattatttaaaaactgataaaattaagtttgagaattaagctttcctgaatacaggtaacattactttttcctttccatagccaaaagaagggtcaaaaaaaaaaaaaaataaactcatggcattggctaaagaataagacttctgagcacagcacggtgtttattaggaaagcctgcatacattgttgcagtctcggtcaagtccttggggaggagtctttttactacaaaaaagcaagatattagtaaatttaataacatgatatgtttaattcacattatagaataataccccaaagatggaatttatgtaacttcatgttatattggggggaaaacctacataaagccatgaagaacagtagtcataattttatgattctctcacatgaacctacactgcagaaaccaggcacggtggtgaatgcctttaatcctaacacttggtgggggcagatctctctgagttcaaggtcagcctactttatatagggagttccagaccagccaaagacacatagagctttcatcaaagcaataacaataaaactacactacagaaaggttttaaatggtaatgacaataataaacagttcatacgaatgttttttaccctcctacatcactttttgtcgttgtttcttaaaatatttatttactctatgtgtatgagtgtcttgcctgcatgtatgtatatgtgcaatgtgtctgctatccaaggtagtccaaagagaatgtcagatcctctggaacttagggtatagatggctatgaacaatcacgtgggtgctgggaactaagagaacctgagacctctgcaagaatacaagtgcttttacccactcagctgaccctcctgccctcgcttagttcttagcatcagggatccaatggtacttgtatttcatgttaggcttttccttaggtccttttctgcaaacttttcaagattgtctttcttccttattcaagtgttttgtgtttaaagaggtgaactaatgataatataagagcagattagaataactttaatactgcctatataaaataccatgacctgtagagcaaactttgatagctactcttgccagaccatctggagctgccactctgctcccttttagagtcctctgctgccgatctccaccacatggaaactaaagcctgactccatctatgtaatgatgagagcctgcccacttacctatagctggggtcaccgtgatgaatgggatatgtatccataggaacattttccattgaaatatcagtaagaagaagggacttcctatgcttgaggctacagcgacttcgaacctcttcagacactgtgagtagagctaataggaaaaggaaaagctggtaaaacaggcttcatttcttccaaacttaagaggctattactattactatgtactattttatatgtacataaaaaggcctggagagtgagaggatgaagtgtataaacacacgggatagacttatcctcaagagtttacagactgctttgaaaggctgcataaacataaaacaaagcaatttgataaacaccttactttctcaagcacttgattgcatatctgctttcaataatcacaaaaagtaggcaaggcatatatctgaaatgcagtgataaaatattttggaatgtaaacggtttgttcaaggttgcatgcttcaaacaaaacaagctggcaaaaccggaaatttgttaaagagagaatgggcatcttccatcaaaccatacctcagtctgcattctgtgagtagaatacagtagagaaagtcagagaagacatacaaaagcactttaataaaatagtggggactgggggctggagaggtggctcatggttaagagcactgactgctcttccagaggtcctgagttcaagtcccagcaaccacatggtggctcacaaccatctgtaatggaaactgatgccctcttctggtgtgtctgaagacagctacagtgtactcatataattaaactaaataaataaatctttaaaaaaaatagcagggactggacaggcagcccaggtcaaacagtacaaagaattcatactgaagagacagaagccctgtagaaaactggagtggagacagcagtagattggtccgaagcatcatgtccattttgagagactataacaagtgatgcttatgaaatttacatagaggacagaagagaaggctacaacggcctgccgggatatatttcagattccagtgcaaattcttttataatgaaaactattttggcaaaacctttaccttttcaaatacgaaaggactgaactgtgagtgttctactggactaaagactagctggaaggccaaagctaggcaaggacatcatttgctgattctaagacaacagtggagtcaggctgatttagtcaattacgtgcgtttacctgctaagtaagccacactctgtgtattcacctcaaatttgtcacaatttctatgtttgttaacgagagttagtagtgtatgcaaaattctgactgttcttgcaacaatggcaggtgaaggatgcctgtaccctataaaaagaaaaaaaacaacaaataaccagttaattagtccatgaacaaatgtttgagctcttatgctgtgacaagtaactctacaacaaaaggaaaattcctgccatccaagaatagccgtttgtgaaggtaaaacataaaaatgtgaagttaattatacatatgattaagaactctaaaatgtgtagaagagggtgttccttgaaaccctaaaggagaaggcattaggaaacaaagggcattcttgacttttccatttcctaaagaagcatagaggttagaaataaatacaaacaaaactgcgcattagagctccccttgagatttcacttgaagtaagggtgctaatatttaaaaagtgtttctcctttggggccacagcaatgactcagaaattaaggaccagaatttggttcccacagaggggttcacaactgcctatacctctagttctcaggtaacaagtactcaggtgctacacatatatacatccaggcaaatcactcgtatgtataaaataaatacatctttaaaaattatttcccccccttttttttgcttctttatttttgttttttgtctttttcctgattttgggatagtgtttcactataaagctaaggactagggtggccttgaactctcctgcctctgccttaacattatttatttattttataaataagcaccttattaaagcatagctctgaagttatgaagctggcaatgagcagctaaagctaggtagaagcacattagctccagtctagttggagatggttaactatagaaacagcaatgaaactggaagagaggtaccagaatagcaggactctaatgtacacagaaagagcacgcctttaatcccagcacttgggaggcagaggcaggtggatttctgagttcgaggctagcctggtctacagagtgagttccaggacagccagggctacacagagaaaccctgtctcaaaaaaccaaaaaaaaaaaaaaaaaaaaaaaataaataaataaaataaaaaaataaaagaaaacatgctagaaacaagtcaaagagtgtctacgatcatatccaaacagcagtgtgctctaaactgaaaaatctcttttattccttggcaatgctggaaagttacccagtgttctatgactgacctcatccctaagccttcttcgtacaataacattcgcaatatgcacactgacataacatcatgtgcagtgttctagtaactagtaacacagcaattaagtcttgggggaattttactactaactactttgttcttttaaggtctgatatgtaaactagattctagttaaataccaattgaaacaacttatacagatatgtttttcattttaaagtgtagcatatatgctagattacagcaatttatctcaagtaatcaattcttcttagttacttttggcttctagatacaattccacaaaacattctaacaaaaagtctctttaccttttaagaggtgtccaactagtgcaaagttaaagttagagttgaagttgagtccgacaaagtgatccatctgcttgcagtgccattccagaggattccggatcgccataaatacttcttccggactctattaaaaacaatcaggagatagacacttggtggagttcgcacagaaattttccttctcgttttccagtactagaaccccaagcatactttgtattcttggttcagatattttgcttaaaaagtcacttttttacttgtgtttaacagctctcacaggctaagtagtactttcagtttcagagaaattatttttagataacagacacacctataagaacatttacgctactatatttaactggtataagacagtaaaaaagataaataataaaatagtagataactcaaattgctttaatttacaacagggtgtgtgtgtgtgtgtgtgtgtgtgtgtgtgtgtgtgttttgtatgttggggtcaggggttcctggggatcgaacccagagtcttaagtatgctaggcaagcactcttaccactgagctatatgaacctgctatgtagaaaagactgactaacccctgattctgtgtcaacacctctcaagtgctaatattacagccactcatcaaatgcccagctacatttgtctgctgatatccaactcctacaggactggctctgcttcagcctctcaaggagcaggaccgaaggacaagcactattactctaactctacatcccagagaatagtctgctgattttaataagctttattaactctgatgtaaaggtaagaaagaaattatctcttcagatatttatttgtaaatatccttaacatacaaatagccaatagctagccatcacttgcaaccaccatgatctcaatcaattccagagcagagcaatgaagttagtagagaagggaagaagctcagagccagacatattccagtaacttctttactcttttccattttgtgaacagaggtctgactgataaacttcaaggtatcttctatctataatttagttttgtagccttctcagctttgagtaggcctttcccagccttgaaaaggctgagcatttttcccagccttgagcagactaaacagaccttgaacattcgccatgacaggtcttatcaacctggacagagacatctgttttagctgcagttgcaggttcccatggaaactttgaagtctcagctgcttgtattgatcttgctctacaacatactccagctgaagaagggggtggattttgtggttttgtttcctttatatatgcaatgcttattattaaactttgagccttgatctgaacctttgtcttggctttatccttttcttacccccttaccttatttccagcccctctttcaggtaaatccagtttaccacgtggctgctggacagctacatagtttcacatttcctagatttccagctgttttgagtctatatcacattatgtacagtgagcaagcacttaggggctggagagatggcacagtagtcaagagtacttgctgttcttacagaggacctgagaacgcttcccagaactcctatatggcacttcacaatcacctgtaactcagaagttcccttcttctaacctcaggagcaccagaccaggcacacatgtgatacacatatgatatacatgaagggaaacattctataccacaaacaaacaaacaaacatacaaacatacaagtactttagaccggggtatcttcacactcaggccatgttctatttccacatagatcagttcatttcaagataattttgaatgtgtgcacatgcgcacacacattttcttcaaaagaacattcttttttctcttaagctatttgtttttctccaaaacaaaaggaacatacttttgcattggctgtgaagtaacggtttgcatttactcagcacacatgtgaggcctgggaactgaacggaggtcgtcaggctgggtggtaagtgcctctgcttgctaagccagatcactagcccaattctgggctgctttattttatcctctatactctaaaccaaaatccaacccctacctatgttgatcaatgtgaagggggctgctaatggtatactttaaagtgagacttggcaaaaattgtctggcgagtctccaacttgcttatctgttactaattgtacagattttccttcaagtacacagtcaataaaaataagttttcttattgattaactgaaaaaaatagtctctctctctctctctctctctctctcacacacacacacacacacacacacacacacacacacacacacacactaaataaaaataaacaaggatgaagaatgctactaaagataaccagtaatgaatgcacaggacctggtgtggtagctattattcctcttcagtattattttaaaattaaaaaaaaatgtatttgcttattttatgtgcatgggtgtttctttccatgtatgcttgtgcatcatgtatgtgtagtgtccaaggaggccagagagggcactagattcctcagactggagttagagatggttgtgagctgccattcgggtgctgaagtcagtgctgctgagccatctttccggccctccttatgtctattctaatcactagttgtagggcacactgtccttggctatttttatataggaactatggattaaacagtttttagtgagctactaaggaactatattcacaataaaacacgttactgtaatatctagattatggacctcttctgacatctagagagccataggagaaaaggaagagaagactcactgtgagcaatgtgacctcagaggacagcttacgcaccttgtcattgaatatccggagactgtccaaggtgtgcaggttttgttccagaagtgcagtgccggctgaatacaagttgacttcgtccagctgcagcacagccacagcaacccaaaagagggctttgtgcaggggcgagtcctagaaaaaaagatccgctccagtgagtgaggtgaaccaagacacactgtcttccatgatgctgcagcataaaccagagcaggctacccactaagtgaatgtgcttcctcttctctgagaactatgaacagaccgatgcgcattggctggctctgtgtatctgattacaagtaccgtaagttagcctgagagcctgagcttcccctggattctcccaatgctggatgtcaaatccaccacccagagttggcagattctctatagtagactgacacctgccacctcctggttacactgcagacagtgtccaggctaaccgtccttctacaggcacttcctcccttctctgggtcacctgtgtcctgctttttaccatactgtcacctaggaaacgatcatttcaaactccttcctgaagactgttgaatgctagttaattctactcaatctttacacttttctctgtcaactctctacaaggttggtctatctagcaccccactgtcctacttacttctagctctagttagacactacaacttcgtatcactcttactagtataaactcttattcatatgtactccatgcctccctcctactcttccccctcccttggtggagacggtacccagggtctaatacatactgagtaagtactattccttgattacaccctaagccagcatgcagacgcctctgatgagcaggcactgctcctggcttccatccctccagcagtgatcactaacaacgcactgagtggtaggctactttacttgtccacatctcagcatccatacccaacccagacccaggccactggtgaactctgtgtatctctaagcactaccagatccatacatgatactcaactctccccaccccaccccccaagacagcattatctctaggtagctatggctgtccttgaacttgctctgtagatcaggctgacctcaaaatcacaaagatcacctgcctctgccttctaagtgctgtgattaaaggcttacaccaccaccacccagctcaactttcttctagtaccaaagagaaaaaaatatcacaaacaagcacgggagaaaagatactctatacttcttcttcctcttcttcaaactactaagacttgtgacacaggctctactttgtctctttccaatcaacccttccttttcctttcctctctaccccacctctctccccatccttctttctccaacccacctcccttccttttgagacaagtattttctatgtagccctggctgtcctgagatttgctatgttgaccaggctgcttcttcgtgagtgatggattaaaggtgtgggccaccaggctaggccactaccccttattttctaactctgtgacaagaggctccatgctgactataatttcttctttatactcttttcaatccaccctatttcctaaactctgtataagaaaagcacacgcagaatcaatatcaatgattaccttattaagaagcggctgtaattttgttagtgctatcaccgtagattctatcagaacttgactgttgtaagtgtcaggtccttttaaacaactttcaagtgccttttagagaaacagaaatctttgttttacttttcattgaaataaaacatcacttcctataataaatctcagatttagctgagaaacatttaggtatttgacaatttctacaaatggtgaatactctatacttatttttaaaatatttctatattacattctaataagaagggcgttattatagtaattacaaatgacatagctttatattaaagctatacagctttcaagactgattaagtatacctgactagaaaaagaggtaaatactccttttagaagatacttttttttctctttttctttttgagacaagttctttcaattacgtcctggaactcgcttacgtagaccaggttggcctcacactctcaaataaatctgcctacctctgtatctagagtgctgggattaaaggcgtgtgccacaatgttgaacttaaaggtagttaggtaagatttcatcacttcaaagaattgcagtaagaaaaaaagtttaaatgcttaacaaatatataattgcagtgccaataacatttattacgttttagtgtgtttttaaaaccttgaagtatacactgtaagttggaacaaatctttgggaaaagaggaataggtaccttgctaagaattcggataatctgctttatctgcccatgagacactcgtttgctaatacagccaaacaccacaagagctcttggctgcagcgatgggttatactgaaacgcaaatctgcaatgaaaagagccaaggaacttatgaaaacctttgtgtgtatgcacattataatacgagattgctgctgctgctgcaatagctactttcaacaatacacacacagttctagttactattcaaccaaggacacacctttgagctagttctgtccactgatccagccacttgcatgttggaatatctctcatacatgcctgaaaaagagaatactctaaatatatatgtgtacataaatgtttctaggaatatttaatattctcatgtctttaagtgttatctgctataaaaaacacattctaggggctagagacatggctaggcagttaagagtacttgttgtggcagaggaaagatatgacttctgtttctagaatccacagactggttcatatccatccgtaactttggttctggggaatttgatgtcctcttctggattcttctctcaaccttggacaacaggcacacatgtggtgtacacacatacatgccagcaaaacattcagatacataaagtaagataaatgtaaagaaagaacacattctaaaggacagtgtgtactgtaacagaataaaccagtatttcttctgtatattacagaattttttttttcagatgaggtgttattatgtaggcttggctggcctagaattccctacatagattcagctggcttcaagttcacacaatctacctgtctctccctcctgtgacattatacctttcatattacacattttaaatacgattttaatttggtttcttgtcatttttctttctatacctccatgatctccaacaaagcttctgtgactgtttccagggacgtcaaagcaaaagtctccctctcataggagccaggggagaaggagcggtcccggtaactggaacggaaggcaatgacagcagccgacttgactttgctaatgccaaacagtaagtaaaatttgggtaacgagaactctgttagactgagcctcaaaacttgcttggtctcttctgtaaaagaaaaagaaaattccaatattttaactctaaagtagtatgtttcatcttcaactaaataaaatgtaaatatcatgcaaaaatcacacaaccatgctccctaaatcaaattcctgatgcattacattagtggctatataataaacctgcactagtaatgccaacactatcaactaataataaacttttaggttatatgataattacaagtatctgcatgacaaagaaagcccttattgtagctttctatggtgtgcaagttatttttattattttcttgtttgataaaatttcaaattcctgcttgtaggcctggtgagtcaatactattacagtgagaaacctatagcagtctggtaaggtaaagctgagaaagaactggtgaagcgagatcacctcctagggacttaccactaaagtgaagctgagaacaagtacacagagagtgaatgatattgatgagcagcccatgtgtggaagctcggagggacaagggacctgtggctactaagaaagtgacaacatggaagagatagggcagatgagccgccacatcgagggagttgttgaaggacagcatcagcatgtagcgggctaaaatggcaatgtcgtcccacataagatgttgttctaaagttggagttggggataagcaagtcttgtcaattattttacacatccttccaataacctgtaaagaagaacaagttttacaaacataagactaaaagttccatcacacgtaaaattgagggtgctggagagatgactcagaggttaagagcatctgctgctcttagagggaacactggttcccagcacccacatggcagatcacaaccttctgcagcttcagttccagggattctgacaacctctgctgatttctgcggacactgtacacatgtggcacacatacacataaaagaaacctaagcaaatctaaaaaataaattcaggatggatgagacggctcggcaggttagggtgcacagcatccagctccataccttgggggccatctggtggaaggagataactgactcccacaaactatcctgactcctccatgtgtgccacaacatgcgtgtacacagacattcatgcacacgtatacacacacacacacactctcacacacactctcactcaaatctgtttaaacttagctggttataagacaaaaactctcaagatgataaatagatatactatggcatagtccaagaggtacagaaaaagtggttaccttactcgacaccaatttcacatttccagaagctaaagccacagctgtgtctgccatcacctcagctttgatagaccctaagcctcctgtcgcactggtcttgatgaaactgtcaagcacaacatccagcaggtctgtgatctggtgagacaagcaagtcatgttgctgtcaagcatgctgcctttaatgaagaaatactcaaaagagcccaagtaatggacatcttgttttactagagactttcaaagttctagacttaagagacctgtaaaccatgcagggaaggaagagggtgccacttgactccttcagaggttaagcatctttgcacgactatcttcagctgcttagacactatgtctgtgctccaagacagtaacacatgaccaatctaattactttaataataccagtcagtcagaaaaatggctccaaagccaattaaaatcatttatagggtttacaacattgtctaagttaagggcactgcttccttaagtgattattttgaaggaataacgtgcacctcccttgtcaggttaaggaaagttgtatctatgctacaactatacatgcaagcagatgttgtaaatagcatcactgagaagaagtgacagacatcagtggtgatagagactaagtacatatttagatgctatttactaggaatgacgacaggtgcctatagctaaactctataaaattatgcaaggaagagagctctgagatgcattagctatttacagggctgggtatgtgtctacatgcttctgagggacagaacagggtgctctgtgtaacatggaaaccaagaattactagcacaaaagaggcactggataagtgtcagtgtaaattcaatacctgcccaaggctcccccagatttttgcttgaatagaaggatacatctgcttctcgtttatagtcattgttattagcttatcaaggatggcagtaaccctttgtcgtttggcatcatcattatgcttacaaaaacggactagatttgacagccatggggtcatatattccaaacaaaggtgcttcaattcaatacctgtgaagaaaatactccattagcacagatagtagaagaaaatgacaaacattttaatttttatgtgtatgatgagtatgttgtgtacatgtatgtttgtgtgccacatacttgcctggtgtccaataaggccagaaaagagtgtctgatcccctgggaccagggttataaacagtgagccattacatgggttataaacactgagccattacacgggttatacacagtgagccattacatgggttatacacagtgagccattacatgggttatacacagtgagccattacatgggttatacacagtgagccattacatgggttataaacagtgagccattacatgggttataaacactgcgagccattacatgggtactggcaatcggacccaggtattctgaaggaacagccaggacagctgctccacctctctagcctcaggaatgattcagtcatgaaggatgcagcagaattttcctccagttaatttaaatattaacccagcaagaagcctgtgattgggcagtggaaaaggaaggcgggtggagatttttagcaacgggagagagaacagaagagaaagaggattcagattccatgtggctttaaatagccacagatagctatgaatatcatagaaggatagaatgattgggataacctgtctaatctaggtgggcagcttgtgtcattatcaactggctctaaaattattgtatgggcatcttgggaattgagaattcattgatatataaaactgactgataattataagttttaagagttttgaaaactcaggtgacagcagatgctggtgaggatgtggagaaagaggaacacactcctccattgttggtgggattgtaatctggtacaaccatcaggtacaacaatcagtctgaaggttcttgaaaaaattggatatagtactacctgagaacccagctataccattcctgggcatatacccaaaggatgctccaacatgtaacaaggacacatgctccaccgtgtttatagcagccttatttataaaagcctgctggaaacaacccagatgcccctcaacagaggaatggatacagaaaatgcgatacatttacataatggaatactactcagttattaaaaacaatggcttcatgaaattctaaggcaaatggatggaacttgaaaatatcatcctgagtgaggtaacttaatcacaaaagaacacacacatggtatgctctcattgataagtggatattagactaaataatatcggaatacccaagatacatttcacagaccatatgaagcccaagaagaaggaagaccaaagtgtggatgcttcagtgcttcttagaagggggaacacaatactcacaggaggaaatatggagacagagtgtggaacagagactgaaggaaaggccatccagagactgccccacctggggctccatcccatatacagataccagacattattgcagatgccaagaagtgcatgctgacaggagcctgatagagctgtctcctgagagcctcttttagagcctggcaaatacagaggtgggtgctctcagccaaccattggactgagcacagggtctccaatggaggagttagagaaaggactgaaggagctgaaggggtttgcaacccataggaagaataacaatatcaaccaaccagatctcccagagctcccagggactaagccaccaaccaaggattacacatggaggaacccatggctccagccgcatatgtagcagaggatggccttgtcagacattaatgggaggaaaggcctttggtcctgggaaggctacatgccccagtgtaggggaatgccagggtggggaggcagaagtgggtgggcagtgggtaagcaccctcatagaagcagggggagggcgggtaggatagggagtttccagaggggaaactgggaaaggggataacatttgaaatgtaaataagaaaagatatccaattaaaaaaaaagggggggggtttgatttactgggttaaggggatttgtgatggctagttgcagggcgtagatggctggaaaggtacaagcggctctgaggcaggtgaactggagctggggctagtggaagcagcaagactgagacctctggggccagagagtagctgggtatagcgcggaatggtctctctctcttttttaatatttcccacaacaaaggaccagagagaaggttgaagataaagatttttatcttgaattaggcctagacaaacattttgataagaggtaaagacactttgaaaaaaactaaatttaaagtaagaaagccaagctagaaggtggtggcacacacctttaatcccagcacttggaggcagaggcaggcggatctctgagtttgaggaggtggtactgagagaagctgacggacactaggaatactataggctatgatctagaagatcttttcatgattattccctgtcaaagctcattaattaacatctactcacttaacagctgggaacgttactatgacaagatatatcttagttttaaagtagcaacagaaaaacaatatgctataaacatctctgcattaattcttttaaaaaaaatgtgtgtgcaagggtatgtgtgtcctggtgaggtcagaggagaactctgtgggactggcttcttccctccacccttacataagccccagggattgaagttaggttatcaggctttgtggcatgacacttttcctattgtgccatcttgctggttccttagcattgatttttttcaggaaaatattaaaaagtagaactataatgtcaaaaaatgtaaaatattctttaactttatttttatcttgtttacttttatcttatatgtactggtgttttgcctgcatttatgtctgtgtgaggatactgcatccactgaactggagttatacagctgtgagctgccgtgttggtgctggaaatagaacctggcacctgtggaagaacaaccagtctcttatccaccgggccatctctccagccccagatggaaatattcttaagggtcgaatctacttctaaatgtctttctagaaacattgttcttgtttacaatgctacagaccctcaggatttaatctttaaaagacgtttttcacaattctttcaatatgtaatttttattaacaaacttaaaaatattttttttttagtattatgctaccgtgactcatttactaagctacagagaggagccctgaactaaggacgttaatctttccatgttcagtgaagccacctcccagcccagcttagtcacacaccggtgtgttcttttttctgtggagatcttccagagtctcgtgaagcgatctcttccttcctccctgcaccttcctcctgggtgtgctgctctcacacacactactcacataaaagcatctaagccccacctctaccaatgcttctaaatgcagtcagaacttacactggtatgttttgtgtaggtaacctacacttttcaaacttatttcttaagtgatttcatctcactaatcagtttgtgacacttgagctgtctgtttctcttaaatagatctgctggctgagttttgaacattcatgttttgattactatgccattacaacatgtaagtgaggagacatctgtactatcacatctgcactctctttctttataacattttcttagctgtttattttcagtaaaatttaaaatattttgaaaatttcaaattccatgggaatttcaaactctttgatgggactgtattaaatatgaaatagtcccagaagagctgtttgtgcaagacacagtatgcctgtccactcactcaggtatcttcacgcatttatagttactaataacgttgtacttttcttgtttctcaaatgtacaatctctcttcagagttacactcctacatcttccacttgacggaaaaaaatagaacaaaacgtacctatgcagtctttttatcttttaactaatttatcttattttacatgtaagggtgttttgcttgtatgcatgtctgtgcagcatgtgcatgcagtgcctgaaaaatccaaaagaaggcatcagatcccctgaaactggcttcacaggtggctgtgagctgccatgtgggtgataggaatcaaaccagggtcctatgcaagagtaacctgtgctttcaaccactgagccatctctccagctccaatcagacacagtcttgatgaactgttaaagcacttaatcacctaatactgagatattaagatatgattttgaatgcagaatgcagggggaaaagctgtatgtattatatggagaagaaaatgtcagcaactaagccaggcaaagatcagcagctatgttagtacagggtatgaaggaggacagatgttaaaaagaataaatattaaattaatgaaatttattaaaacaaactcagtgctgactctggatctggcatcatctaccaacagatgtccaataaaaatcatagttccaactcaactataaaaggaaaagcaactatttccttaatatcttatctaaaaaaagaagtggtaaagttcatggcgctgaaataaagaaggaaatctgtccaacagcctacagggaagagggtcccacagagttctgataggtctctttgtacatcccaccaggattttctttcagaggtcctttagttacagggtaccacagacaaaaaaaaaaaaaaaaaaaagcaagtgagagactcctagtaaattcccaaacaaaagagttttctttgaattgtcttaaaagtcatttttaatattaaggaaagtcattacttactagatttgctaaatccagaaatacactcttccaaaaactctaaggtgaggtgtggctcattggctgcgagcgtcttactgatagagacaatgaagagtgtgttgttggcagggatgcataaccccgatgtctctagcaactgaccttcaatctttaaattaaaggtgcaggttaaggcacacaggagattataggcagcagacctaagagaagacatgaaggagattgttttacattttctttgtttgtagttacattttccccacaacatacaactctaggttttatcacaaagcacggtcgattctttctcagtgttacaactgactagaggcagaatgtgcggcaagccccaaacaggagagtgagaaaaaccagtcctgaagtcagcgccggacgagaagagcccaggacactcttaagaggtgctggccttcctagaaatcttcatgggagcataaaccagtaaagatttagggtcttgggtgatcaatagaagtaaatgactgaataaaggcatgccatgtattatgagtgaagtcaacactatgctcacagatccaattaaacagagaaggagagtgaggaggactctggcagtgcacacctttcatcttggcactagggaggcagatgtaggctatgaatatgaggccagccttttctacatcaagttccagacagtcagggctacatagcaagagaactttatgttttaagaggaggcatctaggccaggcagtggtggtgcacgcttttaatcccagcactccggtggcagaggcaggaggatttctgagtttgagggcagcctggtctacagagtgagttccaggacagccagggccacaagaggcacctaatcaaataatgtttaaagtgttaaagtaaggataacctcggaatgtttatgttgtccaatttacattgtaaaccagaggttaaaacaaaaattaactctagttaaaaagctgcaactacattttctattctatgaccttaatctatgatctataaccactggaaccaataatgtattacctatggtctattagaacagaaagtatattataaatacatacatatgtatttaagcaaactacaaaaattaacaaagtcttgaggtttgcgctgtagcagctcagaggtagaatggtttccttacatgtatgagcctgtgggttcaatccctagcacttcaaaataacacgtgtcattccacccccaccccaccccaccccaccaaatctcaggctcagttttttttttccattttttattaggtatttagctcatttacattcccaatgctataccaaaagtcccccatacccacccacccccatcaggctcagttttaaaatgcagcaaaacaaacagctgggcttctcagtgaacttcaggctttcactacgtctgagtttctgacatgttgacacaggaggaaaagctatggagatgggacgtttgcccaaaggtgttttattttctctgggatgctatcctttactaacttggaaagtgggatggtttcacttaagccaaggtggccattagcattatttaacagagatggcaagtggcaaggcattgtggcacaggcctgtacccctagcattcagtggaagcagcgccaggaggactgtaattccaggttagaaagacaaaatacccaactgataaacaataaagatctatttggaatcgaaaagtaaagacaggccttatagctcaatttccctaaacatgagaatacatattactgtctgtgaatttatgcttatctttctctgactgataagtcatactatgctgatgctattttatattacctaagagtcataaaaaactgggcttccataacttgggtacgtgtcaaagagccttctaaggtaaggagagccaagtacacatacaatttaccaagccatctgtgagagtccatgaggcctatggaagtaacataaaaataaaaataaatctgttgactattgtcctgctttcctttttcctgagatagtcttattatgtagccctggctatcccacagtttgctatgcagacctcacagatccactcgtgtgtgtcttctgagtacaggtatcagatacatatgttacacatctgacttacaaattttaattacatttattcatttatgtactgtgtgtgtgtgtgtgtgtgtgtgtttgcacgcgcgcacgcatgcatgtggacacatacaaggaagtcaaagaacaacttttgggatttagttctctccttcaggcttgtgatgagctcttttatccactgagacatcttgctggacacattttttttccttctaaataaaggcaaatttgaaagcttataaggcccagcataaaccctgggttatgttatatcctaagggagagttcctgaatctgagaattaagcatctcttatctaaaatgaccatattcagatatgttcagggtttgaaatatttacatagattttgcagaatgagcatctatgattaaaagctctgaaattggggtgggggtggtgaaagtgaccttaattccagcaagttcttggccagcctgagctacacagagagagctcgtcttaataaagtgacatgtcagaaagtctggacaaagtacataagagatttcagattctggagcgtcttggaattcagactaggaaagttctacctccataagtgaaattctcgaccttcttaagataccgaagataaagaatcatccacacatggaaagaaaaggaagagaaaggaggtgggaataggaagtgggaaaacaccattcgctaagcacaaaccattggcctgtgttatagacctgactgcaaatgctactgtcaaaccttcacctgataggtacattaggaaggcattgttaccaatattttaccaaaaaggagagttccccactgtgcctgaaagcaagctgtgttacaacatagcagctccccaccaaaccacatctgctgagtctacaggctgggctgtgcttctgcctgagctgtgcagcagacaatgcctaggcgcctcatgcacgatgcccagcagtgttctctgtcagtttccaggtatacattgccttgcacttggccacagccgcgacagaacgtggtatttgactgtgatgctctccagacagtaatattctttttgttcatgttgctctgttgctgaggcaaaggaagagcaccagaagatttctttagagaaaactcctgagatgacacaggtaggacgcagtaatgtatccgattcattaaactttaggccttcccttgcccttaacagtggcactcagttaacaacagtgagatactattcaacttgaagtgaatttaattaaaaaaaaaaaaaaaaaggaagggtgggagagaaatacctaccgtaaactagggtctgaactgcccaaattcagtaacgcaatattaagcagtgtcccagggacatcctttggtcgaatcttggtatgctgagggatggagtcaggttgtgacagctcccagcgggtcctgatatgaatgatagactgaacaatggcttcacattcttggtgcatgaaggtcagtggtgtgccttggtttgcaatggttagagtgaactggttctcatcaactaggcagatctcttcgatttcagaagcatagtaaatatcatttaaaaagacggattgccccaaaacttttgttctttctgctgaagttacctgaacagcagtagaaccaacctgagaaacggtgtgaggaaggaatagattccagttacacagaattctcagaagctccaaaacccaactcattccccccccacgccatgttagctatgagattatttagtttactttaacacttacttataaatactctcaaaagaaactggatccaacagaaaaaaatcatttttcttttaaaaaaggccaagaattttataaatactgaagggggtaaaactcaccactctgaaaaaccatgatgcaatcaacagaactatgtcgccaggtcctttccattccacacagccaaccactgggcagagttcagtctatagcattttttttttttttttttttgccccttacccaaactaagtaccttaaaaattaatctattttgtgtgtatgagtgtttgcctgcatatatatctctgcttcacatgtgtgcctggtgtcctcgggagccagaagatcccttggaactggagttacagacagttatgacccaccatgcgggctctggggactgaatcctggatctctagaagagcagccagtgctcttaaccactgtgccaccactcaggctttatgagagtgtcttgtaagtgtgcaattttctgtagaaccacaataaagatagaagtcttggtcttcccacatctggatggaactaatattagatatgcaactatgagaacatttgtagagatcacaatataacctggttagtcaggaaaggcaacaaatatttaaaacagaccagaggttaccttaatagaaactttggtgtccttgtgagctaacttgagagcattgtggaaaacctttagatcttcttccaaagccaaggtagcagcagggagtttctgttgctcatgctctatatgttcagccagcttcccaggacagtcgatgaaaatgagccttttgctgcccttgaggccagtcagcagccgctcatggtatttggtatactccctgacccaggagttacagttatagatatagactgcagagacgttgtcataggcaaagccaggaaagacaacaaaccacttagagaggaagtctgttttaaagcgattgctaggcccagtatgggtaaggtccactacaatttcatatggctttgcataatatggctttaaagtcagcaagacatggtatatcagcagatcaccattgatctggccagttttgaacctaaggaaggcaacaaaaaaaggatagattgttaaaatgttctgaatgtacagaatataagtatttttgtttacctttactaattgtgtgtgcatgtcggtgtgagcgtgtgcatgcgtgtggaagccagaagacaacacagcacacccatgggggcaagagtcagctcccctcgctccctaccaggtatgctgtgcagactggatttaggttgtcaggcttataatgacagcatcgtcacctgttgggccatctcactgacccctttgaaaaattttatcgttaatcttttcatatttctagttctgagcttagcctttaatgctgagctatctctctggttctgattaattttctaaagagaacaatgatataaaacaagtcttcaaagtatggatttttttgttttatattttccaggctttaagcaataaggataaagagagaagaaacaaactccttaaaaattatggcaatagcaacaaatctgcctatcaagaaagaagacagtgaaagacactgggtactcctcagagaggccagtggctggaaaagatgctcagaagctgaggccaatccatggagctgaccttgaacagaaggtggctcagcaatgaacacaaagactcaagtcaggacaatgaagccagaggcttaaatcccaggctaaatcatagttcgaattgtgggggtttgagagcttttctccatgtttgtaattaagaaaatacacagccctgggatttgtttgcttgtttattatgtttcaaagacagggtttctctttgtagctatgactatgcaggaattcactttgtaaactcacagagatccacctccctctgcctcccgagtgctgggattaaagggctgcatcattactgctcagccgagggattataaattttatcttgggataggaaggaaaagtcttcctcaaaacccaaagagaaggagctgagaagtgaaaagacagtctggagtttggctataatctgagtcatagataaaattctcccccatggttagatttatccaggctgttcagctgtataagctaatgttccatgttttgattaaaccacattaggtcatacaccacgtccacttggcttgggtcctggaaatctgactggagcagtgaaggaatcaagaaagggctgacacaaatgcacaagcagacaagctggggggaggtgggctgtgtgcactctgatggtgctgcaccaacaactgcagcaagcctaaccctcaggaaatgtattaggtacagcgaggccacctagtcttgacaggagacttctgtaagtgagcagtctccagctttaccgaccagggggaaagagagctgcaattgccaactttggcacacactggtcaactgttggtaaacactcatatttgtacaccctgccaacatcctagggacgagaggacggctctgcagtccttcccagcccaccatgggtgtatgggggtgtgtgagagaagctttgccactgccatggacctgaggcattcaaacaccattcattcctcaggacttgatttggtccttacacattcacccgcagtttcccccgcttccccaggcacacttggctcacaactgaaagagcacaagtaggcacagaaggaagctcggaagagtgctgtgcttgactaactcaggcccactgttccttatgctccattatctctgagttatgataagtatcttcatgtaaaaacttttaatcttgtcaaaaaataaaatgacaagttaaattatttttaaaatgaaacaaacagtttaagattaaaaagaataaatgataaaagacacccccccccaccacttgaggcagctgggagagctggtcatgacagagagtgaactggcaccaccaccagctgcagcacttgggagagcaggccctgcaccttgcctgctcaatatagtagagctggccctcacagagaaggcaggtgggcccgccctgagagggtgagaactggcctgaccctttgctatctgcagcacttgagagagtgggacccatgcctcagctgggctgactctggaggtgtgagtacggataagcctctctgagggcttgcgagcaggagaactgacgctgcctcttgacgacggcagcattaagtgggctagctgcagcagtgctagagagcttgcccctggtggtgtggataaaaaagacctggcatgctgatgagcttagctatcatctaggctcagatccagggctttgagttggcccatccctaaatctttattatctgtgaactgggggagctcatgaaagggacaatcttgttggtccagacctgaaggaactccatgacagagggcaacaatgggatgtctgggaggagtcccaatgagaatccaatactgatggtgtgacagaagccagggacctcagaaagagaccaatgactcattgcaatgaacatttgcaagtgaagatgtgtgaagcacagggatatactgtgggacacactgtgacatactacagcttccatgatgagatgttttctatgctttgttttgtttacttcatttattgtttgttttttattatctttgggagtgaggtttgcaagcgtggagggcaaatacaagggcatgaggagatgggactgtggggtacatgatttgaaactcacagtcaattaaaaagttgaaaaaagctgggcagtggtggcgaatgcctttaatcccagcacttgggaggcagaggcaggcagatttctgagttcgaggccagcgtagtctacagagtgagttccaggacagtcagggttatacagagaaaccttgtctcaaaaacaccaaccaaccaaccaaccaaccaaataaacaaacaaaaagttgaaaaaagaaaaagaaaatacacaggttggctattcctattctgaaaaacactttctgaatgccatcagatgccagggtggacaattcaaacccaatgctcaaaccatagatacactaaagtgcaactttgccttcagttatatgtataaggtacatatgaaacagacgaattttgtgtttagcattcactatccacctaaaatctcattttatgtgtatgtaaatgtgaatattgcaaaatctgaaggaaatctaaacctgcaaatatttggatttaagcactttggacaaattcagcctgcatgatgtagtctatatcactcacaagagaaacaacagaggggaaaaaaacagtgtgacattcaaaagaaggtaagaccaacgtgaaattacaaatatatagggaaaactatgtagatattttaaaaatccagtgtagactctgatagaaggaagtttgagctgaacagaaaagagaagtggggcttgaggagaggtggaaaggaaagagtgtgttctacactaactagagaatgagatccacataggtgagcttacagagatgcagatgtaaacaaaggaaggcaacagccgtgaggggcagaaaggcctcagtgtttgcctgggggtggatatttgtcaagctatgctctgtggactgccagtgtcagagcccactatcctgcttgctggaaatcaactggctggtaccagcacaggcctactaataaaaatgtatgtagagagcatgacactttgctgctttaaaacaatattctcaattttgcaaatattttggaatcacttttgaaaatataggcaacttttttgacttttagtaagaatcaaggaggctgtggcattggtcagttgaccgagtacttgcctagtggatgtatgaaagcttaggtgcaattcctagcgctcagatggatgtggtgataaaagcctgtgatcccagcacatgggagcaaggcaagatgaccataaaggcaaggtcgtcctcagctccatattgagttctaggccagtttcaactccacaagaagctgtttcaggctgctctttattgaaggaaaatggaggagcagtggatctgggaaagaggaggtacggggcagactgaggagaggagggaggggaagctgtggttgggatggactgtgagaggagatttaaaaaaaaaaggaaaaccagcaaaacccaaaaatattcaaagctaccatgggcaacttaataaacttgactcaaaataaaaaggaggggaggtgtgaaagacttggctcagcaggtgctggtcatgcaaacctggtgacatcaaaacctacataaaggtaggcgtagataactgcgatcagtcccagtgacaccataaaaataaataaaaatttaaattatataaattaaaagtggtcatctttttaaggagatgagaaagtgtctaatgatccctggagattagtgtggtgctcattcagaaaaagggaggagatgatcaaagacagcgttagagatgcgtgacatgtgtggggctagtgaggaaacaagcacctcagaaaacctgaagggaggatcgtagtgagacaggatcagaggggatctgctgtgacccaggcttcggtacgatcagcagaaccaaggagatcatcagaggagtctatctgatttcacacaaaaccgtgtaatccatcccggacgaacagacgtgtctaatctgaggcaatgacacaactgcacacaccacaccctacaagcattctctggcccaaattctgctcagatcactgctgcagttcgcagcttgaaacggcagtgatgtgtgtgatcttcctagctgacaaacacctccacggactcggtgatcctcctagctgacaaacacctccaaggaccccacatttatgttttcaaatcagtctgtgatataaaattagaaaagtgattttaatgccacactaaagatgccatcatgtaatttccattgaataatactaatttcaaaagcagatagtaggcataaacaataagccataggtgggagagaaaagggggaaggggaaggaaagaggaaagccctccccattcagggggtggagactggcgctacaaagcctcttgtcatcccattgccagctggacaagtcagtctttgctttccccgtgacatgtagttgagttgcagcggaaaggaaatgtgtcatctgtggtttggttttaagagtggaaagctagctgtacatatcctctttaaaaaaccctgcagatttaagtttcacagtctccaaagtattctacttaaaataagaagagcagaactgaggtggcttacgaagtgacggctgggcgagctctgaaggtaggtagcacatgcggctctcttactcctcccacttataactgttcaggttagtagagaggaagggctttttcaaaggtatatacatatatctaacaatgtagaatcgctatgtgttttctattccactatgaaaaattaagtaaacagcataatcaattagatctaggaaaaatttataattattaatatggaatttaaatcaggatgaggaaggtcttgagtttgtactcaaatgagttgaaaagctttgagttgttgttgttgttttgtttttaaattaaggaaatacattctcattactgcagctgaggaatgacctatctgactaaaaataatgagacaaaaccaaaaccagaaaatcaaaactttgctaagccaacttggcctctggggcataaaatagagatgtaggaacagtttctgttctcaggcaattgtgagcaaagagagagtctgatggtgccaacagcttgtttactagggcatgacagcacatctggctgaagacaaccaacagcagatctattatgttgtcctgtggtacacggctagcgtgtacaacactgtgatgtatacagcactgtgaatgaactaatgtgattaaaatcacctacattaagtcatttaacactgactgcataagtctactctggtaggaaaggacggacacttcttactaaatcaatttaaagtgcttttttttttggtatgtgactgacgtataaagtatcgtgagaatcctaccatccaacttgaagatgaagcggaatactatcgcacaaaagccagtgcagttgatctttaagcatctaccaacagtcataatctcaatagtgatcggaccccagagcactgggggctcccctctccactctgcgtataagatatgaatcaaactgtagtttctaactagcatcatttactatatgctatttttgtctgtgcaacttagcatatctcaactgttaatctcaacttctgtgctttattagcatttcgatattgtcgaatgccagagattataccatagtaaacctccctggctcaagtgtgaccagcagggtggtatctgtactacttaggagtagtttagagacagaatcttaggccctaacctagacctgaaaaaaaaaactcctccacatagtcaagtttgaaagtaacagctataaaacaatcttaacaagacaactacactcattgagtcttagaacagtctagagtttgctcaggctcctctcatttatgctctgaataaaatatttttccaagggtgactctggagaacaggtatagtattataaacacctcatctggtcctggctacccacctttgctcccagaactcaggaggcagaggtaggctgactttttaaagagaagaaacaacttatttctctaaaggtgtagccaaatgtctcttgctaggttagctgcacttggggcagacatgacacccccagagagacctctaagcagatagctgataacaagagctaagaacagaatcttgtcctgacactggcttctaggaagctctgagccccaaactaaactttgtttaaactaaactaaatgtctgggaggaggggtgggacgagggctgagcatgcgcaaccacaaggctgcccctgactgtctcagccttctaatgctacggtgagctgctcacagtcaagcactgtgttcttgggccccaggagcctgatgagtgattccttttaatttttctctataatttcttttgtagatttctgttaaaataagggagaaaaagatgtcagttacaaactgacaataagggtggccacctttatatacctcttgagagcaaagaagtcttttgtttttccgggttctggttgagagaagcactgtgcctctgctattggaaagccatagccagctacagcaacagaggtggaatcagcggtactcacagagttgcatcctaggaccagagtcctcaagctgcttagcatcatgctggaaaggacaaacgcacttcacattctcatttgatgcacacttgctctcaggctccaccaacctccaccctccctctcccacaaaaaaagccacttgttatatcttttaaaacttgaaacgaaactttcaaggccatgttctcctttccttcaagatgaggctgtgcttgtcagagggtggtacttctgtgagaaggagccttcaaagaggaagcacagcacaaaagcagaagcatcggactccaagcccaggtccagggcactcccttaaaaggagaatttgtagagctatggtgcaaggttaaacatggtcaatagatttgtaatgctaacttacagcattacagaatgtacaacaaaagttttcaatttttatgtacaatctaagaacagaaatgaaaattcagttaaaaaacaaaacaacaaattcagttgagaagaatccaataacaaaaggtaggcatggatctctggcgtccttgtgctatctcaagtgcagcctgttaacaacaattactccacgtgccagacactgttcttccacaaactaacaactgatattgctgtcccaacagatagcagtggacctgtaggtatggagcacaaaggacagtacctgcatcttgttttcctgatgacaacagtgtgggcctcgtcgtcttctggaacaagaccaaactacacacacctgtgggctagcagtgtcactgcctcaggttccagtaatcagaatggctccagcagacatccgagtgacaataacacaaaccttgtcactcctgccgtgggtcacaaggtgagcgccacagacaagcctgcatcatctccccctgtgcctttagcttccacatctacactcaagtcctccacgccccatgccttcagaaacagttctccaacagcagagatcaaaagtcagggggaaacgtttaaaaaggaagtctgtgaggagaacaccagcaacacggccatgctaatttgcttaattgtaattgcagtgcttttccttatctgtacctttctatttctatcaactgtggttctggcaaacaaagtctcatctctcaaaaggtcaaagcaagtaggcaagcgccagccgcggagcaacggtgactttctggcaagtagtgggctctggactgctgagtcggacacttggaaaagagcaaaggagctcacaggctccaacctcctattgcaatctcctggtgtgcttacagcagccagggagagaaagcacgaagaaggaactgaaaaactcaactaggctgtgggttggaaagggaaatgcaaagcagcaatgaggaaggcagagttagaaataaagctggctggtggtatttcccatccacgtttgctcagatgatccaaagtctgacatgctctttgtttagcgtcagaccagaaagggagatgtatgcttgctcaaggtttatatctgtttcgtacttcatatttttaagaaagtaaaacaacagcagctaaagaaactaatagaaataacatgaggtaattaaacattcctgttcagcagtgaatgacctctgtctgaatgtacttgaacttggaagagttcttttaagcccttagagccaagcagatgtcaaattcccaatgtgtagaattcaactatgtaacgcaatggtacattctcactggatgagatagaacctgtaccagttgctatcttagtacagctaatattaggctacatctttttacctttacatatggcgtaagacaagactgcttttctattatacataacacattaaaacttaattttgtacaataaatgaaaacagactttagaacaaagctgactatgtatctttcatttatgttgttttagaatatgttataaaaataagaaaaacaacacaaccaaaatagatcagattcactcccacaacagaaggctatgaataaatataaaaatgttttagtgttcaagaataacatctaaagggactggagagatggctcagaagagaggagagcactgactggtcttcaagaggaccctggttcgattcccagcactcacacaagcctcagagctggctgcaactccagttccaagggctcttggcttccttgggaactaggcatacacatggtatacaaacataaatgcatatactattcccaacattttggaagctcaaatcagaggtttctgaggctagcctagcctacacattgagaccctgtcttaagcattaacaacaaaacataacaaatgctttaaagctggttaatgtttagagtctaaggatgctaagtaacttataaatgatcaacttccacttttactctccagagcagcatgaataaaagaaagtgaagtgtgtgtgtgtgtgtatacatttgtgagtacaggtgctcacagaatctagtttattcagtatcactctagagctggagttacaggtgatgttgaaccacctaatgtgagtcctgggaactgaacctgggtctttgcaagagcaggatgtttctttttttttttcttttttttttttaatctacctacctacctatctacctacctatctatctatctacctacctacctatctacctacctacctacctacctatctacctacgaacctacctacctaattacctacctacctatctacctacctacctacctacttacctacctatctgttattcagcattctgcctgcatgtatgcctgcgtgccagaagaagtcactagatctcattacagatggttatgagctactatgctgggaattgaactcaagacctctggttgtgctcttaacctctgagtcatttctccagccctgtatgttcctttgttaaaaatgtaaggatttatttttattttatgtgggtgttttgcctgtatgtatgtctatgcacaatgttcatgcagtgcccttgccagaaaagggtgtcagatcccctggaactagagttacagacagctgtgacttgccaggtgggtgttagacttgggtactctacaagagcagcaaatgcccttaactattaagccatccctctaagcccttaacattttcctcttaattagtgattcatcctggctacacatcagaaccaaataaaaatatcaatgcctaatctcacgccctccacctgattccagttatattgagctgactttcaagtcaagtactgggtgtttcttcctaacttcctagatgatgttacctttttcccccgtataaaagatttatttattatatataagtacactgtagctgtttccagatgcaccagaagaggatgtcagatttcattatggatggttgtgagtctccatgtggttgctgggacttgaacccaggaccttctgatgagcagtcagtgctcttaactgctgagccatctctgcagcccgatggtgttacccttgaccatcacatttacctctgtcaactctgttacttcaaattctgggttacatctttaaatgaactgtgtgttgagaggcacatgaaatcaaattattttctttctatcttttttaatgtgtatgggtattttgcttgcatatgtgtctatgcactacatatgtgtctggtgcccacagaggcaagaagagagcaccagatcctctctaggactggagttacagatggttgtgagcttccatgtgggtgctgggagctgaacttggttgtttggaagaacagtcagtgctcttaactgctgatacaaattttctcatgaatttactactagttttaaaaaaaagttcctctccctaaatgtttagtaaatcataaccagataaagcaaagtgtcgataaaatgaaaattaaagcacagagggcaagcagactttcccctttcacttttactctccagagcatcatgaatgtctttctttctctcacatctcttctggctgctctgccctagtccttttgtggttataaggtctgggggtggagtgaggggttttgtttgttctgtaattcaggctggcctcaaagtcactgtgtgtgatgatctccaacacaccagagagcctcctgctctgcctctaaaatgctgagattacaggcatgcatcattatgccaggctctgcttgtcttcttcaagggtaaaacagacctgattggaaatgacttcagacagttgctcccattttctgcaatcaaagatgaagttgggtggcagacacagaataattcagttatcctcatggagtcaatttaagctaccgatgaaggagtaacactcacatgcacggctcacctgccatgggaggtgtcatcttacccagtgctcacaatgttccaaaacagtaggtttttagaggaggaaatggtgagtgagaaggcactgacttgcctgagacctacacaacattcatttcttctaataagaaatatccctcagaatttacctcagaatagataatttctcaggcaagactccgtcctaaatttttagattatggatccccatgcctggagagtcagggatcagttacaaacatcagctacaagcacttaaagttatatagattgtgtttcaaaatacgctctggtgaaggagcaaactcttagtcattctgtggcatattgcacttcctgtaacggctactgataaacttcctctgctgcacagaagccgtctcagtgcgctggagaccaccgttaatccgcactgaaacacccctttgctctctcagccaaatcaccaacatgtcctgttagaacaagaatttacattctgcgaaagaagttcacaggtaagcacacctggacacaggccctctgatttctgatttcagttttgcttatttattttaaaaactaaaacagtattagtgtttcatacttagttgaattcagctctcaacagtttaaagatgtctacagaaagtttctgtggtcctgctgtgcagaattttataaatttatactcagggttgatactgtctgaaagatttttatcaagattttaatattatcagccctttgaagtttactcagtcaaaatatttgttaaatcactttaataattttaagtaaggcaagagttaaaaataaaattaaattctacaggctttgactaaatttacaatctctaaaatattgtttaaaaaattctcaagctggggcagagcctgccccacatgtataaggcctggggtttggcctggcattgtaaacagagaggggacagagtctaagttactttctacacagactgtctattcctatagatttagattatctcatcagtattttccccactatttagaaagaaaaaaaaaaaaaaagtcagtgcttttacatgcagcccaggccggcttctaactcagatctttctgtctccaacacacaagttactaggattaaaagcattcactaccattactggcataaattatttttgtctaacactttagtttataaaccatcaatggtcaccttcgttttaacttaaagagaaattaaattagatgtcatttttgtataaaataaattttatatttaagtaataattatgacatatattatgtcattttaaaagttccataaggccggacatggtggcgcatgcctttaatcccagcactcaggaggcagaggcaggtggatttctgagttcgaggccagcctggtctacaaagtgagttccaggacagtcagagctatacagaaaaaccctgtctcgaaaaaaccaaaaaaaaaaaaaaaaaataaggtaaaagttccataaggaaaaaatattatgataaagtgggtatgtgcatattcacatgtgtgcttatgccacatactctgagctgacctgttagtgaagaatatgaacagaaagaaacattcacagaaagaacgttttgtaaaaacttgttggtatatacaaaagatacttgccttgtgactaaatggaacaattacataaaataaataaaaatgcactgagcttccaaagacctgcaatcccaaagaaaaataatttggaagtgggttaggtcctattttaacactttatcaacataacttttctttatagcatcctggtttaattaattaattaaagtcctggaactctgtaatcaggctggccttgaactcacagagagatctgcctggctctgcctaggcctctgcctctctgcctctcctctgcctttcttgttcataattctacaaaggctccagcatgtagcagaagtccaaggctcagggcagcatggtttcatactgtgccaccactagggctgtgacagcttgtcaagttaaccaagttctctctctctctctttcttttttttttaaaacttggaagatgaaaatacaaccacctaggtcatgcaaataaatcttattactcaggaattttctggtgttcagcaatggtagctatttttactgataaaaaatggccataaaatactacttgtaatttgagattgatttccttttctggtttcttcctactatggttttaaaatctcactagtttagagacagcactagtactatgtgcctacctcttatatgtgtactataatttacttgttgcttttgattttggtttttggggacagggtctccctacaatataaccttggttagcctggaacccacaagcagacctggttggcctctaactctaagacctccctgcctctgcctccagaaatggaggtataagcttccacacccagctatacttatttttcttatatcaaaataactgaaagatctaattttgtttgtttatttgagacaggttatcactatctagccttggctggtttgggcctccttaagtagaccaggctggcctcaaattcacagagatccatttacctctacttccagtgctggaattaaaggcctaagacaccatgcacagttcaaagacaaactctgacataactatctacacttaccttttttccctaaggaatgttttcctaagttcatcaattccttattaaaatgatatgtatttcttatgatagccaattgaacagcattaatttttcttaggtaattttgtggtaatggggaccaaactcagggccatgtgcatggcaggcaatcactgtagccctggcagtatgcgacaggccaccatgagttccgatctcattgtctcggtgcatacgaagtcactaaaaatatgtacattttccctttaaaaaaacaaaaaacaaaaacaaacaaacaaacaaaaaaaaaaacaaagaaccaaaatgcagatttaaacctcagaatttaaatagagagaagtattgctataataaggttgagaaatctagctttccctgagcaggagagtaaaggctttctaagaaaggtcctacatagactgttcctaggtctctgtggttgtcagggttacctctgggttgtggcagggcagtgagggtaggggaagctgaatggagcctggattgaggactggtcatgtagcctctgtcctggatggtcagctctttgttaattcttgttcccacatacaggccaatgacaggaaatgacaattctcaacaatcctctttacctatgtccattcattcattttctctctcaagagcaagagctctaccactgagctaagtccccagcacccccacccccatctctaactgcatttgacctacttcagtcttctttagtaacttcctgatagttaataagcaactaccatttccaattatttctttttcttcaatatcttttctaatcaactgatcctttcccacatatctagtgcatcctaaaccttttttttttataatttcttgttagtgctcctttttataaaagaaaaaaaatacttattcccattctttctattctaaattttaatcccctttttatcccctgccccaaatcagctgaccatcatctttctctgcagaaacagtgtccatttaggaatgtacaagttacaaagttggcaagtatgttgaataagcttgcatgttacagtaacagaaacagcttcattaaatctgaaaagagtcaggcttcctgtcccccaaaattattaaatccaaaatgtcttctttttgtcttgatgcttctctagagtatgcagagctgctagagtgagattctaagaggttctagtactctcctgtggcagatcctaggagggtacatgacagaaatgatgagcaggggaatgttggatgctattttaaaagtgggttttgcttttactactgctgacaagtggaagcatcaccctgaagcctctagcttcctactgacatcagaggtgatgaaccaatcaaagctgatcttacaaaccacactgggttttataattcggttcctgtgttagctggttccttctctgtttcctttttcagctaactaaaaagaggaaccatatggtttctttattttaagcaaagtcacaaaagaggaaacatttttagttggagacaattctatatcttctgttgctttggaaagcattttctaaaaacatttacaaaagaaaactttgaacaccattttctaaccaaagctttttgggtaagtaacctataaaattactgtgtggaacgataggaatgatgaccatctagagatgagtcagaccctcatatccacgccaaaaatttcaatgtttccctaaaaaaaccttaaaagatggataaaacacagaatttaactaagttttctttgtattatggtagaaggcttaacagaaagtcaaagtgagacagtaaagaaccaagaggccagcgcagattaaatatttactgagcaactaaaatgaaaggcatggagaatcgacgttagaaaacctgaaacggagggagaacagacacaaatcagactttagaatcacatggtacaacctcatgctgtcactaacagccacaacccagacaagctgctcaactcattttaatttgcttctgtgaaggttaaatgaaataagtatgtaagtctcaaatttatcgaatactcttatatttttggttgtgagcctaccctttaacggctgagccatctctctagcccatttatagcatactctatagaggtattttcttcctttgttttttcctacctttgtggaattgttttttaaaataatctcgtttaaggcaatggggataataatagaaaatgtgcaaacaacataataaaaacaaccattcaggtgggaagaagcaggaatgaggcacatccacaaagtagggccaaagaaaccagcaggacagcaggccgaggatgcccaggggaagctatctgtgcctgtggtcagtcagagaactgggtttatgaaggggaatttaaattgaggtctacaagatgaagacaggttcagacatatagtcagcagaaaaaaggattagggaaaaaaagaaaacactaaaggcagcaaaatggcataatttaatgtgtttaggaagtattcaaggaagctaaagcttggtttgtaaggttttctccagacagagatgtgtatccttgtgtgaagtagcaaccaggtcatgcatggttcaagggtaactaacctgcaccaggcaaggggcttcagagagctattttacagtttaggcttcaagcatgagagagaaaatataaagaagaaacagactagaaaaaaacattatcttttcttgtaagtctaggtcctctggctcaagcatgtgatctcagcaatcatggatcttagcaaggccaacctgggctaaactgggcgagtgtcttaaaacataaaacaaacaaacaaacaaacaaacaagagagagaatgaacaagaagggtgtcatttgtcatcatcattctactatgctagtggtaactgggtaaagaaatacaaactactcaaactgtcaaaaccttctattgcatcttcagagtcctggaaaaatgaatttcttatcatacacagaaactagtatctaacagtctgagcttgtccctccttcacgttaagagacagctcagctctctcagagagagacactatgcttggggatgtccagaagagcccattatcctcagcactgacaatgtcactttagagcgtgaggctactgaaaacaacacacataggtgacctcacacactgagttaagtggacagtatcagccggaacttcggaacttaagccttcaaagtttcaccatctatgacatcccgcagaaagatagctgtcaagcctatgctgagccttgcccaggtgcccgtgcacactgtctaagctgggagacagatgtgtttaactagctctttatagtattctaagatttaaatctgcttcaatatctctggaaaacctttccaaagttcccccttgccaagttaactcctctgttcatctactaagtatgaggaaacatcaaattattttcaagacagggtttctctttgttgccctggctgtactggaactccctatgcataccaggctcgcttcaaactcacagagattacttgcctctgctgggattaaaggtgtgaaccaccacacctggctgagattactttttacctgctaatttttaccgtaagagtttaaaacacttgaaagcaacttaatttttttaaatttatcaaatctagactagggtctgatgtgcaaaggtggttgtccagtatcagaatgagagcagtaatgggcttgcttatttgaccaactgggctagagagacttgaatcactttaggattttcttggtttttgttttttcttttagattgtatttttaactttcattctgtgtatgtgttcatgtgtgagtgtgtgtacacgagtgtgatgccatacagaccagaggtgtgaggtccccttgggactagatctactgaatttgctgattatgaaatatatatatatatatatacatacatatatatatgtatatatatgtgtgtgtgtgtatatatatatatatgtgtatatatatatatatatatataaaacatgcccactaagacatgatacaaatggactcagaacaaaggaggttcaggttgcacaggtttggtagttatagcagaagggtgagagtggacacttacagaactagaacaaagaaaaatgaaaggtagagagagattggatgctgagtgtctatatttaggagacaggagcaaaaaagatctaactgaagtggtgcaaaggaaaaactgtaatacaagggttactgaaatactggcgagggactagtcggtaaggtcaaatttggtgaggagagagagagagagaaagaacataaaggcaatagtgtaaggcactgtggtcaccagtgctctctctgcaaggcagaccactttatttctgggaacagacagcgaacaggcatcaggttgagcctgcacactcaagacaatatgaaatgaaggagtagaagctgaggaacctagaggggctgcaaggttaaacagattttataaaagaattaagattacttctcaggaactccagatgctatactataaaccggagcatcacattgtgtcaagtagaaactagaatgaaatttaaccaaatgcctaatcactgtatgtcagacactgtaatgaagagtccaatgtaactagacgccaggtgatagctaaccatatttctttttctttcattgtgaaatcactggtaaggagaaaacatctgaaatggaattcaagtatctggtcttcattgtgctttgtcaatacctggacaatacgtttttctcagagacagaagcaattacaacagagcagcaatcactgtctactttaatcacaccgtcgttatatgttacaactgattctcaaaacacagcagggaatgctttgagtcagacaacaagattcaagaacatttcttctggacagcaagcatcacctgcccaaatcactcctgaacaagcaacaccagctgtttatgtctcttcaagcccacttacttataacattaccagacaagcagaatcagcggtcaacaactccttgcctcaaacatcaccatctgggttcactttgaccaatcagccatcaccttctacctataattctactggacaaccaccaaaacatcttgtctatacttccacacaacagccaccatcacctgctcctacctcttctggaaaaccagaagtagagtctactcataatcagcccacaaaatcaacaccaactatttatttacaaagggacacaccaccaccaccaccaccaccactcacttcagaaccaccaagtggcaaaggaactgctcataaaaacaaccacaatgcaattgctgccatattaatcggtactattataatttctatgttggtagctatactcatgattatactgtggaaatacttgaggaagccagtcttaaatgatcaaaactgggcaggtaggtctccatttgctgatggagaaacaccagaaatgtgtatggataacatcagagagagtgaggcatccacaaagcgtgcatcagttgtctcacttatgacctggaaaccaagtaaaagcacactgctagcagatgatttagaagttaagttgtttgaatcaagtgaacacattaatgataccagcaacctcaagactgataatgtagaagttcaaataaatggcttatcagaagacagtgctgatgggtcaacagttggtacagccgtgtcttcagatgatgcagatctggccctgccacctccccttcttgatttggatgagaacctaccaaacaagcccacagtgacagttgtatctcctttaccaaatgattctatcaatccccaaccatctccagatggtctaaatcaagtgtgtgaagaacagcattccaagatccaagagccattcccgccaccccctgactcatttaatgtgcctctgtcagcaggagattttataaacaatcaagagtcggcccacgaggctcaatgccaggagttctctactcctgacctccatccagacctcacagactccctgccacctccacctacagagctgctgtaaagtgacagctggctttctagactgccctccatcctgagatggcaccgacacgttcctgtcttcgtggtatggcacacaggacatgacacctggcacctgagagactctttagggactacctgacccctgactgaagcccacgtacacgggtagattattacagtggtatgcttaccagctacagaagtaatttttaaatcagagtgccttttatatatgttaatgatagatatttcaataacttaatcactttggaaacatatgatctacatatacttattattacccaatagatttcccccgaaaagctgtatataaacatatcttaaataaataaaattctattttttccacctcaaaatttggggtataataaaaatggaaatttttaaatggtcaaagttttaatacttcaaatattaagtaaatattttcatttatagagattaaacacacagctaccaaactgtattaaaacatgaagtctgagtgctgtgtttgggatacatttaccctgaaaaagtgagcacttaccataaaattttcttttttctttataattaaaaattttatgtatataagagttttgcctgaatatgtgtgtatatattcatatagtcacacacacacacatatatataagacagaagatggcactactaacatttgccaatgccccgtgagtcctggaactgactccaagtcctctgtaagtgctcttaaccaccgagcccctgcaactccgttcttcccctcctcttcctcctcctcctcttcctcctcctcttcctcttcaaatgtttggggcgtgggggtggaggtcaaagagataggctgtatttggggttagaagatgacttgtgggagttgatttttttcttccacctcaaggataaaattcagaactcaagtcatgagacctgacagcaagcaacctttatcctctaagcccatctcactgcccccaaaatgtaaacatttttctaaaatgttagggaagcataaactaaccacttagacaaaaatcaaatgatatggaagacgggagaaaaaaatagaagtgggctgtatctgtgtgtctcttcccacacatgcatgataccagcctgtgtgagggtgtctgtggagaccacagaggataccagccatcctggaactgaagtcccaggaagttatgagctgctgtctaacacgggtactgggaactgaacttgggtcctataggacagcagcaagttctctaaagtactgacccatcactgcagccccagcctccttttgtaaatgcaggaatgtaatcatcacctgaaggttgttgagtatgaggcactcagaacagaagtgggcacaacttttgttaaagtggaggcggcagtgggtactggcctaccttttgcagatgtcaaatgttcatctgcccaacaagccatccttctcttattattattacaagtccaagaaaggacagttgcttagagcacagattttggcacttttcaagatagtatatagtatttattggtaacattaatgttcaaatactaaaaatcccatgtagaataaaaacaagaaggttctcgggcagtggagttttactactactgctactattactactacatactactactattatttagtatataattatcaataaacaattattatacatattataaatacatgtaaatttattattgttgttgtttgtgttctgagacaggagtcctctggtagccctggctgtcctggcactctctctctatagacccactgtcctcaaactcacagatacacctgcctctgtctcccaatctttgtgattaacggtgtgacctttaaacaccttaaaagacactgggcttaagtgttattttacatacaatacttaccttacttcttacaagccacctcttactgataacactttttttatctacagaaacacctacttcaagcatgatggcgtttcattttattacattggttcttttctgtcattcacaataaaatttctcacgtgtcttcaaatatgattttaaggctaatttacattgcagcagtcactgaggaattttgagaatttcttgtatttaagtattagagtaattagatgtagcagcttgaatgccaatcatccaactcctctcatatcacttgtggaactaaaaggctctttccaaagttgttcctttcagcacctcacttactgacctcttgaaaaaatgggtattgagaaatacctcctagacaggacagtagccaatggaggagctggagagacaactgaatggatatttggaaaaatgaaaattggatccacatttcacatttagaatagacattaagtagacaagatataaatagcatagagtggacacaatacaagaagatgctgctgaacccctttataatccaaacatgggcaaacatcttcctagctgaggctcaaagtctagaagcaacaaaaacaaaagagaaaattttcaaatgtcaaaaccaaaatataactcagtattaaaaagtcaaaagacaaacacaagacaattgagatattttaaataaagacaaagtactaatacctataaatgttaagaaagttcttaaagatggataacagaaatggatagtggacagtaaaaataaaacaacagaattttataaaacataaacacatccagagaagaaaaaatatacatggattattcttgaaaatatacataaaggccagaaatggtggcatacacctctaatcacagcactcagagccagagacaggtgagtctctgaggctagcctgatctacagagtgagttccagggcatccaggactacatagaaaaaccctatctcaaaaagacaaaaagaagttttaaaaaagttactggcaaaatatgaaactcttcaagcacgaggatcagagcatgtcattattggcaataatggaagtatggggacaagtcagaccaaaacaactaaggtatattccccaaggcaacaagaaatgaatgagacaaacccacgtctctttaaatagagttatctttaaaatgaactaataagaaaaacagaatacgatatagaacaattcatcacacaaacttttacatgagaagacaaaaacatataatatacacatacatattttaatcttttttttttttaaagaattaagatgtaactgcaagcaaatgaattgaaagcagttcttctccacaccaataggagcaaaaaaaaaaaaaaaaaaaaaaaagactggaggggtcaaaccagagtagcacaagtcctctatatacacagttacagtattctgactaatcagccataaaaacggaaaagtagctgaagaaaattaatttaacattacgccatgtttatgacaaacagaaaagaatgacttcaaataattctgggtacaaaactgactgtccctcctcaatgaaagatactccagaaccatgacaggtctgtcatcttgctgcattcatgtgactgtccttttcagcctgctcttccataagacaaataagcagttaggtcaatgttgttaggaacactatgggaaaaccagggatataataacaatgtcaaacattcccagaaagcaagtagataagtcaggaacactctagagaggctgaaggggactcactggctcagggggtaaaagcactcgctgtcaaactggaagacaagtttgattccagggacccatatacatggtgcaaggagaaaactgatttccaagatgttctctcacctccacatgtacatcatggcactcacattacacagacagacagacacagacacacacacagtttttaaaaatgaaaggcattttctagttccatccatttgcctgcaaaactcattcttaatagctgagtagtattccattgtgcaaatgaaccacattttctgtattcatttttctgtcatgggtcatcagggttgtttctaggttctggcgatcacaaacaaggctgctatgaacatagtggaacatgtgcccctgtggcatggtggggcatcttttgggtatattcccaagagtgggattgctgggtttttaggtagatctatttccaattttctgaggaaccaattatcatcctgagtgagataactcagatccaaaaggacatgcatggtatgcattcactaataaatgtatattatccaaataataataataataataataataataataataataataatagcagcaagtatttaagtacagcatacccaagatacagtccaaggaattcaaaaaggtcaacaagctgaaggacccaagtgaggatgcctcagtcccacttgggagggagaagaaagcaaccacaaagggggagggaggggcctgagagagaaaaggggtggtggggaggggaacatgatctggtattgggtgggggaaaaggacttaaatcctgagggccagcagaaagaatggaaacaggcaacctcagaagataggaggttggggggaggggattcttcagaacgtaccagagacctgggaggtgagagactctcaggactcaaagagagggaccttagatgaaatgccctacattgggaagagggaacttgtagagcccacttccagcagaaagacagggcatccagtgaagaatggggaatggggttgccatcgcacagtcaaaactctgacccataattgttcctgtctgaaagaactgcaggaatggaaatggaggggaacctgaggaaaaggaggtccagtgacaggcccaaagtgggatccaactcaaggggaggccctaagacctcccctgacactattactgaggctatggaatgctcataaaaagggacctatcatgactgacctctgaaagacccaacaagcagctgaaaaagtcagatgcagatttttgccccaaaccagtgaacagaagctgctgacccctgtggttgaattaggggtaagcttgaagagctgaggaggaggcaactcatttggaggaccagcagtctcaattaacctggatccctgagctctctcagacactgagccaccaaccaggcagcatacacccgctgatctgaggctcccaacacacatacagcagaggactgcttgctttgggtttagtcagagaagatgcacctaaccctcaagagactggaggccccagggagtttagaggtatggtggggtgagggtggggacatcctcgtggagatgggggtgggggtatggaggaagtataggatgtggaacagttggaggatggactgggagggaaataaaatctggagtttaaaataaataaataaataaataaataaataaaagatttaaaacatggaaaggcgaaagttgagaataaagtaaaaaaaatttttttgttaaagatggtaaaatgacttgaatgttgatacagttctgttttgtcagttcttctatgcttcaacaacactttagttcatactattattctgttgttgtcagcaggaaattcagtaaaaaggtaactgtgttaaagactatacaatcctaatctaaaatctacaatcttctgagtgctcaaaaatttgggggagttgagatcacccaaagaatactctcaatagacatgtatgtatacgtatctgtaaacgtatcttaataattccaagcttggaaataattctggtttcaggcattttagaaaagggatgctgagggtggaaagatggctcagtggttgagaaaattttcttttatttctcttccaggagacctgagttcctaggtttgactcccagtgcccacaagacatctcacaaccttttgtatatagagtcccaggtgatgtaatgccatcttctgaccttagctagcaatagtcacacatgtattgcacagaaatacatgcaggtaaggcattcacgcaatacaataataaaacaaataaaacttaaaaatagggatacagaacttgtatcaatatcagtactttggctcacaattaattacaggaacaatcagtttgatcaattcaagaataaaggtggttgaagagatggctcagcagttaagagcactggctgctcttccagaggaccagggttcaattctcagcaagcacatggcagatcacaactgcctgtaattccagtttcagagaatcttacaacttcatgcagacatacatgcaaagaaaacatcaatgcataagaaataaaaaataaatgaattatttttgtaaaaagtaaactgcatggtactggtacagtgacagacaggtaggtcaatggaacagaattgaagacccagaaatgaacccacacacctatggtcacttgctctttgacaaaggagctaaatccatccagtggaaagaagatagcatcttcaacaaaaggtgctggctcaactggaggttatcatgtagaagaatgcaaactgatccattcttatctctttgtacaaagctcaagtctaagtggatcaaagaactccacataaaaccagagacactgaaacttatagaagttggactccagaaaactaaacaaccctattaaaaaaaaaataagggtcagagataaacaaagatttctcaactgaggaataccaaatggctgagaagcacctaaaaaaatgttcaacatccttaatcatcagggaaatgcaaatcaaaacaaccctaagattccacggcacaccagtcagaatggctaagatcaaaaactcaggtgacagcagatgctggtgaggacgtggagaaagaggaacactcttccattgctggtggaactgcaagctggtacaaccactctggaaatcagtttagcggttcctcagaaaattggacataattctaccggaagatccagcaatatcactcctgggcatatacccagaagatgctctaacatgtaataaggacatgtgctccactatgttcatagcagccttatttataatagccagaagctggaaagaacctagatatccttcaacagaggaatggatacagaaaatgtggtatatttacacaacagattactactcagctattaaaaacaattaatttatgaaattcatagacaaatgtatagatctggaggattgtgaggtaacacaatcacaaaagaacacacatgatatacactcactgataagtggatattagcccagaagctcagaaactttcttagaaggaggaacaaaatacccatggaaggagttacagagacaaagttcagagcagagactgaaggaatgaccatccagagactgccccacttggggatccaccccataaacaaccaccaaactcacagatactatggcagatgccaacaagagactgctgacaggagcctaatatagctgtctcctgaggggctctgccagtgactggcaaatacagaagtggatgctcacaatcatccattggatggagcacaaggtccccaatgaaggagctagagaaagtacccaaggagctaaaggggtctgaagccccataggaggaacatcaatatgaactaaccagtacccccagagctccttggaactaaaccaccaatcaaagaaaacacatggtggaacttgtggctctagctgtagatgtagcagagaatggcctagtcggtcatcaatgggagaagaggccctaggtcctgttctatgccctagtataggggaatgccaggaccaggaatgggagtgggtgggttggggagcagggggaagggggtggggagagggaataggtgattttcagaggggaaactaggaaagaggtaacatttgaaatgcaaataaagaaaatatctaataaaaatattaaaaaaaaaataaattgagggctggtgagatgactcagcagggaagagcactgactgctcttcggaaggtcctcagttcaaatcccagcaaccacatggtggctcacaaccatcagtaatgagatctgaagccctcttctggtgtgtctaaagacagctacaatgtacttacatataataataaataaatctttgggccagagagagtggggctggagtgagcagaagtcgtgagttcaattcccagcaaccacatgatagctcacaaccatctgtacagctactgtgtactcatatacattaaataaataaatctttttaaaaagtaaattgattaaaaaaaaagaatgaaggtccactggagtggttactacctactatgcaggtatataagcgcataacttaggctgcattgacagctgcacactgagccgcccctctacccttgagcatcccccctttccaaactgcttgagacagaagcatttcctgctaatggactattgtacaacaacttccaagcttggacagatacatgtacatacacacatgtctatagttactactacagcaggaggtttgctgtgtcacaatgctagagcaatatatccttggatacaaaagaaatgtcaacttgattaatgcttaatctaaaccagttgcctaaatagatataatttgtgaagttggtgaacctatctaaattataattaatgcttctgtatagcatctaagataagtggtaacaaatacttgtcttttacaaatgattctttagtcccagcacttgggaggcaaagttgaggctagcctggtctataggacatgtctcaaaaacaaaacaaccaaaaaagcataatatagtatttaattttctcagagcctttaacagcattacaattgctacatttgaaatacactgaaatgacaacctctttttctttttgagtacccatggtcatctttagtacaaaataaatttgaaatgaaaaacattatatgcatagcagaatccgatcctaatgtgtgtggacagtgctgaggggaggttattaaacccttagagcaagagctgatggccttaaggccactgggggtgagctctgaccattagaacttggttttgcttctcatttaccactggatatgacctgatcctgtgccagcgaccaagctactccagtgcccatgtcttccctgccatgagcaactcctctttctgcagttgcttctgtcagagattttgttacagtgctagcaaaaagtctctgatacagactaagcttgaattaattttgaaacaattaactaattatttttttctttcaaatgacggtacttatcagtgtaattcacataggtaattccacttctataatggtagaatgagtcttcctaagagagattttaaggcttggcaaattgatccttagtcctatctgtattggtggatacatgagctgacatgaaatgctaactgtcaaaagcaaaccattctcacccccaaaacaaattgaacgtagtacttcaaacattattttcagggatcatgattgatgatgaaattctgaaacccatacacagaatctaaagtccaaatgaacactcaacgtaaagcggtaataaagccctgaaccaatagcagtcactaatggtgcagactgcttaaatgtaggtcctttttgaggaacactagttttacctagaaggtgactcctacaagatagttctgttctaagaagataagctatagatttcaattccatcaattcctttttagatacaaataaaactacagcccatgagatttagcaggagacaatacaaggtattacttaaaatgtaatatactaataattgctggtttttatatggtgacaatttcataataagtatgtcttaattttctccttttctttcctatgataagtggtcattttgtaatataggtttgagtttcaagtgattatttatctagtttacttaaaataccatgaatctagtcatattttacaaaaattttgattatagtttcatcttttacaaacattgttacatatatttttaagtctattgactttctgggaaagataacatataaatatgaaacactaaataaacaattggaaagtaatagtttttatttattttgtttattttggttttttgaggtagcatttctccatgtagccctggctgtcttggactcgctgtagaccaggctggcctcggatgtgtagagatttccctgcttctgtcacctgagtgctgggactaaagctgagcaccgccatggccagcattttattttatattttcagacagggtctcatctattctaggctggccttgagcttgctgtgtagtcaaagctgggcttcaattcctggccttcttacttccacctgctgaatgctaggattaaaggtgtgtgttgccactccagctttgatactgctattcataaaaataaaattatcttttgttcagacccaacaatacctctggagaaagcaatactctatccataccatccaaaacaagtttcatggaagaaaaaaaatagcaaaatcaaaaccaaacaactccatctaactcaaatacataaaatgtaaacaattattttaccatttgactggtaattaaaagtagaacattaaaatagaagaaacaaaacaaaatatctagtatctactggttatggtagtgcacatctttaattctagcagtgagaaacagaagtaggaagatctctgtgagttccaggccagccaggaagacacagtgaaacgtattttaggctggtgttgttttatagtccagcatccttattttacatgtggcttgttcttatttgatcactgtcactaaggcaggactgtgtgcatgtgctggggaaggagactgtgacgacaacgcagctggcctgtgtgcagcattagtcaaacgatcttttgtatcaggaaggcaaaaacaaagtaatcatattgagtattcctgtgcttcctaaaaggtaagatgaaacacgtaattgactgataaattcgaaaagctaattaaatataataatagtagccacgatggaggaagacataaaaatcaagatttctatcatgacatacatatgaaaaggttacgagacaatttaactgtttttgaaaagaacataaaaatgcggagattaaaaatagttcaatgaatatcctggaaatcaattcacaaagaacatttttcaacacatagaaagaatgtagaggctttaagaaaaattacagcaagcaaatgttaaatgtgcaacctaaactcagagaaatacacagaagtaaagcccagccctaatttgcatgaagtattctacccgacagagaactgaagctatgtaaggcactctctgggctgtaaattaaaaaaaaaaaaaaaaaaaaagaaaaagaaaaagaaaaaaaaaagtccattttgttgcgtatgcacctcttgcaataaatttgagtcagcaccaatgacagctctgcagtcctcctatgtggtgctgatcaggtggttgcagagcttcggctcacagcaacacaatgcagctgagctggcaagcagagcccacagccagaaacccttccgactcccacaacaagacgacctttaagctgcaagtttcccggagaaaatgagatactgatagtgaagacgacattatggtaagcagttgtttaaattggtaaaagacggattttgaattttttccttttctttagctttttttttttttaaagctaatgttaggattgaatatattcaataacaagtgcatgcaccaaaatctgctgcagtaatagccgaggttttcattttaatgtccactcactttgtaaatacatatattgtttttcctttaaaattggtactgaaatataagggaaaaaatcattttacaaatgtacgctatcgggcttgatttttccaagttcattaaaacgttttttaccaggatatagttatccatgagaagatgaaatttcaaaaactgttttaatctgttttaacatctcaaactacaaacatattgtgtcttataatactgcagagatttaagaaaaacagacatgacagccattttttttctgaatcaaaaacattatcaaaaatagtaacagcctaagtaagcctataaaactcctcatttgcagacagtgccattctatcatataaaggctccgagaagataaataagatgaatatactaaaggataaaaataaagagaaaatgtaggagagtctctctctctctctctctctctctctctctctctctctctctctctctgcctttctgtctgtctgtctctctcccccccagttcccccacccccacccaccacatagccccaattgaaggattaggcatttggactataaatgaagggcagctttgttagtttaatcactggaacaattataaaaggactcaacaacaaggaggtttattgaaaattttgccgaatgctaactgacccatgcagatgctgagagtgaatttgcatattaaaagaaggatgtatctgtttgttttcaggctttgatggaatatcagatactgaaaatgtcttcctgcctgttcatccttctgtttctcacgcctggcatcttatgcatttgtcctctccagtgtacatgcacagagaggcacaggcatgtggactgttcaggcagaaacttgactacattaccacctggactgcaggagaacattatacatttaaacctgtcttataaccactttactgatctgcataaccagttaaccccatataccaatctgagaaccctggatatttcaaacaacaggcttgaaagtctgcctgctcagttacctcggtctctctggaacatgtctgctgctaacaacaatattaaacttcttgacaaatctgatactgcttatcagtggaaccttaaatacctggatgtttctaagaatatgctggaaaaggttgttctcattaaaaataccctaagaagtctcgaggttcttaacctcagcagtaacaagctttggacagttccaaccaacatgccttccaaactgcatatcgtggacctgtctaataactcactgacacaaatccttccagggacattaataaacctgacaaatctcacacatctttacctgcacaacaataaattcacattcattccagaacagtcttttgaccaacttttgcagttgcaagagataactcttcataataacaggtggtcatgtgaccataaacaaaacattacttacttattgaagtgggtgatggaaacgaaagcccatgtgatagggactccttgttctaagcaagtatcctctctaaaggaacagagcatgtaccccacacctcctgggtttacctcaagcttatttactatgagtgagatgcagacagtggacaccattaactctttgagtatggtaactcaacccaaagtgaccaaaacacccaaacaatatcgaggaaaggaaaccacatttggtgtcactctaagcaaagataccacttttagtagcactgatagggctgtggtggcctacccagaagacacacccacagaaatgaccaattcccatgaagcagcagctgcaactctaactattcacctccaggatggaatgagttcaaatgcaagcctcaccagtgcaacaaagtcacccccaagccccgtgaccctcagcatagctcgtggcatgccaaataacttctctgaaatgcctcgacaaagcacaaccctcaacttacggagggaagaaaccactgcaaatggaaacactcggccaccttctgcggctagtgcttggaaagtaaatgcctcgctccttttaatgctcaatgctgtggtcatgctggcaggctgagggtctgcagtttctgaaacgaaggagaaccttcctccatgatgtacagttgggaaaacgtgcccctatctaaccagtgattcaagctatattatgtattcaagaaagccagtcttatatttctgactttgatgtaaatgaagtaatttgtcttaattaaaagaagtgcacaatgtcttggtacttgctgctattttcctgtcttaagtaaaactaatgacttttttttttaatgaaatgttttctttttaaggcttcaacttattgcacaaactataaagagcatctaaactttaatatgtattttatgtatgtttacactgtcaaatgtctgggacaaaataaaaggcctatgctcctggctgtgtcacgtggtctctagacattatcacagcttttgctgtagggaagatgaagtctgtaaggtgaatgaaacgtgagccactcaaaagggttttgccacttaagtgaaaccaaggctgtcactgtaaataaatgctcacaccacatcattgttttacacacaagacagaactacttccaatctaaacaatgtcctgcttctgagggactcttgctagtctgcagattatataatggacaactgctcttcaaaaggctaggaggctcttagcttggcatcttaacagggaaaatttaactttgctttgcatttaagaaaagtataaaaaacaaaagaataaaaagtttccatttaaggacttgttaaagagttttcttgtatatttaattgatcattcattaatcaaagttaaatatttacagagttaaagtcatactgctactgtaatgagaaatttgtctcttataagaccagaaattataatttgatcttccaaatttaaaataagattagcttggggctaaaaccatggagtctaacagtttgggtcactctgagggagactgtgggatggagagaagcgaggagtgggtggtattccttcagtcctacaaccatggaatttctaataaagtagactgacaacaaagctaggcaggggacagagtagacattccaagtcaactgcaccgggatccagttagaataaagtaccaagaattttggacaaaatataaaagtacttcatataatgaattagcaatcaacataagatgacttaactaaattaatgtgtaaactacaatatccaaaggtggtaagctacaaaggaggcactcatttttgtgagatacaaaaaaagaatataacttcaagcatttctaaatttggggagagtgaagaagttgtgttttttcttaaaaattaaaaaaatccatatagtcttctttcttgggttaaaagttcaattgcctcctgccctgcctgtgtgtatgtgtgcgggatgtatgcacgtaagattggaagtatctgttacctttctccattgctctttgctttactggcctgagacatggtttctcactgaaataaagcttgctgttttggccaggctaggtgggctgtgagctcttggatctgtctgttatcaccctaattccaacgcacatgcagccatgcctcattttttttttttaacatggatgctggggacttcaattccaatcctcatgcttgaagagcaaggattcttacccaatgagccatcttctcagccatgtaaaacacctctacccagaaagtaacattctaccaaactcctcttctccataccttttttgctgttgtcatgagtcagggtctcactgtatagcactggctggcttgaaactccctgtgtacaccagactagtttcctactcctagagatccacctgcctctgcctccaagtgctgagattaaaacgcaagcactgccaggcctgtcctaaacatttctcttttttttaaaaggcttaagctcatgaaaaattagttatatttttaataaaaatgcattcttataatgtctctatagtagttttgagtattttctgcctctataaacttgactcactgtactaagcaatcttaccatgaaaaaagtccctaagatgattttaaaatgcattacctcttcaaatgggcatggtgtccattctcctttccaaaatgatctaatatcttcactaccactatcaagcatactagtttgagttgatttctttcgtttttaaaacagaaatgctgagtttcacaaaacgagattgtttacaaccaacttttaagttgtggataccaaaagcttagtatcttagaattccaatggagacagtaacaagaaagtataattatggattataatattagcagtacccatggattaaatcatcctgactaacatgtctgcaaaatgcagaagaaaagtttggtaaatttacaaatacaacatctgtcaactacattgatcatgtccttaggaagaagtacctagccttacagttagataatccttaccctctaaggaactgatatttgcatcattactaatcaaagaaggcacatctctaaatgttactgtaatattaaccctcaaatactttaaaatgttactcctcagtatctcttccttatgcacatacatataagtacaggtatacgtcagcatgtaaaatgacttatgacaatttttttgttaaatgtcttggccaattatacagtcatttaagggttttaagtacatataaattggtgaggtgtattaaatacattttcaatttaggatgtcatcaagtaacaaagatttttattgatctataagtccatcccaagtcaaagagtctctattctgtattaatatgtccacacacccctgaggctatgttctgtcgggtaagtaatttacctctgtcacttctgtacaatcaacaaaacacctcactgctctaagctagtctcatctaggaaatgggttgacattataatgtttctcctgacataatccccataaagccttcatagtgtcttggccattcacatgtgttattaaatcttgtataatgatgccatgaatcgacagcaaattactgtaatggataccaaagaagtcagagaagcgacacctaaaatcctggataaggttatactagagaaattatgtataaagaaaattaaaagccaagtgtggtacctttaatctagcacttggaaggcagagagaggcaggtggatccttgtgagttcaaggctggcttggtctacacactaagttctaggatagacagggttatgtagagagaccctgtctccaaaataagtaagttaaggaatgatatcaatgaatactaaaccaccagtttacatcaaactgacaaaaacaatatttttatttggttggtctcattttgaacggaggaaaaaatatttacttggcattaactatgtctcacagacatcaattttagtaaaactggcacaagactagagcattgtgaaagccccctgaagaggataagcaactgcaaatctcagctgcacaacagagagcttgcacctttagccaccctgtaaaacagtacttggccgctaggaagattcaatgggtaacaaggcttagtatgcaatcctaaagacctaggtttgatccttgaaacctatgcaagggtagaagaaatttcatgtagttgtcttctgacctccacatatgtgctgacacacacacacacacacacacacacacacacacacacacacacacacgggctggagagatgccccagtggttaagagaacttgtttctcttgcatagagcctaggtttggatcgtagcatcaataaagtagctcacaacagccattcataactatagttccaggagacctgaaaccttcttctgaacttgtgggtaacagacacatgtatggtaagcatatataccctacaggcaaagtagtcatacacaaaatctaataaacaaacaaacaaataataaagaaggataaataaaagaaaaatagtacatttaaatttttaaaaatcccataatttgagtattctagaacaatacacaaacagataacaatttagttaaataagaaactaaatacatattctttttgttttgtttttccagacagggttactctgattagctctggctgttttggaactcactctgtagcccaggctggcctcacagagacccgcctgcctctgcctcctgagtgcttggattaaaggcgtgcgccaccactgcctgactactaaatttattcttaacggataaagtaattgcttattgaaaagatacctggggaacactttcagaaacataaccttaaattaaaaaaaaaaaaaactaacgaaataaatgtggagatgtacatgacttctccatatgttggtgaaaataattagaaaactataagaaaaaactataatgccaaataaataatatccacacagaaatgggtgaatgtagaaaacattaatgcgaggtaacaagttcagatgtcccaatttattcattccctcaaccaaatttagctagtatctggaacataccaaaggctatgaataggatacatatcttgactagttgccataaaactgcagttgttgacagtatatgataattaagcatttttaaatgtatgtgagtacactgtcactcttcagacacaccagaagagggcatcggatcccattacagatggctgtgagctatcacatttttgctgggaattgaactcaggacctctggaacagcagtcggtgctcttaaccactgagccaactctccagccaatgattaagcatttttttgacaagcacttcaatgagaatttaaaataggacataaaatacttacgtcatttggaaaaataaacaggcaaaaaatccacccctaaacccagaagaaatgctagatataccttggtatcaatcatagtaagacagaagaggggctatagtctgtcttagtagcagagcatgtgccaagaggcacacacatatataacaacacacacattaagacagtcattaatatagaaatggtaaagtaaaattagtagagcgtatgtaagaaagaattcctcacctttttctgtatgggtgttttggcacatgtgcctaaaatattttttaaccacgttttaaagatgggtctcactctgttgcccaggctggtctcaaattcccaatcttcctctctcagctttggggtttcaagcatatattttcatgcccaaccaacaaaagcttttattggttttataatattaaaaaattagctctatgcctcaaagtagaagagctacaggaagaaaataagatgacacagcatttaaaatagtgcctagcacataccatttcttaaacattgttaactttgggagaaaaaaagaagcaaagatcaaaagatgaggaaagattcaatggtacagtgctggggaaattggaagacatgtcttggagagatggatcagtggttaagagcacttgttgctcttgccaacaacctgagttgaattcctagggcctaaaggtagctcacaaccatccttaactctactttcaggggatctgataccctcttctgatctcctcgggcaccaggcacacatgtagtgcacataaataaatgcaggcaaaacattcatatacattaaaattaaaaagtataaaaatttaaaaataagaaaattggaagacacttcaattttacatttaattcatgtgatacacaccataaagtgaactagagattgccaataaatttgtcagtcaaaccttctgaattctttatgttgaaacatcaaacctgataaaaatattagaatagaatactataaaggagattgctaatattaaaaataataaaaatcttccaataggtatctgagtaaaggacacaagcagactgtttacaacacaggaaacgtggtaattaatatgaaaatatggccagccacataactgagagacacaataaaaataaaatgtaatatcttaaaaatctttaaaataacaagcaaacttaaaaacgtatgggataaaatcagtgcgggaaaagacaatacaatgaccacattcacacactggcatgattcttttggacagtaacttggccatgactcagaacctagcatcctcatacagcgtcccgtagcccgagcaaaccagacttcctttgcttctctcaccatgctctctctggccacgacacgtttaggaatgctgtatgtcccctttcttacactagcaaccctatttatcctttgtatttcagttttgattttatttctcctaagtttcttgtattaactatctttatctgaatttctaaggaacaagaacagatcaaagatgtgaccagtgcacaaacaatgacctacttaggacacgcagagtctactctagaatctacagttcttccatttaggtcaaagcaaagtccggagggacattagggaaaagttaagaatgaatgcagtcaagtgtaatggaatgtacttagagtatctgctacttagaagttccaagtcagcctggacaacgtagcaagagcacccatctcagaggggaaagtgaaaccagaatgaaggctctggagaggctattatttgccatccaaaaaaaaaactagttcagggcagggtaggattacatgtgagccaattccagatagctgctaattaccattaattctgaaaattcctgaacaattagtaaggcaagctgctcaaatgtagtctgccagggagtgaaagctaatgtcacctcagtgtattaatgtgttaagcagattcatttgtttcacacactaaaaactgcagtgtaaagtgaggtctttaagaagctcggcttttaagaaatgccattttggctcaactgtctttcttttgttaaatgtgctgaagaactgagtggcaaaatgcaggagaaacgtacttatgtttcctcatcagaatccctgggtcacaattctggatttgttgaggttactaacaaagtatagaaatatatatataatatatatataacatatagagaaatatagaaatattatacaagggtattttaaggaataagttaggttctgggaagatagtacagtcagccaagtgctttctgagcaagcacgaagatctgagtttgaactgccagcacctatataagaagccagatatagcagtgtgctgtaatacttgccctaagagatagagacaggaggaccctggggacttgtctagtcagcaagtctagtcaaatcagtgagcttcagggccaaagaaagaccatatttcaaaaaacaaggtagaaagtaatagaaaacaacatccaatatcaactctggcctctgcatgttatgtgcataactgcacagacacatacacacaaggaaagaactcaagtcaaatgtattgaccatttgtgttttaattacagacagtttactctgtcttatgttcacgagtgttctgctgcatgtattttgttcaccacactgtatgccccacatgcatgccgagtacttaatgaggctagaaggagacattggactccttggaatgcgagttacaaacatttgagagctgcaatgtaggtgctgagaattgaacctaggtcctttggaagagtagcaaatattggtaactgctgagtcatctgtctatacatataccttttaatgtgtaagtaattttggatcactaatgagctcagaaagagatatgattgaactcatgaggcatacagtttccctttcacagttatacttcaaagagctgacttattgtttatctcataaaaaatatgacttaactttaagcacatgtgtatacatctgtacatctgtatagaaatcagaggtcaggtaacctcatgtgttggtcctcacctactacattgtttgaggcagagtatcacttattgtatgttgcatacactagcctaactggcctgtgagcttccaggatatctccctgtttccaccttccatccttcaataggaatgttgagtattacagatgtactccaatgctaccactctgtgcactctgaggatctaaactcaggtcatcagactaatcacaccaggaaacacaaccctttattttgcattattttgttgcccatagtcacagtttcaacacaatgagcacttcaaaagctgagggagtttgaatgactttcaaatacttgcctcaacagaaaataagctcagatttaatggcttttcatcaagtagagaggaggaggagacaccaaaccaccagtaaggaaaaacaaagatgccatataccacaataaccactgggaaagctattatttgccaaccaaagcttcaatgaccactaacacatctgagcactatatagcataagactatctggcgcatggccacagccattcaccagcttattgtgtagacacttgtgtacttcctcataccaatggcaattaagtaaagtcattgtctaaaaaataatttcatcgaacagtaggggctaatattccctcatggtatagcttttctataagaaaacatcaaatcttttcttgcttcatgttgttttggaagagaggccctcctatataacatatgctggctttgaattcattttctgactctgcctcagcctacccaatgttggaattataagtttatgccaccatacccaaccctcttgctttcataaaagagtctaagtctttgtcctgactttaaactgtaccagaaagctataagccattaagtatgaacttatatacacttgtaaaagccaaggttttttaaaaagcaaaaaacaagccgggcgtggtggcacacggctttaatcccagcacttgggaggcagaggcaggtggatctctgaggccagcctggtctacaaagtgagttccaggacagccagggctatacagagaaaccctgtctcgaaaaacaaaaacaaaacaaaacaacaacaacaacaaaacaaacaaaacaaaaacaaaaaaacaaacaaaacaaaaacaaaaaaacaaattacttggagaattaaggagatatttaaaactaggaaaaatattttcacatataaatcataaaatgacctttaatggattttaagtatagttcatcaaagcaatcataagtgtttttacttaatccaataaatccataattggatttacaaaaccatttaagaggtagtttttaattttttgtttctgttttttgagacagggtttctctgaatagcccagactggctatcctagaactagctctataggctaggctggcttcaaactcaagagatccacctgcctctgcctcccaagtgctgggattaaaggcatgcgcccaagaggcagtttttaatttacaacaaaaaagaacaaacctcactataaataaaactatattaaacttggtattttgtcatcttaaaccaaaaaaggtcaagtatgtttttctatcatattgtaaaagaatgtgctttaaactttaagaacactcctcctcccctaaaatgttgtgttagaaggtggcatagcttgaagtacattgtctctattagtgactctttttgtagagaacaatattaacccagctgtgtttattctcacatacttgctctatattttttgttttgtttttttgagacagggtttctctgtgtagccctagctgtcctggaactcactttgtagaccaggctggcgccaaactcagaaatccacctgcctctgcctctaaagtgctgggattaaaggtgtgcgccaccactgcccggtgctctatatttttaaataaaccttgaaaatattcttaggattatttactttcaaggactggatgcattagaaagtagattcaaccacctatctttacagagcagcagctagactataaacactaatgccaggtcagtctgtatgcattaatcactaaagcatccctgtgaagtaatgcaactgagcaccatggcaactgtttctacaaaccaagtatcacagaaaagaaaaccatttaagaattcctctggatctctgtagaacttcaattccactcccccaccacccaccttctctttttaaagatttgagatcgaaataagttgaccatgatgagcgtgaatcttagacaagtttaaatactaccaatgaatgtgtgtgtgtgtgtgtgtgtgtgtgtgtgtgtgtgtgtgtgtgtgtgtgtgtgtgtgtgtgtaatcaaaaatacaactccagctggagagatcgctcagcggttaagagcactgactgctcttcagaaggtcctgagttcaaatcccagcaaccacatggtggctcacaaccatctgtaatgagatctgacgccctcttctggtgcgtctgaagacagcaacagtgtatttacatataattaaaaatctttaaaaaaaaaaaaaaaaagtctccagccaggaagtggtggtgcatacctcacctttaatcccaggactagggaggcagaggcaggtggatctctgagttcaaggtcagcatggactatatacagagtgagctcctgaacagccaacgctacacagagaaaccctgtcttgaaacactggacaaccaaaacaaacaaacaataataacaacaacaagtcagattaggcttagtggtacaaacctgtaattctagcacatgcgagacagagtcaggatcctgagttcaaggttaaactaagttataaagcaagccccacttcaaaaacaaaatacaacaaacaaaatctaggtttatttaattgctctgtaaaatcccatctctatactagattttctgggtatataaggatatgtaaaacctaggaactaaacatccaacatagaaacataacattatattctgtcatggtcactgtaaaatagtaatagaacccactgtggattagaggaagcatttctcagaatttgcctagacaaacagggaacagcaagcatttggtcaggtgcagagattcttgaatgcttatgcactacacaggacaatacaatggcatatgtaccttagaaaagttagtcctcagaggttaacatttgatcaccatgtttcaacaactccacttctagatatataatttaaaacctgaaaacacagaccctacaaaaccacatatatttatttacagcagcactatgcacagtgatcaaaatgtggagaaaaattcattaccggataacagaaagataaactgtgatatagcaacacaatggaatactggtcagatataaaatgaaatgcagtacatatgtgtgtgtgtgtgtgtgtgtgtgtgtgtgtatacatgtgtgtgaatatatatatatatatatatgttcatatatatatgtatatatatatatatgaatgagacatcacagaggaaccttgaaaattcgtgtgaagtcacaaaggaacatatactgtaggattcacttatatgatgtatctacaatatgcaacccacagagacacacgaagatcaatagctgtcaggtgcaaggaaagggagtgcttgctaatggctttaaggtttatttggggggcaggtgatcaaactctttaaaactgactagcagtgctcgctcttgctctcttgccttcttgttctccctctgtcctctccctccctgctccccctctctccccattcccttccccctctacatgtgctctacttctctcctgtctgtctctactatcctctcaactccgttccccatgtcctgaataaactctattctatatactaaaaaataaataaaaataaaataaaaaacaataataaaaaaaaactagcagtaatgaaagtacaactcagaatgtgctacaatcgtgaaactatggactttaagaggctgaattttataatctgtgacacatacatacaatcttatttgaggaggtggcgaccctgcttagaggactcaagagtgaaaagttcaagtttgcccttattaaaggtaaacatggcagactgccagggtaagcagagggtaagatggtttgtagaagtggagcaaaatgtgaggcatggagtatcaaatatggaacattcgtttacagatgtctctactcaccatgatgactaacaagtcttctaccatgacatgaacactagatgaaaacagttttaaaactactttattaccacttcagcagaggttatgatacacaggatgtgtgttgggcattctaagtctatgggcagactctgctgcttagctcgtctctagggcactggccctcaaccttcctaatgctgtgatcctttaatacagttccaaatactggagtgactccaaccatgaacagttcatcattgctacttcatatatacatatatctatgtatatgtatacacacacatacacacaagatctgataggcaccccccaacacacagagggtcacgacctacaggttgagaaccactgctctagcgtcttcctgacaactggcctgataccttctatagcttgtcaaagctcaggtacatgtactaggcgacagacttccagaaagacaagctagcatgtagcaccttaccaaacaacttttgacactgctttagctattttatgagcagattgagcagcccagctatgtaggacgtgtatgagatgctaaggatgaagggtttataatcagacacagtttacaagcgtggcacatacatgttggatggtataaaaaggaggtagataatggttctacactttatctatttgttttttttaagacagatctcactatgtagtcctgggctggcctacagctttactatgcagaccaggatagacttgaactcacagaaatctacttgccctgcctttgcctctagagtgctgagattaaacgtgtgtaccataactctcagccacttgtttcctggtttttcatgcataacatacattttcctttaaaaaaaaaagttttgagaaaataatagtattgatagctatgaggacatggaaaaccctcagaaatggaaaacaaatgccttatgtataaaatcttagttaatagtacataaaataaaacattctacctggaagtacacagccatggccatagagagataggacattctggaagaaatgtgcaaggatgcagagattaaagcaacagcctagaggtcagcgcaacatagctgctgcacaataatactaacaagctactaaaggttcttacattcactacatggttcttcacattgcagataagaatatgggtggggctgcggagtgagtctataatatagggaatgcagcataaacttcttctgaagcagaacaaacaagacttagtttagtaagatgatgttaactttatttaaagctcaagagatggaaatactgtcatccacaagggaatgaaaaagaggagacaatcttttcaaagtcaagtcatgctaaattctgattccaagccctagtctagcttaatgactctaggatgttatgggctgtggtcaggagagcacaggtaatgtggccttggcaagcagtgtctcttttggttttctagggaacaatgggagggaagaactgtactctaacccagatccactcaggccacatttgtttctgtattcatgattccaacaaattttaattctgaaaatgagttatgtatctatcatccctggctatatgctttcttgaaagtcttttagcatgacattaacaaaatactgagctagtttacattggttatgaataacaagtcacaacaagtcaaaataagactagaaacttacaggtttacactggtaaaaaccaaatttgcttggaagtggtgacttgctctggaatgtgtggtttgtgctttctttttgtttacttgcttgtttgttttgtttttcagatagggtcttacatatcccatgctggtctcaaactcacattatgcatgcggggaaagccatttactgactgatatacccctggccctaagatagatctatctaaaccaggggaagcatgtcttttccctgtattatatttctaaaccaaagaaaatggtggtttacgtgcaattgaaaatgttactaagaattaaatctaacagcagcctgccttttgggatagttgtatatctactaccttgggaaattttcaaatcctttgtttaaaagcaatactgttctcaagagatggctcagcagtaacgattgcatgttacttgtgaggaagagtccctagcactcgaatcaggcagttcacaactgtctagaacccaggctccagatctcacttctctagcctccttgagcacaagcacccacatgcatatacccccacacagacacatgcacctacacatatttagaaaaaccagaaatacatctttaaaacaggaaacaccaaaagccattttctgtgctatatattgtcaacatgctttaaatgttcaacttttaaatataagtaaaaattctttataagctgggcatcgcagtacatgtttataatcgaaacatttaagaggcagaaggtggagggctcccataagttcaaagtcaataatgcctacatagggaattccaagttggtctgagcaggagtaatatcttgtctcaaaataagtcaataaattaacaataaaacccaaaccaaacaactacacacttgcagcatgatatagcttttaatacagggggttagatggttcagtggctaacatgctctgcctttccaaaggactcaagtttggttctcagcacccaagtcaggtggctcataactacgtataactccagctccagggatgcctctgacctctgagagcacctgtactaatgtacacatacccacatgtgtgtgtgtgcactctctctctcacctctacacataatttaccagatttttttcagcaattttaaatacttattatttattttatgttatgtgtgtgttttcttggtgagtgtgtgtgtgtgtgtgtatatcatgtacatttagcagtctatagaggccagattccctggaactggagttacaggtagttgtgaggcaccatgtaggtgttggaaaccaaaggagaccctttgcaagaggagcaagtgttaactgctgagctatggtttttgtctgtttggtttttgagacaggatttcagtatgtaggccagactggtctggaacttactaagtagaccagcctggactcaaattcagaatgtctacctcccagtacctcccagtacctcccagatgctggaattaaaggcatgcatcatcatacccaaggatttaacatattcttaaatgaatggtgcctcattctaagaaggtacacaaaaatcttcaaatttagtgtatatctatgaccctgatttgaaatcctcagagcaagataaatttatgaattcaaaatagttgagtgtagaagaagatacagtacataatctgtagaagtaaaattctagttggtagaaaactcaatttgggacccaagagattccatgaaaaggataaggcagggctttagacaattacaaaaacagttagaaataccagctgaagtagagcagttaccagaaagtaaatacagagaggggattacctaacaaaaccatcatctcgtggaaggatgcaggcagccatggtgaacaagagaatacattctcacctaccctttctttcttcagtctccttgtattccctattagtcaagtggaattcagagatgagaaaagttcaataagattctgtattcagatccacatctcaggtagaagcaggatgtaaagtagagtaacatgggatttggcaaacagcacagatgggtttctattataaacagccctcaagtatttccagctatgacaacaaaagtttatttctcacctctactgagtcatttagttctactctcttctagggttttgaagaagccctccaacaaactttggagaactggttcaaagccaaacaccaggccagaaaatgatgtacatattgttttctctgggctggatgtgatggttgtcaacttgatcagatcagtcgtgataaccctcatgaaaatggatctattaaccttctcatgtggacagaaggaatgctcaggagccacgctccctgtcccgaagggtatgctaggggtaagtagttgctggagggagaagactccaggcatgcaactctgagatccatcactgatggagacaagggctttggtgaagctgcacactgagtcactgatgctcctggaacactattagcacaacttggaagaatagctccttcggtctatcatttccctctttgtctagagtgaatggaaataggtcacccaggacaagtcacacaactcatgtcaccagcactcaggtacattcccaggtagttaaccacaaggctgacaggagtggtatggcgatatgctggaaggagacaagaagcacaaatataccaagtccaagtctcataccaacccaggtaaaatgttccaaataatttgagtgtcaaacttctattgattcaactttaggttgtcaaagatgagtgtatatatgacctaccaaatagaagccagaaaataatagtgggctcttaaatttaggctgatgattcgtgaacgtatgtttatgacacagaggaaataagtcaaatgaccaatagttgctacttcagacattactaatcatatcattggagagacagaaataaactgacagcttttcaataaatcccagtgtctcctagtcttaataatacttactatgctagaaggtagagaaaatacaaagaataagaggtgtgcttgacctgaaggcagggcaagaaaaaacccagactctgataactgcaatttcctaaaatgactaattcttcaccataaaattagggcatgttcatacatagaaaaagggtactgacatcagaggtaggcctccacaggaggaactctgagcaaggaaggaaaaaacttcagacacaatgacaatattaaggtctttcaaggctggataatggtaaataatttttgtttgtttagcatcattaaggttaataaaaaaaataagatagtgagaaaccaaaggttagacagctagtcatttggctaaatgataaatgaaattaacagattacgagaagacccagggctacatgagaccctatcttataaagcaaaacaaaacaaagagactctgagaaaaaatagggagaaaacactgaagtaagtaaggcaagattgagttgttagaagcttgataataagctgaataggcagacttgatggccacactgtaatctgagcacttggaagcgtgagggaagaggatggtgagtttaaggccagatgttcagaagattctgtctcaaagaggggcggggaggagtaaaagaataaattcaaaaggtcagggttagaaaaacataattaattactgggccacagttagctcaaggagtaaacatcactacaaccatttcaactctattccctagagtcaattctcagaataagcagggagtaggagaggcatggtagcagacactcactatctcaggcagtgacttagtgcactgctctggttgccaagaggcttcttttgttgattttctaagtatgatcacaactaccctccacaagtgaggttagagatttagcaagcatttgcctattcattcaaaggaggggaaaaactcagcacagagtaaggacatgtactggcttgttccccgccactctcgcagtgacttccttgtgtaccaacaccacaccttgtgtccattcctgctacactcacggtgcctgccatgaagatgaagctgttactacaacacagccctatttccccggaaaacactgacttcagctcgtgagagaggtggcttaggacattttttaaaaggaaacttctgtaattgagtctcacactatcacttccatgtctaattctttctttaaagtgccatgcgagggtacttttatctttatttatcaacatttaatctcttaagatgtaaaattcctaaattattttaaaatcatcattaatgctcttacttggtttgaaatcatgataattacaaagcaaattatatattcgtctagttagagtcaacccaatgaagcaatccatttgggtgcatgcaggaagattaaatgcagtgaggtattcactggatcctttaagtaagtacatagactttacaaagattttatttgaatgccttaatctctgtcaaagtctgcctgtttacactagatgtttggaaacgctccttccgatacttccaaagaggcgaggctccaagcacgtgactggctcctagctatattatttagaactcggagagtgagaagagacttcccttcaggatcattctccaggacccaagacaaaggctgaattcataatcttcaaaactagtctgccaaatcaaaaggtagtagtaactcgaaaatggttaactatgtattagaatgaaatagaagttcttgtatatattcctaaaatttaagtttaagatttgaacaaaaaatataatattttatcatggtaagcaggggtctgcttattacaggtatagcaagctattagatttgaatacatgctaagagaaaagtagcctaattctagagagagtactgaccctttggtataggagcctgctctgtgttaccattcataccggctaaagaacctgaactaggattcagactcaggctctcagtctgcttactgtagaataggcatctctagacatgctgtatgtacccctcgtgtaggctcagctgtaaaatggcagactcatttgtagtcaattctagatttcctttttaaaaagctatggaattctcttaacagctcgccctttgctctcttctacccctaaagaaggttaaaatgaaggaaaccttagcattggggaaatcatttgacttatggttggtttttttcttctactttgttgtaaagatttaaaagtaatattctaatttgtagagctaccccttaaactactaagcgagaagcttcctcctcctcctgctactctcctctcccacccagtctgtcagccagtccttcaggtcgaacctttgctgctgtcctgttcctcacaccaaccccattcttactggttcaaatgcctcatggttaacttgtttgcaaaacaggaaaacaaaatcaagctccttctagtattcagaacgcttattcctgaagttagtgacctagatagaaaacaagtctgttatcgggtgaggttcagaaaggagggttgttatttggtcattaatgaataatttaaaagtccatttatattatgtgaatatactatagagatacaactaaagatatgtgattgtctatgtgtttgtgaactgagtattaaattttatgatcactttaaagcaaaagaaaacgatgaccaagcattccttcactgtcaccctgctcctcatgtgtgctcatattatgggaacaatttcaacaacaatagcagcaacagcagcaacaacaataacaaataccacctcaaattctacaaaaaacttgagtcttgggatgaccacaaccacaaccacaaccacaaccacaacaactaccacctcaaattctacaagaaacccaagtcctggaatgctctcgtcttcccccaggagcccacaggccatatcaagaccaagcctcaatcctgggacaaagccctcggagctcatctccaagagcacctggcaaggaaacaggtcatcaagtccctgcataaacacgactgcagggactgtggcaggcgggagcacggcactcagaccagtcttcaacactcactccctttttctgtgcagtatttttactcttttgtacatactcaggcagaaatgagcccaaatgcctgctcacttcagcacctcatattatttactaaatgacaagcacactaagaaaataaaatttatattaatttactgtggaagaaattattattctagtaagatttgggtttgggcaagttttgtcactccccacccctcctgagctgagaaccaaatccaaggccttgcacttgctaggcaagcactctaccactgagctaaatccccaaccatggcaagttttaactgtataatttaaatgttacattaatataatcatttccttcctataaatgtgcagtgctctattaaatgccaaaataagcaaaacatcacatttgtgttttaaatgtttgcaaaatagaatcaaactcaaatgtctatattaaagataagagaagaaattatggaagaggcatttaagcaagggggcaggagaagctgggagataaagagaggtatgggggaagctgaagctgttttatattttattatttttaattaaatagactgaatagcacaaatagggtataaacaacagtcttttacaaacatacccatttgtgggacaccactttcatgaaagtatgatagcagtagatcattccaggacctttttaaagcagaatacagttgatccaataataggaacgtattctgagtaaatattgacttggttccaaaagattgtttgcaaatcagatgcttagaactaagaactcattttacctaggaaaatgtctcttgactgttagctgaactttttttcctccccttttctccttctccccacttccttctttttccatccttttccttctgtccatttcccatctctttctctccttcccttagtcagagtctctgtacgtagtcctggctgtcctggaactgactatgtagacaaggctggcctcaaactagagactcaactacttctaccttgggctgagtactgagactaaagaaacattggctagatttttatgtttatatacaagaatgggtttaacttaacaaactcagtatgctaacagtaacaattcctgcagttattgacatggtgagttagaacttaagattagggctggcgagatgactcaatggataagagcactgactgctcttccaacggtcctgagttcaaatcccagcaaccacatggtagctcgcaaccacccattaagatctgatgccctcttctggcgcatctgaagacagctacagtgtacttatgtataataataaataaatcttaaaaaaaaaaaaaacaacttaagattagtttggaactcagtgacaattctaactagctaagctatcaagagtaaaatgacacagcagaacccaagtggactgactacagatgggtcatttgggagtgccagtttaaatatacaaaataagccttgtccccaaggatatatgactctccctcacaaggggaaatgaaacagacattggaggtagacagagggagtgaactggataggagatagagtaaggcaaggaacagggatgggaatcaggtgggggtaggggcaggacagtttggggagagaagacagaaattagcggggaggcatctgtgggactagccagagacctgggattgggaaaggctcccaaagtctattggggcaaccctagcagttggggctatggagactgaggtggccacctcctgtagtcagtgggacttccaatggatggaggcatcaagccacccacaaaaccttccacccaaaatttgttctgcccacaagatgcacagagataaagatgaagcagaaattgagagaacagccaaccactgactggcccaatttgagatccatcccatgggaaagagccaacccctgatactattaatgatactctgctatgcttgcagataggagcctagcataactgtctcctgagaggcttcatccagcagcaatggaagcagatacagagacccacagccaaacatcaggaggagttgggggagccttgtggaagagtggggtataggactgagagagccagaggggtcaagggtaccccagaaagatatacagagtcaacctgggcccatggaaggctgaaaagagcatgcagggactggaattagagccccctacacatctgtagcagatgtgcagcttggtcttcatgtgggtcccctaacaattagagcatgggctgtctctgattttgttgcctgccactagatccccttccctatctggactgcctggtcaggcctcagtgggagaggatgttcttagtcctgctgcaacttgatgtcccagggtggggtagtacccaaggaggggaggctccccttctcctcagagaagaaaaggggtaatggggagagggatttgtgaggatgaaactaagaggagaggaaggaggggtgctgtgatccagatgtaaagtgaataaatagatacattaatgaaaaaatttaaaaagaagccttgtccttagattctgatgtggaagctcagggggcttagaaaatgctgttatttagatttttctgataaccaggattgagtttctgtcatgtcaaagattgcaaataatacctcagaaggttatgatagggatgaaataaaaaattatacaatattgggatgaaataaaaaattatataatatacaatatgtagtttgatgtgaagaaagtattaagtaaatatgaattataatttgtattaatgccctcctccaaacagctgtgaataatcacagtatcccaaagaggaaactctcaactgaaatgcttaggttttaacattttaattacacttacacacacacacacacacacacacacacacacacacacacacacgaggcaaatgacagaaatatactattgccatccatgcactgctgagctctaagcataagctcatgacccaggcctgacgaaccaaataatccatgttccttgctaacgtgacagtctaagaaactgacaagaaactcaagacaagccagtaaagcctgaggtgctactcaagtgggtgacaagggctttttaggctggaagactacaaaccactgacagctacagccctttctgtccttaaggtcataaggcatacacaaggggagtgtgtgtgtatggtccatgtatatgcatatgtgtgtgtatatactcacacatatacataaataaaataataaaaataaataaaacttaatgtaagacatttcaaaagtaacagatggtaatactagataatgaatagatcatgaagatccaatttaaaataagtaaacctgtatgtaaggacagtcactgatgaacactgaggtactttccagctgaaccacatatcaagaacgtcaggtaagctatattgaggtaatgaaggggtcactggctgagctaaagctgaaatgacacagaaatcagagaaccatgtaatggagttaaacacaaagccaagaaacagagcagcaattatggcttagtgatgtttcttcctggtatggctcttgactcgtggttttctttaggcccactttctgataaaataagagacttggtaataaccaaagcctacactaaatacctcagcggatccatccgatttcacaggtgcctcccacagagggcaggaggaaagaaaaggagagtcttacgatgacagggaaagaacacatgatgtgaagatgaggccaaaaagacatttagacttcaaatgtctgtagacaccaaagaagccagactccagagccacttgtcacagaagcctgtacagataaggccttcacttaccgtcacaatgagaaacagggcctctctctgctcttcccactgtgcccctttgtcctgcaggtaggcattgtacccagtgaaagtgagagcagaagctctcccagatctcagaaaggaaaggcatggtgacacatggctttaggaccagcactcaggaactgcagagatggctctgcagttaagagaattagctatgtgtccaaaagatccaggttcaattccaaacacccccatggtagctcacaactgcctataacgtcagctccagggaagcctcttgaaggcagcaggatacacagatagacaagcatgttcatgtacatttaaaaaacaaaaacaaaaaagcccccaaagacccagcacccgagaggctgaagcagaatgatcttgagttataggccagacaggctacttggtaaggccacatttcaaaacatgaagcaaaaactaaaactcctaagtactgaaaatttgatttggcaatatcatatccagaaaaagaaaacacgaaactcagtttgttacaaaattacaccgaaagagacacagaagtttagcaagcatattttcttccttctcaaaaatgaagagtcagaacacctaataagccgcagactggggatccctggcaactgcaaacctaaggtgtgcaggcctgatttagagctgtggaaacccgtcgaaaggccaggccaatctgcttttcctctgctaggccaccagagaaaaaggccacaaacttacagttccttatcataaagaggggaagataaaatccaacattctgctacctttaaactacaaagaattcaaagggggctgggagtgaggcacacatctaacacactccttaccagtcctcacaacttagatatagcagggaaaagtcaaaataccctgatagtactaaaggttaaagctgaaataccaacaaggctgaaatgcaatagaaaactaaaattgccgggcgaggtggtgcacactttaatcccagcacttgggaggcagaggcaggcggatttctgagttcgaggccagcctggtctacaaagtgagttctaggacagccagggctacacagagaaaccctgtctccaaaaaaaaaaaagacagaaaactaaaattatcttagaaagaacaaccaagacaagaacagttttgtggagagataaggagggtcgttttttcctcccattttttgggagaggtcttttgagatagcccagggtggacttctaattcaatataatcctcctgccttggcctcttaaatgctatatttaaaaatggactaacacatttgcctagaattagaagatattccttaaagttgttaaaaaaaggacaaaggtaagcgtgttttcctgttccttttctattccccagttactcagaactctggacagctgagtatctaatttaaaaagtttcacgtttctcattcttcttccttctcctgctttgtatgatttctcaacctctgccacgtttttgcatgaccatagtcaataaacataattcctttatttctgttaagtttgagaagactaagtcctagagctgctggactgcccttaacatctcgttatcatgggccactatgtagtatcactttttgtccaagttcagccactgtgggttgtgccattctcatgggaagaagagagcctaaccaagtaccaccacatgttagttttcacatggcagggaaagcaaggcaagcccatcaccatggagatggaggaggaggaggaggaggaggaagaagaggagaaggaagaagaggaagaggaagaagaacagctcatggcatggctgaggacatcacagtctatttcccaggccaccctatccatctttatagccatttcctatagctccagtaattctttcttaaatcgctctgataaaattgctctgatacagtctcatacaatatactagcttttctttcttcttaaatgtgtgtgtgtgtgtgtgtgtgtgtgtgtgtgtgtgtagggagggttctgatttttgtgttgcagatattataaaatcagaatatacccgaaagacttttcactctgatagtaactccttgtggtggtgccttaacatctgatgtagcaaagacatatgaagtgcatactctcaaacaaatacctagtagtaagcatactatctagggaggcatggctttaagggctattaattcaagaaggaaaaaaaaaaaatcgcatcacgtttctgcaattgctatcacttgaaaaaccctattaaaagagactaaaatgtattcttacctccgtgcaacataataaaaaataggattcccagctttggaggtgccagcttggtagaagatgcttaacgttttcaaggccttgaactcttctttctcatgtacctggtgcctaaaacaaagagggagtcacttaagagtctttatacaaattgttgcctagttaaagaaaaatgtgattaatcaacaataaaaagaaaaacaccaaaaagcaaaatacctaaaaagcaaccagttttctgaagggcaaaatgtcaaggtgtgttcctgagtcaggatgactctcttgggattacttaacaccacccctggacatgcatggtggttgctcgccttttacccatgctacttcttttttcagataaaaggatttttagtttgcttttccttgcaagttcagttcatcaatcctctcatttatggtttttagaaaggtgagaaagtgtcagaattcatcacaggacaagctaataactagcaggtgatcttcctgagatagtgttcctcggaggactaatataatccacaacatatttgctcccgaaggcacagctcagaagaaaataattttaggagagattcctgctattactatgcttctcctgttattattacatatattttaatcactagatattagcccatccttttgagcagatctctgcagatctatgaagacgtactgtcttgtagtaatgctatatagacagatgacttcctaattctttctgatactatgagaaattctaaaattgtatcagtatttattaagctcttttacagtgcaactattagatttttttctgatagtcaaaactgcaatgagaactctgccagtctcccatgtgccaccagttaattgcttctgatagtaaacagatagtctactattcaagagtatattccaagaagttgtaaagttgtaaaaccattaaccaaaggcataaaaagggaactacgatttattatagatactaggacagaagatgtcaactgggtttatctatacaaaacttcactaataacttagttatggttttcaattctctatgaacctgtggagccatgactggtaatgaatgtttagccaaataattacttctaatggatatgcatgtcaaaattctccgttgtaaacttctatttcaatttatgatttgaatttatgtgtaaacttgtgatgaaatttttaccatgtgatcatatattcaaaaagatgtataagtgctgaggcacagagaagagacagaactgagctgaggagaactttttagacagaattttttagcttatctgaacagaactttttagaacagaattgaggataattttttagtcaggacaaaggagaactttttagacagaactgaactcaagaaaaactcacaagtaaaggcatagcattgggagaaaaggcattgagagtaagagcattactgtgacatcagagcaggaggagagagcaagaagaggagaatgcagtagagagacaaggcttagccttactaaagagaacaaagctttcttcttacagacttggatcttctcacactatcttccctttctttccctctctccccaaagtaggctcttactgtctaacttaacttttataaattaacttctgaacatcaggtgagaatgttttccttctgtcattggcacatcctatgaataaaacaaccaactcacagccgttcacaatgtactgtttgtgaaatataatcaagtgtgtgtctactagtgagaatcttttagttgatagattagagtcctctaaatgagatataaaacaatgtttgttgtagcagtatttaagtgtactatattttctgagtcttaaactaaaaaaaaaaaaaaaattagaaccatggactttttgaagggttagtacggtaataagaacttaggatttaaatccaaaagaaccataaagcaggtgtgaattcaggtcaataagttatgtctgcttagtgtattttctaaaactataacatgaaaataatggtatctctctatatgttctttaaagtattaaatgaagactacgccaaagagaccttgcaagatggctcagcagctgaaagtactcaccactgaactgacagcctgtgcttggtcccgtgggacacggtgtgaggagagaactgactcccatagattgttctctgacttcacactggcaatggtacacaagcgcgcacgcaagcacacacacactaaacaaatgttttaaaaaaagctggcttttttgtaagacatcgttctttttataagaaaatcaatatatcaaagcaaaacaaaacatgctatattaatacagcatgagcacattcagtaagtggtttggtaataaactttgtttcacacctcccaaaacatattcatcctttcaaagttgtgttttacctggtcataaattcctcaaactttgaactggtaaggttaaggctggaccagtgtgtatctgccacaggcttgtgctccggaggacccagatacgcgagaagtgtggccatcttatcaaaaggtcgtcttccaacagctttatgatccctggtaacaacaggaaatgcttattaaatggcacttcacattaattggggagtctgaccttcctttagactgccaccgcttgcttttcttctaactactgttcctgcctgatttgtaagtttgcagcatcgaaagatttcagatcttagaaacacaattatttcccacctgtaaaacctactgttttaagttcgatttttgtttttgtttttgtttttgttttttagaattgatagttctaacattctcatctacagactctatcttgtgaaaaccgtgtttgggacatgagcctatgtaaccatagtaactgatgatcttttatggacttttttttttgagacattgtcttattatagttagctcaggttaacctcaaactcatgatcctcctgcctcagcctcccaaatgctggtatcatatcatgtttttaaagatttattttttattcacgtgtatttgtgtatgaggccagaagtttgtatcagatcctctggagctggaattaagaggagttgtgagctacttgccatgggtgctggaaaacaaactggaagagcaatgtggtagtttgaataagaatagccccataggcttatatgtctgaatactcagtgtgtgttctccccaaccccctattccttagtggttatatcaaaattacaggatattcaagctagtgagcagacatgaaactatcaaatcattgtctatattttcatgtttgaaatatgtatcatttttaaagtagcacatttaaaaatttcaacaaactgtgcatatgtattcaaatcatgaaaaaagaagagaatgttcatttttaaaagttccaggttattagccaggcggtggtggtgcacacctttaatcccagcacttgggagacagtggcaggtggatctttgtgagtttgaggccagcctggtctacagggcagccaaggctacacagagaaaccttgtcttaaaacaacaaaaacaaaaacaaaaaacaaagctaagcaaagctccaggctacttgggtactgccaggataaagtcctttccttctcctgcttcaggggcacatgtcagccatgtccatgcctacatcaacccataaacactccataaaggattaacaagtttacttttaaacttccatctcctagatgtttagccacagtgatctcctcagacacagaaattggagccctttacaattctatataaacttaaaaggaaataactctgacaaaggacagcaggttaatttatgtcactagaagcttttactaaaaagctagtgaaataatttccaaatactttgagttactgcatctcgtctcattctctctagtttgccttacctctagacacggtcttaccacgtagccctggcaggcccagagctcacgtagaccagtctggcctcagagtcacagagatctaccagcctctgcattgcacacagtgggattaaaagcatggcactgtgcctgactgactgggtactttctatatgctgcttggttttcatacacttaataaatagcatctgtgattgtggaacttgtagttccacagctggtgctacgaatcatataacatgagttaagttttgccatatgcatgtgaatctgcgcttctctttccaaatcataatactgcaaaaatgtgcaaatagaagatcaatatttaggatcaataattttattaattcaacttaaactaagtgtttaatttccccaagacttggaaaatatacctgttactggaaagatactggccaattttctcctgattgttccaaagcagccgatgtaaagcaagcacattgccatcgctgatgaaggaaagactatggtttactgcatcacttgtgggacaatctgatgctatatctaggaaaaacctgcaaaaatacaaagccattagaatttttaaccccaggtatacttatgcattacatttatatagagtctagtaatatagtagctgtgattgcaaaggagggggccttatgccctcagtgtaaatgagaagcacaaggagaaagttgtcttcccatttctgatattagtttccacttcaactgcagagcagtcttctgaagttggagaacaataaatttatatggataaaatctggagaacaagctagtatcttaacagataaaagacatggaggcctaggtaaagacttctcttaaagttacaccagctgcctgtcagagccaggagtggaactttggtagtcttaaccatctgtgagtagtcataatagttattttctacctgaagacaccaaaggccaggaagcactgtatgacaacaaactggaagggcagctgcagaaggatgcgtgacatgagtgacatcagctaggcttctgaagggattctgccagctcaagcctgcaaacgtggctctggcagactttgcccttctccccatcccctctactttgctaaacactgttagattacattcctaaaagtagccactaaggtctagtcccttatttggccacttcctcctcttgaggctgactattatctatgtattggaagtccagcagtcaaaagccctgctttggccactaaaatcaaacacctcatcctaacactgggtgtcccctttttacctttataaactgccatttgcctatgggctatgtctgtctcctctctatccagaggcaggcctttgtcatcattccagggcccaacccctgttccccgggacaaacatcccttctccctctcccttatcctctatctcctgtctttgtctctcatttcctgctctctgtccctctgtgagaaataaatctcatctgtgctgagcacttggtcgtggtggctgtgtgcagattccagtcccttcagtttctcgtgctggcaaatgacttctgaacatcagcaccttcacaaagcactttcccaggaatcatctcacttgttttttaaaaaagtaaccctggcaaagacagtactaccccaaggttacaaataaaccaacaattcagagaattaaagtgaagaatcagttatgaaaattcagtcgtaaagcctctacaattatctgtttcttcgcactcaaaatcttatatttttgtacattttggtatatgaagtattgttttaaattcagagacacttctaaactgcagaaacaaaagtattattaacataaaagcaccctgacataacctgtatcgcatggttatggtttttaatacgaggaatcttcttgagcccattctgcagcattgcctaagtgagaaaacgccaacagtgctttacaggttccagagagttttctcagtgtcttaaagttaaacagaacaaaaatgtggtcttagtctagaaaggattgggggggtggggaatcacatacagaaatttaatgtagaccagatacacggactgcagtaaaatggagacatggtggccactgaagactctggctgcttaccttcgtgccaagtcaaagttgcttttcacaaaatcattaaaaggtctcatatgctcttcttttgtgaacagtacatgattggcaatgctctgaagtacctaaacaatcaaacaagattatgagtagtcagattatttgctatatgaaacctataaattaatatagtcattaaaatataaattttccattgatatttctactggcagttcaaatcaattattcattattgtaaaaaatatcctaaatattgttttaattcttttcaagtagaaatattattatacatgttatagatacaaagtatctattacatgtgtattgtgtgatatgtgcatatatgcacacgtttgcaagtgtgagttggtacatgtgtgcaagcatatggaggccagagtttgacgctatttccccccatcattgcccatcttctatattacagcatctttcacatgattggagtatttggactcagtctagctagccagcttgttccagggaccctgcctctgcctccagcatgctgggattataggctgaatgtcatgaacccctgacatttacatgggtgctgggggatctgagccacagtcctcatgcttgcatggtaggcactttacacatggctcatgttcacagtttcaaatgctgttaacaacaacaacaataataaagactaaagaaatcctacaatctgcatctttatttccacctcaaatttttcaaagcagttacacagaaaaccctcactgattagacaaattagatacttatttgcttgtataccttcccctcatagtgcccactttgtgtatgtatatgtacatgtatatgtatatatgtgtgtgtgtgtatataaagttcctctgcaatacaaacaaattaaaacaaaaggcacataactgaagcaaaatgaagacaaagtactttgaatatgaaacactgaaaaattagctataaggaaaattaaacgttgtaagagtatcaaaataattcacctttgacattaacttcaagcccctttcaattctaggtggtggctttttatctaaaatccctgcttcatacggcgagacaatggcaggattgatgaatctgagaaacatggcacttcctacggcaccgatgctgttctgagggaagcgctggctaaccacctgaggaggaggagttgagagttgagcagacagtttgtgttgaaatataagtggaaacaaaggcttcaaggtcaaagtctgcacaaaattccaattatcaatcttttgaatgatctgtttttaacttttttccttgtcccaaaacaccagaaaatacggtttatccttaactgtaatcatgtgtgattttttttaaagacacaattaaaagagaagaaaaatctcctcaaagaaacctgaaaaaagattttacttcataatcattatagccaacaaaagtagacttaatttcacacaaaggttaacatatttttctatcatcaacagacataaaaagtacagttgacttttataagagctgagtttctaacagcacctcctacatactctattcctaagaggaatagctaacactttgcacacccgttaaaattgacatttcagtgcaacttaccatacacatctctgcttagatttctactgagtgaaaaaacttacttacaagccatgttcctgccagccacttttcttcataagcatgcttcctaatataaggacctacctattatttaaatcacaggagaaacaggaactcttgggaacctaaaagaaaaaaggatcctaccagaagacagatcccccacgctccacatacctcaatttattcttctgccaagcaagtaataaaataaattaaaaccaaaaacaaaacaaaacaaaatctttcagggcccaggaaatagctgctctccttgaaaagtcacaggaaggcaatgtaaacggacctattctctctataacaaaaatgttctgcataggatgcaaaggaacaggcacgccagacagggggcaatggcatagaactggctgcccttcgacctcttcctaatacttcccattttaagctaacacttggaaactgaattatcctagaatttaatttttgtatagaccatatacatatttctttttttaaaagaacacatgcaatagtcaaaagctattctcatttgctgtggctaactgtgatagtggagccgtagcactcacaataatgggaacacaaggacaccctgcatctcaaaggctcctggggtggagaaatgagaaaacagggtttatgtgcagaagtacttatcattttatttttctttactgggtgtcaatatttgtctttaattcacagactcaactgcagattaactcttgaatatttcactttattctgatccactttgtgctttgtgttatctatatttatttatgtatttatttattatgtctttttttatggatatgagcattttgcctgcatataagtctgtacaccacttacaagcctgataccctcaggggccaaaagagggtgtcagatctgctggaactactatcacagatggttactgggaattgaacctggccctctgggagaaaagccagtttttcttaaccactgtgccatctctccagccctaggggttgtatcataaatgtgtccttacccaaggcccaaaaatctcaaaataattttctattgtttctgataaaaaaaaaattagaaaaagatttcagaaaatgattccttggggggtagtcgtaggaacgagctcagagaggtttgtgagctccagttccctttgtatacggtgccgtggctcggggagcttctctgggttacagttcttttgtgtgcttacagcacccagggagaaccttaggaaatcctgagaaattggggagttggctaaatatagctgtgtttttttagctgaaatagagttttgcatataaaactaagaaaattcaagtttacttttctaggacagtttttaaacttttgaggtactagaatctcagatctgattaaaaaaaaaaaagcaaatatcagattcatcatataatttcaacatgtgcaaagaccaacgttgacatggagttcttttagaatttccaaatttagaatttccaaactgagacaaaaataccagtaagctaacaagaccatgaagtgttttgggagcaaatcatgaagaaggaagaagactaacactccctttagggacgtcatgctcctagtccatcagtgcttttatcttaagcagggtggggttgttgttgttgtttgttttatgagtccactgtagctgtcttcagacaccccagaagacggcatcagatcccattacagatggctgtgagccaccatgtggttgctgggtattgaactcaggacctctggaagagcagtcagtgttcctaatcgttgagccatctctccaaccctttttggcaggttgttttaaaaataataatatcaatttaacccaccaaaatcatgaaatagttttaataggctcaaccaacatcagagtttgcccttaaggaaggagttggtttattaaacttctatgaaagtgtctttataagtattagcaatggctgcacacagcctttataatgtatgtttgaaagtagttgtttcagaggttgggtgtggtagttctcacatgtaatccctgcaaggagagacgaaggtaagagcactgccttgagttcaggccagcctgctatgaaggtctgttgggtgcttatagcacttaagacctgttttaaaaatacaaaaacttgctacttgctcgttgtctctagaaataaagatcttataaaagcacaacttacattgtctcctcgtttatatttgaaaatactcagcttgtgatcataagaaagtctgaattatcttctaagaagagtattataaaattaatatgaaagtactataacttttaaccctttccagatctctaaaaaatattatcaaaacttcatgtttcagaaaaagtttcacagggctggagagatggctcagcggttaagagcactgactgctcttccagaggtcctgagttcaattcccagcaaccacatggtggctcacaaccatccgtaatggggtctgatgccctcttctggtgtgcctgaagaaaacagtggtgatgtattcatatgcataaaatatataaaaaaataagtaaatcttaaaaaaaaagaaaaagaaaaagtttcacatattgtaaatatgtatctccttgacagtgatatctatatttttggaactaaaacctaacaattaaaattaataaagagatactgtataaaaagtttcatgagtcaatttataaaaggactactctttctttcacttctatttaacatcaatttggaattttatccaacaccacatatttaagttttttgtttgttttgttttgttttggcattttgcgacaggatttctctgtgtggcctggctatcctgaaactttctttgtagactaggttgtctccaactcaagagatccgcctgcctctgccttctgagtgctggaattaaaggcatgtgccaccatgcctggcatgttgttctttatttccaagtgtataaaaatctaatttggatgtaaatgatattctacatgtaaggtcaatgatcagctatcccttgcccctaacacacatacacacatacacactcttccctaggtaaagttgaactacaaaaatcatataataaattacatatcagcagaggatcactagctatacatggtgaaatcctgaaagtcttgagttaggcaggcagccgctccagtaatctaagtacacactatgttgagtacaatcaactgaatcagctgtcaacatagctaatcacccaaactcgaaactttctttcacttattacaaaggaggtcagcttgctctcaaaggagaaagaattagattccgttaaacaactttcaaaacatgacattctaaatttataatgattagcatgtctttatactatagaatctgttctgaagtactgccaattagacccccttagtttcctaaggactgccacatgggctgagaaatacattccaaaatttcatacatatatgaaatatctactaaaaaattccaaggaatttttatataaaaccataataatgttaggaaagctataatacatgctctagagaaacacagaaagcctgactttaattatgttatgctacacaatgacattagtgtaacagtaaacaagaatgttagaaacagcaaattaatttccacagtgatgatgtataatgttaaacccacaatgctgagaattagaaggctgaagcattagaggaaaatgttttaagcaggagagccatccaatccaatccatttgttcagagatgatcaatttcacatagtacactcaaaaagaaaattctgaatggacataataaaagtatgagtctctgaagtttaatttagttctgaattttgaatacaattataaatgtaaagctttattatatgtaaaagtagaaaatgaaagatgaaaccagacaaatatgactttaaattattcctttttaataaaactccctacaacttgtgaaaggttgttttgggttttttttgttttgttttttgggggttttctttaattacatcattctctataatcaattggattaagtgaacaaagacaggactaaactggataatggtaagtcacatccacagatgatgttattttaaaaatgaatgcaagttatactgtgaacaaatgatattcgtaggaagaaaataattatggcaatcataactttcttcctttcacaagacggccaagtcagaagcaggcaatatactcaggtcacgtttgcacagtgggctcctgtgtgagcatggcctcactgagcctcctcctcactgcagagatgtaatgtgcatttcctctaaggtaaaaggaacatcagcattaaaatttctatgatctaagcacaaatgtctaaatcaggggtggctgatactatcaaggtaaaaatataaggagtaaacattaaaacttagtaactttgagattagagttaggaaatgatccttggttttggtagctctagcatgtgcgtcctgaatttaatgtctgttgggacaggagaaggtcacatttctacccacaatgtatttatcaagaaatgcttttgtttctagaaaaagaaaccactcacatgacccgcaaacgagaagcaagaatgaagacagtcagcatcccctaaggccttgaaattaagtttctttcgcattcatttataattttaaaaataacaataaaattagatcaaggatattcaatgtaataaatcaatgcacaaaaaaatacctttggggtaaatcaaaccaaaggaacacagagaatgtttcaatgtaacttaattccagggttaatcgaaatgagagctattttgtgccagaattagtagaatgatttcacagtgaaggtcaaatagctgaagtgaagatgttcttaacaaatagcaaagatttggggtttgcttcgaaagaaacagctaataaaaagttctccaaacttactgattttttgttttcctttctttcttttactgtagctttattcagtagggagtggcaagttgcctacagaacagagatgagcacaaacaagtcacagcaccggctacatacagcaacaaaaacaatgttggcttgtacacaaacttcacggtaaaatgtaacacaaatggaaccaacagaaaggcagaaatcaactgaattttgagggatgaagtttaatcctggattttaatttttattacacttttaagccaagcataaaataaacagcaagaaatggtgagacccaatcatgtctactatttctggctataagtcatggaaaagctgtcctcaagcaatctcaggaatatttatacttgagtcaattcctagcttttgataaattttacttaaaatatttattatgaagtagaccacacactgtaaacattgtgtctacataattttttctgatatataaaatacttctctgtgtatccttcaattgacttaagagttatttttccaacacctagcagttaattatgttattaaataaaaaattaaatggatagatatgcagaaaacaaagtttagagactctgaactccatcttttaaatggagtgctgttataatctcacatcttccaatgcccacagagtgatccctgaaatggtgctaagtttattgaaagccgctgtatttggaaaaagaatgttagcatcaactaggaaaaaaagtttattaataccaaagttaagaaattgaagataatattgtagattcaaatttaaatctgatttaaaatgtcattcattatggatggcgatttaccagactgccctctcccatgcaaaagcccaaaccatccatgtgaacccacacaggtgtcagtctcaccacagctccatctctagaataaagacttcttcaaagttaaaacttctgattagattataccaactattttttttaatattttaaaaacttaggataagagccagttatggtggtaaatgcctgtaatcctagcctttgggaggtgaatggaagaaaatcaagagttcaaggcaaacctgggcaaaaaagacactaaccataatacaaatttttgatctagatttctaagatattgaaacccttcagttttaaatccatctacccattcatccatccatccacccatcacccaccatccacccatcatccacccaccatccacccatcatctatccatccacccatcacccaccatccacccatcacccaccatccccccaccatccacccatcatctatccatccacccatcacccaccatccacccaccatccacccatccatctagcagctcttgtatacctagacgccagcaccatcctaggcctaggaagcagaggtaaaagctcatctcagtgtgctttgcttcaggctttaaggcagtttacaaaatataaccatgtaaatatccagatttttttcaattatggtatgcagctaccattgagctttaacacacatatataacctcacgtgaagtgggaaagacaatgcttacttaagatcacagtagctatttcccatctttctcaccagaactgaacattcactctagaaattattttctctttgttccaaatttatcagaaagaaaagaaatagtatatgaaaaaaatttaattataaatctgtcatacagaaaatatctaataaaaaataaagaaggttagaagagacaaaaaataaatctgtcatacatattataactattattgtattatgtattattgttacatagcattaaccatcttttctaagaaggaaaatatatagagctgattacaagatacaaaaaagcctgaaaaaccaaatctgaactcaagtaaaaatcagctagcaatatactcacttagcttccaaagtttccccagtaaatcctcaaaggagctatgtttactaagaaaaagaaaaaatgggttcccatccttcccagcagagcataaaagtacaagggtgccattatgtcactgccaaagctacaagggcaagcaaagcccaaagaggaacaaaggaagggagggggggaggaagatctggagggagatctggagggagggaggaagctgagttaaggacagagaccagagactcaatgaaaaatgcattgggtctgaagcttttttatttctatctttgtctttggtcactgtaatatttgctcattaaaaaaaaaaaatcttacaacaaaacctctgctccatggtagtctgcactaactttacccactacaaagtaatgcttacgtaagtaacatctgcatggtgtttccatgaagctttaatgtggtaactgcagtgcaggcaatgcagactgctgtcaagtgcgcactaagcagcacagcgcagggtagcacagagtgagccaccagtcagcacttccttgtgttcatggttccttacaaacctaactaggaaggctggcaagaatcctgcttacttaaatgtgtagaaatgataaaatttattccttaatgaaatatttcccacatacttattaagtgtccaattctttttactttactagtatagtgctctcaaactggtgcccaagtttgctgatgatacaaatacatttttcattatgggaacagccacatgaagagtttttattaaagtctagtggcaaacagtgtaatcagcacgacccaccacagtctagttaacccaccctgtagctgcacaccccactagggggatgacccatcacagtctagttaacccaccctgtagctgcacacccgactagggggatgacccaccacagtctagttaacccaccctgtagctgcacaccccactagggggatgacccaccacagtctagttaacccaccctgtagctgcacaccccactagggggatgacccaccacagtctagttaacccaccctgtagctgcacacccgacaagggggatgacccaccacagtctagttaacccaccctgtagctgcacacccgactaggtggatgacccaccacagtctagttaacccaccctgtagctgcacacccgactagggggatgacccaccacagtctagttaacccaccctgtagctgcacacccgactaggtggatgacctatgtggagcctcctaagcttcccagagctttctgaaaacgcagtaaagtcacaacacgtccagtaactgaatgctaagtatattttatcatatttttatgtatgcaaagttttctttttatagacactgagatatatcttttaaaatagcaatggagaaaaactcacatagcagcctcatgcagcttttttaaatggtgtttcactgatgatgttaatgtctctaagcaactaaagctgcaagccaaaaaaaaaaaaagaaaagaaaaaagaaaaaaaaatactgcaaagtcagagaaatgcatgagttctggtaaatgtgtaagtcctttcctttttgtacccttattccaaaattcaggacctatgctgggttttcttttccctatttgaaaaattaatacagatttataggcaatccctcggaataaataaattattcctaaaactgcatactcaattcaaaatcagaagttacagaagaacacaggccttgttctttcaacacagaaagaatctttgtggacatctaaatttagcagcactatctgctgtgactgggttaaaaagtctgttagctactgcatggtgtggtctctatcttacaagcagtactctacataaaatacatatgacaattagcctaacctgagaaaacaggagataaaccagtgatctcttaataggagaagccaaaattacagttcaaatcatttatactgcaaaaaagcaatgaacttgcctccagtgggaaagttcctgtaagtaatttaggcaaaagataagcaaaaatgcatactatacctcatttcagtacacatagtgaattattagttgctttcaacacaaggaaggctaatttattttccttaaagttctttaaatatctctgaagaaaatgtgacgccaatctaatgatagctcgttcagattgatttttaggtttattttatcctctgtgtgtaggtgttttgcctgattgtatgtatatgcaccacatgcatgccccgtgcctgaagatgtcagaagacagcccgagctcccctgagactggagttaaagatggttgtgaaccaccatgtgggtaccggacaccaaacctgggtcctctgtgagagcagccgtgctcttacctacttagctacctctctatcctaattatagtacgtgtccaaatgatggtcagcagctgactctgcacacgacactcctctcagttggctttggacttagagtggcaatctccaactttcatcatacctggtacaaacaatggcagacacttcgaagctgtgaggggaattctgaggaagagctgatgatggcatggaagaacttctctgtcatctgaaggaggttcctctggttctcctcaaggctctcagagggttctaacctgtaacaaaggaaagggaaaaccaaacatacatgactattgaaacaaaaatcacccctcacaagacctgatcctcactgaaataaacaacaaatttgctacaaaaaagaaaagaaaagaaaagaaaagaaaaggagcagttataacagcaagtgcatggctcccactaatctcaatattcataaggagacagtgacagccataagtttgaggccagcctcaactatacagtaatggccaagtctctagaacaaactaacaaacccaaaattgaaattccaaaactcagaaggtgcccacaggaggactaaaagaatgaccttgaggtcattcttagtttggtagcaagtttgaggccagcatggagtacaggacccattcaaaactacaaaaatacaacagcaaccatgacaaaaacaatctggaggaaaccagaatttaacataaaaacagccatagatattacttacatatttgagaattttttgtggatttttttagattactcatttgtatggagagagagacaaagagagacagaaagacagacagacagacagacagaaaggcaggcaggcaggcaggcaggcagaggcaggctcaaggacaacttgtaggcgtcaggcctctctccaccacagtgtggccttcagactgagctcatgccggtaatgtcaacattagtgagtgccagcaccatgttcaaaaagctttagctcttagaatctttttgacttctggatgctcaaccttagctaatctagtaggtagggatcagtccacagtttttgaggttattagagagaactacaagtggtcaaaacgcagagactaagtcagtgagcatgggctgtctggttatgccttaggtataacacaacgttatgcctaaggctcaggaaacatcaaggaaaagggggactgactgtaaaaaacatgaggacctggtcaactactgcttaacagtgtcttttcaacaaaccaggaatgctctcatgaactctcaggctgcctgcttgagacctgcaaagacaataccgtgcccacgcctctgtgaatgggaggagattttaacaaggttccacttctagaagaactacaggcaaccgataggtactgagggggggagacccagattttttttttcctggtattgctattttatttcaaaacgagacctcaatcctaacttttcagccctaaacatatgcaaataagggcaatgtaattggatgaagtaggtcatgtgcatataaaaatttacacacgtgtgtgcacgtacatgtacacacacacagagtaaaacaattctaaatggcttcctacatttgccagtaggcagttggaggaagccaggaaaagctggagtggaactgatgcaaacacagctcgctcactcactcacggaagcctcacctggattaaaagactaaagcaacagaactgctccatctagaactcaggacttgaggactggctctcactgccccacaaggccccatcaagcgtcggaagggaggaggcaataaccagcaggctaccctgcaggctgctcacatgggatctgggacttgtgcttgcccagggaacccgcgttaatgccctcctctcccttgaacatcctaacgtgtgagtttagaatattctcctccccttctgacaatctgtttaatgctctaagtttctagctccgttgttgtatgctgggccaaagtctcagaacttcaaagtccttaaatccttcagaaggacagcttttgtccatatctttctccatatgtgagacagaaaggctgtgggtgtggtggaaggtcaaaggtagctaaaagcccattctctaggtcagataaggctaggaaagagtgtttttctcttgaaacatatgttggttaggaataacagaatccaatgagcatatttgaaatgattctgtttcacctgtccaaagcacaaaggttgtttctctcaccttcctcctggaaactcagcaagcctttgaagtaaaggtggggtagccccttcagattgggccccattaagtctaatgtttaagcaagtccactaattatggtctaagcacccctactagttactggctccagcagctctttcctgtggtaagctctgccactctgtattcagctgtttctacacaagttttggaatggtggtttgccttgggacctcagctctctgacaagttattgacagctagagatgtagctcagtggcagaaaacttctacagcatatgtgagcccatagtttgattcccagaatggcaaaagccaaacacaatctaaactacctgtgctaggtgtttttctttctttcagccaatctgtctctcacttcttcctcttgttcctctggccctgtatcttcccccacatcccctctcctctcctctcccctcccctcctttccttttcttttctatttccagctttccctagggagctaacccaaagccttctgcatttgtgtcaagcatccatcactgaactatgtcctcagcccctcagaattcttagccactttttcttcctgtgaacatagagagtagactttcaaaatcttgacttgtcagagtgggtcacaggctcaagtgtaaacaatcctatgtacctggggatctaaggtctctttctccaagctaaagggtttcatttatatgtgtgaatctgtgtgaatgcatgccacacattcaggtgccctctaaggccaggagataccttggaactgcactgataggtagctatgagccacctgatatggatgttgggaaccgaagagagagaagtcccctagaagaacatcaagtgctgttaatcagtgagtcatttctccaacccctcgaaagtcattttttatctaaaatgaaagttacagctgatttatggatgtctcccttccttatatcttcttagattgtgtgtgcgtgcgtgcgtgcgtgcgtgcgtgcgtgcgtgcgtgtgtgtgtgtgtgtgtgtgtgtgtgtgtgttgctaaggatggaaggaactctgtgtgtgtgtgtgtgtgtgtgtgtgtgtgtgtgtgtgtgtgttttgctgaggatggaaggaactgtgtgtgtgtgtgtgtgtgtgtgtgtgtgtgtgtgtgtgtgtgtgtatgtgtgtgtgtgttttgctgaggatggaaggaaccaagggctcattctactaggcaagttatctaccactcagccattagccatatgcttagtctgccttcttgattttttatcatggtcagaaatgaaggactgagtaggcaagatggctcaatgtataaagagacttgccaagaaaacctgttgatctgagtttgattcttggaagtatactctgacctttacatgtataccgcaaacatatatcaagcacatacacaaaataatatttcttaaaaacagacataagaaacataattaattaggtatctctaatcccataggaccttgtgcaagaacatttaaaactatgtacttttccttggagcttagagtgactatgaaatgaacacggtgagtgaggtaaaggtggttcagatgaagcaacaatctgtgctgcattttgctgacaagagcagactgctgctgatgtctcacaaaataagcatcagaaagatttctgctaaggttgggaataggcttagtggctaggcacttcctagcatgtagaagggctcaaatacaattatcaacatcaccaaaacaaaacaaagaaacaaaaagccccatttacatttagaaaaatcatttccactgcaaacagcttgagtgtggaaaagacaatgttagaatactaataaggacgttggtctgggtgtggtagcatatgactgtagcacttaaggggaagaggcaggtggatctctgcgagttccaggccagcctcgtctacatagcgtgctccaggacagccacaattatgctgtgagatcctgtttcaaaaccccaataataaggaagttatggcaaagtcaaaggctatgctactgcactgcacaaacagtaacagcgctaaactacttaatactgtgcagcagtataaaagagtaacagcaatcttcatccacttccacagaaagatctaaggcctatgaccaaaccaaaagaattgggttgtaaaccacagatttatttttattaccttttaaaattaagcaattacaataaagtatacatcttctaaaattacatatatgtttatacaaaagaatgggaaaaggacagaccggagtaaaccacaacggtatccataggtggtaatcaatgatgcctttaatgatatctattaatgtttttattctttaaggaagatgtttgcatataacctttagtgtaaaaactgcaaaccttttaaaagtgaagagaagggctatagccccaggagagtgagccacgtcaggaagagcacaggtttaaggacaggctgggctacacagtgacatatcgtcttcatgaaaaccaccagaaaaccaaggacaggaacatgagataaaggtgacctcatgcagtactggggaggagtgagggagcaactgtgacaagatgacaaacctggtaggatccacttcaaagctaacatgttgccaatccgaagatgtgatgatgactcgtaataaagggtccaagagcttttgtaggtaagtagcaccatacacctaaagaaacacacagtcaggccaatagccacagccacacatcctacatttaaaacataatccctccacacagtctctaagtttcttctcaacaaacctagtgcacgtgtgcacacaaagtcaatgacaccaaccttgaagcagaatgtcattatcttactggccaagctgttgcctcgaaagagagtctgcatggagtctgccaattctacctccttagaaaacatgttccagagcagctggtagagtaaatgccgggaatcaaacagagtgaccagaacccgagccagctcatcctggtaacaaagcacaattgtgtttctgtgaacaattttacttctcttaggtagatttaaaattttgtaaaaggatagaaaaaaggcagatctaaaactcataataatcaaggtaaacaataacttattattcctaacatttacctttgtctattaaagatgacttttaatacctgtttctaatagctgctaatgctaaaaattaactagtgaaagatgagagatttaaggctttaccagaaggcaaggcagaaagacatcaggatctggctaaattacatcataaaataagtgttcgttttgaacaaactgtattcttagaaatgattaaatacaatatgaccaaggccaaaataaacaacaaaaatgcaaatactaagggattatttaaaaatcagaatggagggggtcggctagatagttaaaacccaaaatccagtcagatttacatacaactagagttaggattgaggctaacagttctattatttgtacaacatcctttccaaattccttaaagtttttgtggttttttgttttgttttacaattattaaaactgtaattcactgttaaacccaacattgagagaagacaaagaaaataccagtagctataaaaaaagagccctcaaccttcaaacagtactaaagtccatcatggtccagagccctgccctcagcctggcctggtcccaagattctaagaacaagacactggagtaagggaaaaaattgaataatccaaactataaataccccagaagccccctgtagttacacaatacatctttgacatctcccctccattatgagttaagaaaaaaggataagaatttagggacaaactgaagttgccgggcttgggctccagctcaggagcgggggtgggagggggtgggggggagcttttctagcacagaaagtcagctgtttcaattccagcacaatagtaaagagagacagcagtagctgttgcttttaggccccatagtaaatgcctttctactctcatcctttctcctaaacccccaaaattctaaacagctggcttttaaaacatgtatttacataatcaaattaaatttttaactaatttcattagagaaagtgatagtacacacttgtaatcacagaactgaggaagtaaaggcagaagagtggaaatttgaggccaggttgagttacgtaagagttacaaggagaaaaacccaccacattgttagtagatatccgtgattcctcaacagctctgctaataaggttggtcttgagttttttgtttgttttgttttgtttttcttttaaaaagttccaagctactcttcctgtaagcggccagaagagacctgtgaagatggtttgctactctcttgacccaaaaaaaccccacaaaatcacgcaaatcaagaggtccaaaccttcatgttcactttaagaacactcgggaaactgcccaggccatcaagggtatgcatatccacaaagccaccaagtatctgaaggatgccactttaaagaagcaatgtgtgccattctggcggaataatggtggtgttggtaggtgcagcccaggccaaacagtgggccaaacaggctggatggtggccaaaaaagaatgctgggtttagacgtggatgctctagtcattgaacacagccaggtgaacaaggaacctaaggggtgccgaaaaaacctacagagctcttggccgaattcacccatacatgagctccccctgccacactgagatgatcctcactgagaagcaacagattgttccaaagcccaaagaagaggcagcacagaagaaaaagaaatcctggaagaaactgaagaaacaaaactcaaggcccgggaataaattcagcatcaaataaatgcagataaagttaaaaaaaaaaaaagttacaggccataatgagatcttgtctttttttaaagaaaaaagaaagaaagaaagagagagggagggggggaagggggaagggggaagggggaagggggagaggagggaagggggaagggggaagggggagaggagggaagggggaagggggaagggggaagggggagaggagggaagggggaagggggaagggggaagggggaaggggaggggaggggaggggaggggaggggaggggaggggagggaagggaagggaagggaagggaagggaagggaagggaagggaagggaagggaagggaaggggagggaaagtggggagccacgggtatatcagcagttctcaactcatgggttgagacccctttgagaattggatgaccctttcataggggttacatatcagatatcatgcatattagatatttacattactactcataacaatagcaaaattacagttatggagtagcaatgaaagtgattttatggttggtggtcaccacaacacgaggaactatattatagagtcacagcattaagaaggttgagaaacactggtgcatgtgatcaagagagattgtttatatgttcaaaattgccaaagaaaaaacataatttgggggactagcagcattggctgctctttgagaggacccaagttcaattcccagtacccacatgcagttagaactgttttaattccagtttcagggcatctaacagccacttctggcccctttgggcattttatacacatggtgcacaaacatacatgtaggcaaaatacctatttatatgaaataaaatctcaaaaaaaattttaagtaattgaggcgaggtatgatgttggatgcctttaacccctgtaacaggaggcagagaaactttgtgcatttgaggctatatcctagttctgcacaatgaattccaggccagctaggctacaccagagatcctatctccaaaaaagtaaatacgtaagaggtatttttaagtcaagccaggaatggtagcgcatgcttttaaccctagtactcaggagtcagaggcaggcagagatctctttgagttcaaggccagcctggtctacacatcaagtccaagacagccagcactattacacaaagaaaccctgtctcaaaaaaaaaaaaaaagaaaagaaaaaagaaaaaaaaagaagaagaaaaagaaaaagaaaaagaagaagaagaaaaagaggtattttaagtcatgtgctataaagcttagaaatattagtcagagcttcacagacttacatcaacagttgttttcttgtgttaggagggatcaagaatagggtctcatgcgtgctagaccagaactctaccactaggttgcatcatcagaccttcactcttcattaagaaaactactaaatgacttttaattacagttaaatgctaaaaagttcataatatttactgataatacatttgaagatgtgtgaaaaattttaggtttgaagaaaataatttaggagtactctaataaatgggcataaaagtacaattgtaagtgagtcagctgtggagatgctgcctgtgcccccagcatttggaaaacagaggcagaaggatctctagtcggaagccatcctgtctacacagtgagcttcaggtcagccagagcccacaaggtgagaccatctcttgtcataaagcaagtaagcaaaccaacaaaattgctaagacgatagagctcatgttaaataattttactaataccgaattgaatcaaatcaaagcaaccacagaagtattttagaaagcaggagcaagggtactctagggcagaaacagttatcacatttgagatgagtacacagaagagcctcagcatcagctgaagacagttaaggcagggcccaggtaaagtgcagggttatagggcaaaaaatatgagctttatttttagatacaaaaaccatgatctcacaggctctctgtttttaactgtgtattttcaacgcacgtgcacatgagtagcacctctcctttggtgctgttgggagtgctgggacctcggctccacttcttttacagagcagcagacactcttaagcaccaaaccgcccttccagcctctgctacaggtgggttccttcatttctgttgttaattttatgtaaatggttgctttgcctagggaggcagagagagcacccagtcccctaaaacaggagttacaagtggttgtgaagtgaccatgtgagctgggaatccaaccccagtcttctgaaagactcctgaaccagtttccagttcctcaccctctcattacagtttttaggcaaaaaaaaaaaattattttagtaattagaagtttactcttactaaagtcttttttcttttccttccttgctttcttccttccttcctcttttgataaaataaaccatacgactttaagaaagtgtgtgtgtgtgggggggggggggaagacagggattcactaggtaagctatagctggcctagaacttatcaggtagacctgcctgcctctgcctccccatgctgggactaaaggcatgagcaaaaatatagggatcaacatggcttttttaaatgaaaatgaacaaaagcttcctcaaagttttcaaatgtattaccaagaatgttgtagtttgatgggcagagggtgcaactcagtgataaagcacttgcctaacaagtaaggccctgacagcaatccccagaatacaaaataaatgtagacggacaaatagtcatgtatttctatggtattttatcagtccattttgtttggagacacagacttatacagcccaagctggccttgaacttgctctgtagccgtcgatgacttatgagtcttctatctcttgcctccacttgctacgtgctagaattatgagtgtgtccaccacatccagcatgccttcaaatgcaaatttcaaatgtaatgtaatacttcaagtaaaaattaaggtgtgtaaggcagagatagttattgagcacaaatcgcagattatagatttagtactattaacaactaatagttaggttaactattactttatatatacgtaaagataagagacaacgctgttttacatttcttcccattggtgattccatgaacgtttgtcactgggttggaaagaaagaactagtcaggggtaggagtaccaaccacttctcaatagttagaagcaaaacacattaagaaaaaaggtttaatgactcaagttggttaattatttttttagacagtcttacagtgctctaactggcttgaaactcactattaacaaagaggaccttgaacttctgaacctcctgctttcaccctccaagctgctgagattacaggcaagcacaatcatgatggattttctgtggtgctagggaaagcattctaccaatgagctacagtctcagctctccattatgtaattttttccagttcttaaattttgtcaattcacttaataaacacttctgaggatacttattttgaagcactagctgtatgtcaagcattctattaccctactttctcaataaacttacccactgagaacaagggaccacattggcaagagccatagctatagggagttctccctggtctcccatcattgtgaccagttccacaagtctctcaaatcgatctgccaacaccgtttccgcaagtgtatcgaattctgttccttgttgaaggatttttgtcagaacttccataaacgtagctcttgtctgaagatccttgtgataacctaagcctgatgaggatagacagatgcaaatttaccaccacagcctggctgaagcaattttcattttgcatgttatgtcaactctagatttttatgttttatgtctatgagtgttttgcatgcctaatgtctgggtatcaatcacatgtatgcctggttaccacagaggcctggaaattaaacctaggtcccatggaagaccagccggtgctgtaaaccactgagccacccttcccacccagctctctaggttttatatttctgctttggttctgtttgcttgcttgcttgtttgtctgtttacagacagggtcactggtagccttggctgtcctggaactcactgtgtagaccaggctgaccttgaactcatagagatcttcttgttccttcctcctggttaatgggattcaagttgtgcaccatgctaggccagttttttatgtagctttcatttgatctcacctatggagtgcatgagtccactgtccacattagcattgagtaagtttgacattgcaagcactgtacagtgcctcagggatgccagcctccgagacatgccacgtttcctgccacccgtttgtgcattttcatcttcaacttcactacagtcattcaaaaggttcataaataatgtgaagtacctggaaaatacagagactgaccttacaccatgaaggccacaccaaccagcaagctaaccatccattctgaatgattatgtgggccactgtaagcatctgcttttataatactggggtcagaagtcaacgtggctcattattgagttgctggtagcattattttatcctgacaaagtacagtgttcattcctgacataagcacagaaaatgcaccttgtctgctggcaaaagtcagttttaatatttagctacaaaactcatggtccaaaccagttagacattgtcattttaaatgacttaacaggcaatctagattcattacaaggaaaatttcaactatcccactgttttctttaaaaaacacaacacaaattatttttctatcttggttctgtcttttcacaagtagacatgttattttcatgagagcagtcaatggccaaaattagaagcaattaggtctacttttaaatataatatttagctactttggttacactgctgtgggagggagaaagctgtatttgtgttttgtgctgttttttggcggctgacatttacttaaggaataactgtgatttggcctccatcagctccaccccatctccttcttcgggctgcagtggaagaccagcgaggagagaaactactgcttccatgcttgcttggtccagatctctaaaaaaaagtcatttagaaactatgagccttttagacaggaaactaaggcgctctctacttcacttagtaaactataaatacaacctaaataacatcagtaaatatactaagctcagaacacacacacaaagacctaaaactggtggggaaacttacgaataagtaatcttaagcataatatcttcattaaatcaaaattatggggttaagaatgtaatccagtttagcatctacaagtcttgggttcaagctccaatatcacaatataaaaatgaaaaagcaatggtggtgcacgcctttaatcccagcaccccagaggtagagaggcaggtaggtcattgagttctaggccagcctggactacagaatgagttccaagacagctagggctacacagagaaactgtcttgaaaaaccatcaataaataaacgaataaataagtggccaaatggataaattgatgatgatgatgatgatagaagaaactcaattaatcaaccaatcagtaaatagtacatattaccaagtcatacctgaacaaaaaatggatgaaattatcatccaatcacagttaccatttctgatatatatcaagcatctgtcattacagcatgtacgcaattatgccttacaaagactcataattatgttcctcaatcaatgtttttatctaaagtaatacagcctaatgctttatgtatcttctctcaataactgttaaccatacttcctaagctaataccactttcctaagactacctcacatgcttcaactaaaagtccttccagtaaaataataaaaggaactttaaatatctcaaatgcaaaagcttaccacctacaaaacaacttaacacacctagcagctatctctgtactggttttcatgagtaaagtaaaacatgatagaactttaaaaaccgcctctttccctctctccttctccgttttccttcccctccccacctctctctctgtccattttgttctgttttattttacctcgtaagacattttatgtcatcatctgctgcttggtttgatgttcccataacccagtctgttagatattctaccatcttattcctgcagaatgaaaaaaggaaaagaacaagtaagtttttaacacatagtttactgattatttagacaaaagttttatcatatagttgtatatcccagattggccctgaacttttgccttggctttctgactgaaggaactgtaggcatatgctgagaaccaaaacagcgctctactagtgaaaacagctgaggggctagggtgactttatacaacagataccgctatcaggggtgatggaataaaagtcagaaggacacagatacaattcagatgctggttctttgcactgtccctttgcaatgtggaaacagaaacttttagtgaccataaattaattagttccaggaaaggagagaatttttaaaaaaagaaagactgaaaacaaaacagaaaaacaaatgcttgtgggcacagagctttgagaaagttggttaagaataatcagaaaaaacaaatatgcacaaatatgtacctccctcccctccccacacaaaaagctctgctacttttctacactttgtttaacataatacttacaagaccctgctttgctcttctgagaactcacctaaatttcatctcttgacaaaacgagaggtcatctcttcttgccatcatgacttcaactaactgacacaattttgtttttatttgtattgcatggaccatattcccaagaacacgaacgtatctaattaaacatggaattaaaaaaaatgatcagatatggacaaaagataaggtattctaaatttaatctttaagtaaacttaagtaaatgtaattttagacgtgaataatatttaaattttacttaggtaggaacatatacaacttctgattatcttattgccatagtcacactgggtctgtagtaaaacaatggcaaactacttcatcatccccattatcagggcatacgaggtcttacctcttaaaacaagactctgctgtgattcaggacagaatgcttacctgaccagatttagcatcattgtctcaatgctcgcttgtcccagatgctcagagctgccttcagtatgattatccagtaggtttttcattatggctatggtttgctctacaaactgagtattgctgtcacttagtaatacctatacacacacacacacaaaaccaaaaaacagcccattagcgatctaacatcaatgaacagaaaccattatcagggcaatgaaactgatgtaaccatcacacgcaggcacactacaggcaagtaaacaaacacacagatacacagaggtacgaggcacacagccaagactcctaactccaggcatacccacaggcctgagttctttagaagcaagttgatccctaggttacatgattttttttctgtaattatgaaaggttttaaagttgtaagtgaattatcatgttggtctataatttaaataatttgaaagaaacagtcttgatttatttcaaactattattatattcataaagaaaggtaaaaaacaaagtggagaagacgtcacctgtccttgagagtcaaaaaacttgctgatggtattcttcagtttgttaaacagcattggatacagagcaggactcaactccagacccaccaggtccttaacattggtccgtatctgaagccccactttctcgtggttacacaccattaaggacagaagccggtccataaatctgctgacaggtgaatcaatattcccttcagaagacattacagaaatcatagaccctttgcgttcactgacagcgcccataggtgggctgtatgtcgctaggccagagctgcttctctgttgcaggcacaccccaccaagggcacaaaggaagccagtcatgttgatccactcctgcagggagtctgtgtcagacaagtctatggagcctcctccactgacatgggacatccgtctcttaacaatggtcttatgaagactttctgcagcctaaacacaacatttttgtgaaaagcatgaattcaacatagactgaataaaaatcttacaaattactcttatccatttctaccagtaggaaaggtacattttataataataataaaaaaaacttgaaactaccacatacattattattttttaattttagttttatgtgtataaatgttttgcctgtatgtatatatgtgtaccatgtgcatgcctaaaagctaaataaaggaggatgttagatttcctggaactagtgttacaacccattctaagctatcatgtgagtgctagaactcacacccagatcctctgaagagcaaccagtgctcttaaacactgagccatctctctaatccctaccatacacacattagagagccacttaatacatttttgtcatagctagaataaaatcaccctgaagtgtcaaattcctttttaaaaatctctgatgtgtagtgatgaaccttaaacaatttaaggagaaaaaaagctagtcacaaaggcccatatcacctatgattccattggacaaaatactcagagaaggtaattttgtagaaatagaacatagattagcagctactcaaggctggagcggtagagacagagaggtaggaaatacagcaagttagagctagaaatagctaatggggagcaggtttggtgggagggggcattctgtgagagcatgaaaatgtactaaaattgattgtgtataaactgacagttatagaattctgtgactatactaaaaacaatcattaggttgaccaccttatgaaagataactctacagtatatgaattctatgctgatttaaacagtcaacacccacactcccaccctcaaaagaaaaactttcatgactaaggctgtattatttcctcaaaacaacttttacttgctctaagtgaccataacaagaaaaacagcaattggaggataaacagtttgtctcaaagacctgataatgaaagcagtatagtaatacaaattagttatacacaaaccagttaattcttaatttctagggtaatagagaattggtggtagttgctgaataaaatgattcacttgatgataatagttaaataaaatgtccaaagtttaaaattgcactcaaccttaaagtgcgctcgattatgtgctcagcagcccctttaattagagtatctaagaatacagcataatgagccagacagggaggcacacctctgtaaccccagctttggaaagttaaggcaggaggatcactgcaagggcaaggacagcctgttctatactttaagttctaggcagcaaaggtaaataaccagatcctgtctcaaagcaaacacacgttacgagaattcttagaaatattctctttctctatctacagctattagatcttttctaaacgttctttgaatacttcaacaaaggacaaagaacatcaatgagtaactggtctctcaactaagtggtttctagcagagatatttaatattcctgtagtcatgtaaccttttacatctctactatccaactgagtaaataaatactgaaccttggctactataaaattgaaaaagtaagtctaacttgtttaattaaatgagttaaaagtgacattctaacagatacatgtggctaatatctacaagagtaggcaaacagacagacagaccacaggtattcttaaaacaactccatataatatcctactcttcgtagctcatcaaggattacttaagtgaagcaacagatctattaatacacaaaaattcactgaaaaaaacaactcacctggccatcttccattttggcttttgggtagttaaggattagttttgtagcctgttcccactttgcatgtgtatcttcccaggcctaaaatgaagtcaattatcactagggagcaactttaggggtgaattcaaagtcaacatgtaatgcaggttctgagaataccctacttgtaatatgcacataactcagctttgcttctcaagttgttctgatcacatagctaacagtaacatagggagggggaggtgctgcagctgctgaggccatacctcaatgtttcctgcagtagggtgctcaatgcgccttagcagggccatcactcttttctgaagcgctgctcttcctaagcaaagacagcaagcaaacccagttagtgtttagagccatcttcacatctgggagcctgccccacacacagagtagagtgaaggaatgaaacaaatgattctgatgatcgaggtgagcacgtgctctcaccaacctctgcaagagtattcattgatccccaactccaaaaggtctacaacataaaacagccatcttcccacctatgtttatggaaatatatgcctaggtgtttaaaatcttcccatttataattcaagcagagtaatttctataatctataactaacatcaacttacagtgccagttaccaataagtttgaatattaaaaattcagtaaatttcaaatgtcactgaattacatctaccttgttcagaaaaggatttcaagtaaaccgtatgaatttgtcctgaaaactttcaaactgttctttaaatagactccactgtaaaaataattagatgtcagtcaaagtaacatggttaaaaagagtaagagaaaaaaaaaaaaaaaagagccacatttacctgttgacatcatattgctgactgaggcaaattccatgaatgtgttatagttgggcaagaagttgtgtactgacacttcatctaccccacatcgaatatctgcttcttcacagaggtggcggaaacaggacatagcaaccagaacagcttcagtgtcaggattccacagaaacatgtataaggccacttctagcttggtctgggcttgtcggcatataggtggggttccactgcaccctgctgtgctatcctgggaggaaggagggatgtatctgcaacttaggtgactttatttacaaactcaacaatgtaccatttaccatagcacacaaaataaataagaatttacctttctaataataagatctttttctgatgtgccttactctaaatcagatgtgaaccaatatatggttcatataatggtactgcatttcaattggaatagatattatcctagattccagaaatgcagatagtctgtaacaaatatacaattaagacacagagaagctggacgtggtggcacacgcttttaatcccagcactcaggaggcagaggcagaggcaggcggatttctgagttcaaggccagcctggtctacagagtgagttccaggacagccagggctacacagagaaaccctgtctcaaacaaacaaacaaacaaacaaacaaaaagacacagagagtccaatgcagtaaaactgatccacttgtgggtcaaccataatgacaaaggaagaggtctatagggaagaaacaaacacccggaagcactgactgaaacaatgacccacaaactaacactgaggcagaaacacttggaaagccaatgccaaggacacaggcgaagcacacattgcagctcctacagggctcattgaggtttctgcctcaacaggctacatacagtgaaacttaagcataacaaggctctctgtctgaaagacaaaaccttccatatgattttataattctgctcatattttgatttatgttaaggacatttacatacagaaataaatgtcctgctgtacatagcaatacagatctataatcttggcactcgtgtggaattggcaagaggatcaaagccagcctggcatatttgggacctagtctaaaaatgtaaatcttgccaagcacgactgaccttaattacagtacctgcaagggtgaagcaggaggattacagcaaattcaaggtagcctgtgctgcaaagcacgactatgtcaatacagatatacatgtatgtatacagaaataaataaaaataaaagccgagagagagaaagaaataacatcttagcaacacttatccaaaaattaagcaaactactgtgttttatttttaattaatttgagcctcctttaattcaactcctacatctgaatggcttgttcacatcagaatgattagagtggtcagccacacggtcaaataatcatgtactgtttacattctacctactcgaatcctcaaaactctggagcaacaatcttatactggttttattatttgttattaactactattattaattgctttctgattattcattttgtggaagacagtcttactatgtaaacctaccttcaaacttgtcccctctgggacagagggataaaccaacggttaagagcactaagagcaaggcctgcccgtccagagaactgggtttgcttcccagcactcacaaggcagctcacaaccatctgggactccagttcatgggaccagaagccctcttctggcctctgtggggcatcaggtatacatgagtgcatagatatacaggtagtcaaaacacccatacacatttaaaaaaaaaaaaaaaaaaggaaaacttaaaaggctgggcatggtggtacaggcagatatctcaatttgaggtcaacctttgtacacagtaagttacaggatagccagagctattcagtgatatcctgtctttaaaaaaacaaaacaaaaattctaacttgtgatcctcttgcctcagcctctgcaacactgagattacaggtgtattccaccatgccctgctatcatctcctgcaatctgagaaactaaggcacagagttatgaagaatttgctcagggttccacagtgagcagcactacaactaaattctgagcagtctgtaactaatgtgctaaattatttaatcgaaatttaccaacatccactcagaaaggaagagcagagatgatgatacaggagagtcacagagggagttacctaccatggaggaattccctcttcctttccgcagagatgctccaggagtacaggcacgcaggaactcatcatgatcaactgacatctgagtggtatttccagtagcagacatttcacatcctactccataaaggtagagagaatgacaggagcttctatctgcctgctggaaagaagacgtatcctcctgaagcaatgacactgacagagtgcttagtgggaactgactttctattttaaggcagccctggaaaaccttctctccaaaagctttcccgttagaagcactcactaccccattgtggtaaataaggtttgtgcactatctttctttcaaacacctctcagttgtccaacctccaaaccaagtacaatatagatgatgatgtaaaatctatcacaagaaaactgtaagactttacgaatctacagattacagttttgccttgtcggggtactcagcactgctgagtgctctctccagccctcacaaagcacctcggattcactactagattactaacactgaccatgctagacaatatgccaaaggcacaaaattcttaagtctaaaatcttcaggacaaactttgttctgtgacataaacacaagataagccagatacaaataaccttacctctccatcagcagtcctctaaacaaaattgtatcaagatgcttggtaaggtttcttatagctataattctaggcctggattaaaattaattaaatcaagtattctttaaattatgtcaattatgtcataatagaaaaaccttgaaattgattataaaaattacatgttaaaagaaacgttaggttcgttcctgttccccagaacttcaatgtttcaactgttcaggaccaaaaaattttattctaatttaaaaaaaaaaaagattcctggtctttttttaaaagatgaaatcatccctaactctacagaacttgagtgctctactattaagctacatcctcaggccttgtttgaaacaacatctcaatgtgtactccaggctagcctggaatccactctgctcaggctggcctcaacagtactggaattataggcatgtgccaccatacccagctaacagacaaaatctttaagggagacatacaagtttaacctaaatttaaaacttctgccctttagctttttgaaagattatttcccggactagattagctccgagagccaagtcatgaggacttaaaaataaagagaaaacactatttgagacatctttgattgcagcagcctctactcttcataggcctgacccagaatcctacttaagtcaactagaattcattaaccttccatttaccaacttaaaacctagaatatttaaatgttggactaccagataataccttctgtacttacatttctcttaagtatgtcattgagtgaggagttgaagtaggatataatctagctaataaaaactttttaacttgttctgtgctggttagctttttgtcacctgctacaagctagagtaatcttagaaagggaaccttagataaaaggatgcctccttaaggctggcctgttgacaagtctgtgggacattttctccattaatgatcgatgtgggcgagctcagtccactgtcggcagttgtcacccagtggtcctaggttgtataatgagcaagccagagagcaaaccagtaagcagtgttcctccatggcctctgctttagttccttgtcttggcttcccccaatgatggattgccatcaagacatgtaagacaaatacacccaacccaagttgctggtcctggtgtttatcatagcagtaaaatgaaaacacatctccttactattcagatatttctaatttaagaatgtcactgtgcagccgggcagatgtggtgcatgcgtttaatcccagcacttgggaggcagaggcaggcggatttctgagttcgaggccagcctggtctacagagtgagttccaggacagccagggctacacagagaaaccctgtctcgaaaaccaaaagaaaaagtcactgtgcttaccttatttttaagaagaaatttatttctgcagatcagaatttcccgtaaccacttgagaatttctgtgctactaagcatttgatggctagttaatttcttgcagatgtaaaaaagcatttgtgagctgcagtaacataaagttcactgttacaaaatcatcacgaacctaatacatatacgtaatcatacataacgtgacatatttcatagtaggtgtacgtttagaggcttagttttacttgtttacaggttttatccaaatgttaataacaacacattttaaaaaattctattcttgcggtggggataaaaaaaaattataaattcacatgcacagcaaagactgcagagcaagagtagtctggagccagggcctaaaaactgttgcttgtaggacaaagccatgcctcctctaacatctataaaggaggtttcaatggaacacagccacagtccctcattcccagtctgtaactgctttcttgctccaaacgtgaaagtacagactcacaacagaatgggtgagccaagacacctggtccatttcccaccctttagagaacaagattgctaattcgttctgtatactctatgatactatacaattgtgctgtttagctacgagccgcccacgtgtgaccacttgagtactttaaatgaagcttgtccataatgaaatgtgttttcatatgtactgtagtaagacacactacaaattttgaagactttatgaaaagaaaaatataaaatatctcactgacaattcaaattgattatatgcttcactatttcgtatttatatatgtatatataaagttaaataaatgcatttatgatgtgttaaattaaaagttaattacatatgtctccaataactatgtcattataagaggttagattttaactcggtctccacatacctaacacaccatgtctatgatgagacaatagcaggggcctaggtttatagatttacatcttcctaatgtagtgccctcatgcttattaaagaaaaccatctactcagcttcagaaaggtatagtgaaatcctgtacatattttcttatttatacatatatgcctgtctgtaactgactcactaaaaccactagtgcatacagaagattgacaaagatcatagctccccccttcaatgcatatcatatactgtactactgagccacgtgcttagtttaaaaatgaaaagctaagttacaaaatgtcaatacttttagtcttataactgaaaaaaatctattaaaaacaacaattatgggactggtgagatggctcagtggctaagaacactgattgttcttctgaaggtcctgagttcaaaacccagcaaccacatggtggctcacaaccatctgtaatgagatttgtcgccctcttctggtgtgtctgaagaaagctacagcgtacttacatataataataaataaacttaaacacacacacacaattatagccaggcatgataggacacacctttagacgcagcactccagaggcagagggaagtggatttcttggactttaaggccagtctgatctacacagttaagttctaggctagccaaggctacatagttagaccctgtctcaaaacaacaaacacaattgtaactgcttagaagtacaccacaaaggataatacatgaagtagaagaacttgtagccagctgataaaaattaacaccatttttaaacttttttgcatatatgtgttagttctctgacagttaaatattctaacattttcaattcaaattaaaaacaaaattgaaaaatatctacttataacaataaatataacaatgaactaaatattatacagctaatatttaaagacaatagccaaattaaaatgtgaaaatccatatacctgatttcccagaatgtctctacaggagcgtcaggattccagagatcaatgctatctaactgatgaaggaccagcaaagcctgaaatgtacaaaggagaaggcactgaaagtgctttaggaaaacaacactggagcactcgttttacaaatgctaacaaactcagctgggtctgtcttaagaacagtgaaaaacatgtttttgagagccagtcagaataccaaccccgaactaactccctctgcccctgccatcattactctacatggcgtacacagggagctgtgaatgaactcagaacaatatacacacacaaagctgcttcaagaaataaacaatgaggtttcaataattaataactctagaacaaagtatctcccctaaaattaacacacacagcaatattaacccacacaatgaaatagtagaaattaacttgcttgttacataaacattttagacagaaaagttattttctaaaattgacagagaggcaaaaacaaagcaaactttatgtttaataacagtttattttaaagtatttaatgacgactagccagaattaagtaactcattttaaataagtaacttccatataaatatgctaacttataaattaaaactatcaaagactattaaagcaaagaccctttcatcaaacctgctcaagctagactgcaattccacaatgcttccccattccctagcaaattctattgtgctcagtacagtcagtccatggtaaaaatacatatgggatctgtaagcccctgttattaaaacatcaatgaactgctacctgaaacaaataagtaacttatagttagcacttaaaaaaaaaacagatagtacaaattgcaattcagtttaccattactgtacaaatacttgatacaatttcctggtactttagggttttctattgtttttcatacagtggcatcaatttggttgggaatttaaagcagttgctttctcttgtgacaagagagagctagcatcagtggggcacagtctttatgagctccactgcttcaggggctctaggcctatcatagaaacttgggcaaagtgtttgatgggaaaagaaaagaacctaaggcatactgaggttctcttttggagggtgttgaactgccaaggcacatctgtgtttttgaaggacttcatattatgcatacaaagaagagaaggcagtgttctggtatagtacaaagaacagaagcggagacccaaatcctagctttatttctgtcactcacaaatggtttggcatttagtaagactgggatattttagggttttttaggtgacacattccctgtttaataaagttttttgtttaatctgaataaaaatgtattagttttttgcatttcaatgaaattatataccttttcatgttctcctttgctttaattttccatactgctatatgttatctgacagatagacactgagaagtacctcaaaggtgactatgtcatcatgccaatatcaaagaatacactgacattaaaaagatggctatggagtcattagatgatacaatttgttgggaagcaccttattattgtggtttgttgatgatgaataaattctacacagtgtgggactgacagcttcagctagctccaaacatattacacttatctcctaagcattctccaacacggctgaacgactcacacaggtttgaatggatgtttaatagcatgccaagttgaaataccactctcttaaatataaacccattcgcttactaatgaataattaaggtcttcctgattattagaggaagatacatgtatttttttaatcttgaattatatattatacacaagacaagaaatgtaagaattgattattgaagtgaaaataatcaaaatatttgaatagatcctccaaagacaatataagcaatgtagcaatttctaggatgatctcacacacacacacacacacacacacacacacacacacacacacacacacacacagagtacagcaggaggtcatttggagaggaaagctcagagattttttcactggctgcatgtcccaccaccacctatcaacaccgcccacaccagaaaggcccttcagcccccccttcccaggcatcggctctctgcctgccctcaccaagctgctctctctgcctgtgaagctcgggtaacggagctgtcagaatgcacttggcctttggttatttccactgagcagcatgtcagtgagactcatgcagcttctgcactcatcagtactcatgctggttttgtttactttcagacaggtctatgtggctttgactgtcttggaactctctatgtaaaccagcctcttttggggtttttggttattgctgttgttgctgttactgttgttgtcttacattagttggaatctactcaagaaaaatgaacactctgttcacaacttagatttatgtattagtgacctagaggccatcaatttttcttctcttcttcttcatcatcttcatcattttagtgacagggtcttactctgcagcaccgggtgacctggaactctccatgtagataaggctgtccaggaactcacaactatcctgtctcttgcctcccgagagctgggattaaatgagtgtgccaccaatccagttcattttattttcactactgcatagaattcagttaaatcaatataacaggaattgtctactcggctgacacatctgaatggctcatactttggaggaagatacaacacaagctgcactgctgaccattttgtgtgctttgtaagtagacatgtgcacttctgctggctctatgacccggagtaaactgtcagcatttatgtttagctctgatattataaaatggcatttaatggtagttgtactaaattatactcagtagtatgtaaacgaaaacacagtatcaacattttaaaatttataaacttttttcttactgatttctatcttaattctactatggcaataaaataatatttcaatactttgatagttttaagcctacccctatgttaaatatcttccaggtatgcttgggaaaaaaaaagtactgtctgaattcagtgtcgtattctactgaatgataacaaccccaccctatccttacccaccggatgttaggaaagtactcaggaacaccactgcatctgcactgtaaacagcttctttctttacatattttgttttatatatcctgaagctttagaaacttcatgcacttttacttcctagactgaacctttgcaaaaagatcttcatctctctctccctccctccctctctctctctctctctctctctctccctttctctctctctctctctctctctctctctctctctctctctctctctctctctctctctctctctctctctccagtgaatctgaggctagagagatggctcaacagctaagagcatttgctgctgctcttccagaaaacttgcctttggttcctagcatccatctcagtaggtgaacaaccacctgcatgtaacctcaactacagggagccaatatcctcttctggcctccctgggtacccacacacacgtgcacatacattcacagatacacatccttacacataaataagacacctttactttctatgtactacactacacttttctatgcttgtactatctttcttccagtgttcttatagctatgctatatctcttctgagaccacacagtaagatttttgcctcagttagaatttactcaagaaaaataaaaaaatctgttcacattgtgtgtgtgtgtacctacaggctatcaatttttttccttcttcatcatcatcatcatttttgatgacagagccttactttgtagcaggctggcctggaactcgacatgtagaccaggctagcctcaaatttacaattgcctctgcttcctgaatgctgggaatgaaggtatacaccaccatacccagcaaaagctgtacttctaaatagccaaaagcaaaacacaaatgatcatcaacagataaatgagcaaacaagttgtgctatattcatacaatgggacactaaacagaataaaacaggaggaaccttgagataaaccaaccactaacacaatacaattacagcaattatgctgaactaaaaataaaaacctttatttcatttatttaaaatgcaaactaattacattaacaaagcaaatcaattattacaaaggagccaagggaaagacacggggtaagaagggatggggacggcaaaggaatacaaggctgacattcaatagaagtgcatgttgtctaccaattgagcccattagtgaacaagccagtgcaatattcatcaacaaccaggaaaagggaactaacatgtgtgacaatacaagagtgtcaaaattcttttcctaacttaagggaggtaacaaaataagggtagtattaactgcagaaaggaaactttctgggctgaatatattcttaagtcttaaactagtcgtatatgttaattataaaaaaataaatttcatttagattaaaggtgtatgtttaggttgtcagtacaaaaataacacttcaaagtaaactctgaggaggtccagtgaccagcccaaatcgggatccatctcaaaggcaggctcaaaggcctgacactattactgatgctatgatgtacagacagaagcctagcatggctgccttccgagaggcccaaaaagcagcaagacacagatatttatacccaatcagtggactgaagttggggacccctggggttgaattagggaaaagctagaagaagctgaggaggagggtgaccccataggaagaccagcagtttcatctaatccagaccctgagatctcttagacactgagccgccaaccaggcagcatacactagctgatatgaggccctggacacatatacagcagaggactgcctggtcttgcctcagtgagagaagacacactaaccctctagagacttggggtgggttggaggtggagacatccttttgaaaactgggggaggggcgtatgggaggaggaactgttggtgggcggaccaggagggggataacaactggactaaaaaaaagaaaaagattaaagataattttaaaaacaagtaaactctaagctgatgagctggctcagtaagtaaaggcactgctgtcagtagaagcctgacaacgggaggtcaatccctaggacccagtggtgggaagaaagaaccaactcctacaagttaccctctgacctcttcctatatgctgtgctatgcacacatcctcccatacaataaatacgtcaatgtaatttttctgttgttttgagatagggtctttctatgtaggcttggttgagattagcctgcctctgagatccacctgcctctgtatcctgagtactaggattaaaggcatgcaccacaaccatccagctacaaatataattttttaaaaagtcacctttgttaacacagtaggtttactataatttaaaaacaaacaataatgagtgtcatcaacaatggagaaataccaaaacaccaatacactgctaatggaaatattaaatgatacagtaactttaatagtattatttgtagaaatcctcaaacagaaaccacactgaacgtctaccatccactacctggctcagcagtaaggaacagttacagaagcctgagcacctgagttcaatcctcggaacccatataaaggtggacggagaagagaaacgccacaggctctcccctcatctccagacgtgccactgcgagtgcaggcacaccctacccccattatgcagacataaaaagaaagtaaggaataaagaaactacaaacttccaaaaattttttacacaatgtaattcaaatacaacatgacttgtgacatacaactaaaattctagctagtattacagttgaaggaggaggattgttttaggatttagagaccaggcaggacaatagcgtaaaaatcttgtctcaaaaaacaaatgaataacctacagctggttaggtatttgctatccaagaccagaaacctgagtttcctctgattttcatatgcacacacaaacaatttaaaatttttaaaatatatttttaagagaaagcacatagaaagagtcaaataattgcttaaaaaattaagttctcagaaaaagatcagagacagttacagtctttctttcaaaagcccagaattcacttcctttacctccatagcctcctgagcgacctctggcatgtgtgactgaggaaccagttgtacgagccctgtaattagttctgctgtactgctctgagtttcagggccctgttttcttggattctgtaggagaaaaacaaacttcagttttgcttttaataactgtatttattatttatatattatttattatttatatgcatgtgtgtagacaggacatgggtgcaggtggccatggaggcagaagagtgttggcttccttggagctggagctacagtcagtagtgatctgcctgcctgtgtctgggaaccaaaggcaggcactttggaaaaagcagaaagtacttaagcactgagccatctctccggccccgtcaatcttcacattctgggttgggggggtgggggtggttttgttttttaagacagagtttctctacatagccctcactgtcccagatctcactctagaccaggctggtcatgaactcaaagatccacttacctgttatccaagagcaacgttagctaaaagatatttaagttggaccaggcatgacaaaagtctttaaagagaccattctaacacagtgcagagaaatgattggggaatgtaagaaatggtagtagctgggaacacatagagtgacaggaaccaggacaaagatggtacaaacacaagacacaatcaaattacttcaacaagatcccatgatggagaccatctttacatttctcctagtaactaaggtttagaatttatgtgtacaatattgttttactttcctgggttactgaggaaagtcacttaaccactagatggcagcaaagaaagcactgtccatgaagctaggcagctgtcctgggtagtgacaattagcctatcaaaggaaaccccacccaccctctcaactcccccaaacacaaaacaaagcccacaaaacgcaggagtaggccgggggtggagcttttgcctgctttacaaaactacctgattctggttcaatcatcctcatcaagggaagtaaaaaggattccataactcttggaagacagcaaattttacttaaaaactattttccctcaaacaattcaacccttgttcttcaaacaataacctatttaacatgaaaatcactggtgaccctggttcactggtgaacataaaactgcagccaagtaaacagagtaaccctagcatcctgtagcaagcacagtgagatgtcaccacagttcatgccacacacccgagaaaccaaaagaacaaagttaattttcagagtccactaacaaaatttttaaaacttttccaaactaaagatttaactgtttattctattaaactctcaaatttgggtggacttttcaaaaaacacaaaaagataataggtcttcttttggggtaacccatactttaggaacttcatccactctggctctattatctctcattatcagaaaaactattcatatgtaaatattttttaaaattctagagtggaggcatgacagtacatttctgtaattccagcactcagcaacatctagttcaaggccagcctgggatacccaacaaatctgaggtcagtatgtcatacataataaattcaatgccaacctagtatacacagcaagattttgtctcaaaaatcaaacaaaaacacgtgtgtgcacacacactcaaaacgtggggttcatagaattcttgaaaccacagccacttagtcatgaatgccttcattttagtaatttgaagagcatagctgcaaaaccataaagcaccaaaggatgagcctgacactgagtaaagcagaaggctttacctgatggtctagagacttgataggcctagtgtagcctcccccaagcctgaagcaagctgagccagaccttgactttgctatgccactaaggagatcacctagggtggagcctgcctccctggatcactctgctgttcagccactgcctctgctgctacctgctgggagtccgcctacacgtggtcacctgcagctcggctccaaggatgatttggcaggaatgggcttcccccctcctttataaagcgtgtctgccattaaaaatttgagccttgatcagaatactgtcttggttccatatctctctcttgtccacctagtttccctcttctttttcagttccaggctgcctcccaggctcgaacccagacatgagagcagcaggccgaccccaacagtctaggactatagagacttgataaaagttaaacagaccatcctgtgaacaattcaaactgttttacttggacagtaagaatgctaacgctaactgtatcttactaaaaatagcagtaactaattttattgcttactatacactacgaattgttcctaaaagccttacacaatctatttcactcttaatggtctctctgaggtaggaactatattactgcctaccttttcagatgagaagcctaaggtgccgagactaagtaaagcagtccttccccagagcctgtgcttttaatcctttactctcacctggttacactatttacatcagttctttattactctgtgcaccaaagtgaagctctcaggaatataataccatttgcgggaataaaaagcagagctatggcaataactggatactaaccactctcattttaactttctcttctaatatggttacaggcagagccaatgataatagaaggctgatcaaaggaacacacagggagctagctatagaagttaactcgcttagcaatagcaaaaagagtgagcagttcagatgctgagcacaccgattttacagtcatttgtcccacctgaccccagaaataggtctgattataatgcagaacaagggcaaatgatgctactatggacagttcaatgcggagggaacggttagaaaatgtgatctaagtatattagaattcctggaattggctttcttagcaatgttttagaggttactcataatttaaatgtattttggcctttcagttcaaatagattagtggaataatttcaaagcatttcattaaaaatacttacacaaagcaaaagctttgggtctgcatgaatcagtttcaccatggacaaaagaagacatttgtagctccttgtctctaggtctgtaggcttttctttaaatttaaggcttgttaccttttctttaaaggtgagactctaataacaaatcaaaaacatggcatcaccttagaaacaatcagacatcagattcagaataatagctatactttataaaagaaattatttaaaatgctttgaaaaaaaacatttcataccaccaaatgtatgatactggtagaaacataagctaacaagcatacatttaatattgcattttttaaaaatgttttatagcatttatatcattcttatataacaatctagtaatatataataataataataataatctaaaacactagaggcataatatcaagttgactcttgggttcaaaaactggttctcaaatatgaaaatagtaagaggaaaaataatgtatctatatcacacatgaatatacatactagagaattcaaattagcaaatacttatatcacatgcacatacacaaatacactatacactgtaagatgcatcacttggctggactaaaagaaatgaaaaactattgtgaatcctcgatatcacacaaaggaaaataaacatccactttcagatagaagtaaaggtatgttcttttttttttaaatatttattattattacgtattttcctcagttacatttagaatgctatcccaaaagtctcccataccctcccccccacttccctacccacccattcccattttttggccctggcattcccctgtactggagcatataaagtttgcgtgtccaatgggcctctctttccagtgatggccgactaggccatcttttgatgcatatgcagctagagacaagagctctggggtactggttagttcatagtgttgttgcacctacagggttgcagatctctttagctccttggatactttctctagctcctccattgggggccctgtgctccatccaatagctgactgtgagcatctacttatgtgtttgctaggccccggcctagtctcacaagagacagctatatcagggtcctttcagcaaaatcttgctagtgtatgcaatggtgtcatcgtttggaggctaattatgggatggatctctggatatatcacatgcacatacacaaatacactatacactgtaagatgcatcacttggctggactaaaagaaatgaaaaactattgtgaatcctcgatatcacacaaagaaatgaaaaactattgtgaatcctcgatatcacacaaaggaaaataaacatccactttcagatagaagtaaaggtatgttctttagagctgctgaaacagtctctgtaggcaactctgcagtcatggctttagttaggaacttgctcttttattttgacggcatttcctctttaagttaatagaatgcatgcatttgtctttttgcctaagaatattcataaaacagaactctggtgaaaatgtagttcaattacagagatagtatagatcaacataattccgaatgttagtcgatttaaaaaaaaatctaacaattgcattcttgattcactgtcgctctatccctctccagtctatttcctttaactaacacacacagacacacacagacacacacacacacacacacacaatctacttttgacctggatgcctacagtgagtacatagaaagatacagggatggcagactatgaagcctttattcaaccatagcaaatgtctctgtagacaggctattttcttttaacaactgaagatgactatatctatatcacccaacacacacagtgctcaagttttaagcatttaagaaatgaaatatccaaactctccaacactaaaggaaatgtttgtcagatgtatttaataagttctgtggaatgtttgctctatagatatgtgtgtgtgcttgcatgtgcatgcatgtgtatgtttcaaggtctaataggaaatcaaggtgaagccttttactgaacaaactcactatgatgtgacggagagtgacatggcactgcacaggaagtacacagtcagaggacaaccagcaatacataatacatctgattcagtaattgttttttaagtaatttttggtttaatgtcaggtactaacatgtaaattttgctctatagtataattgactagtaggaaatctaaacttgagaaagtccaattacctctttcaatctaatggccattagtgggttatataaagtcaggaacaatcagctgcttaacaaactgtttattaagtagaaaaaaaaagacttcatttactaatttatcttctgtactacaaaaattagtaggatctaaactgacacatatgctctgattaaagacagtcagctatgtcagacaagaaattcctaagttatttattaggaaccaaaaccatctgccaacttgaaactttagggctgactttacggcatggtaagcaacatctatgccaagatatcatctaagaccaaaatttaaaacttcacattttaattaaagcatatttctagttttaaaatataaattattactctcagacaaaaatttcaaaaagttaaaattactactaaagtgccaaaaaagaaaaagaaaaagaaagaaaaaaacatgggtataatcatcatatgaaagcagctagttccaatgatcaaaagcagctttagaccaaaacctagaaatggtaccagacaaacattatgaaggcagttctttaaagggccatattaatggaaaaaatttattaaactggttttgtgaaagataaataacccaaatagacaaatttttagttcaatcaaataaattcatccacaaaaatcactcacaaatgcacacagcataccagcatgcccacggtgcctggcacacagcataccagcatgcccacggtgcctggcgctgctctgggagcttatgagtctgtgttgaagcagtgaaagtgtcatcatccacccagctaacctgctagtgaaggagggcaactgaggagctgagcagacactaggcaggcgtcaaaacaacttcagacctaactctgctgggccatgcgacattctaattcctgtaaccacatttggtcttagtttgcttagttatcaaaacaaatcaaacaaactttcaaagagttaaaacaataaaatccaatccaacacaagctatatataataacaactcttaggaaactgggttttaacttcattcaaaacatcttcaagggtactctgtagaagagtcagaaaggaactgggatggcttcaactacaacatattttcatcttattgaaaaaaaaaatccaagtagttagttttttaagctttaaatttgtttttgcatgtgtgcggtttgtttgcttatatgggtatcatcttcccctagaactaaatataaggattttcctgagccaccttgtgggagctgggaatcaaactcagatcttctctaagagcaacaagtactcctaactgttgagccatctacctctccagtcctcaaataactactactttctaccaagtaacttatccccaaaatatcagcagttgtcaagctttgaaatatagctgcctgtattcaaatactcattgggtcctccaaaacagtctacagaagagggtctacatgtagcatcagggaacctggccccagctaattctgattgggaaataaagatatgagcagtcaatagtgagggagaagaaaaagatagggttttaggtttcccagacttgggaccacaaggaagaggaagaaaggcatccgccatgcttcaggagagtatggagagaggagagacacagaggccaccatggaatagagaagcaaggagaacaccccaggctctgggccaagaaaatgtggcccagagggttgactaactgaactaatgtggccaagatggaactcagaaattagtgagtagtaacttggaattatcggcgggaggtacaatctaacatcacagagattaggcagtcgctcagctattgtgctgtttaaagtgtattaaaatatagaggctgtgtgggtgtctttcactcaggaacataaaccactgaggcgggaagcaaccccacacttgagatttatttattagaaaatcaatactatattgaaacacataatagtttaccttttcatagacagaacatttttgaaacatgattttactatgaggcaggtaatggtggtgcacgcctttaatcctagcactctggaggcacaggcaggcagatctcttaagttcaaggccagcctcgtttacagagtaagttccaggcaaccagggctacaaagagaaaccttgtctcaaaaaatataaatacatattaaataatcaatcaaccaatcttgtatagtcctgacttgcctgtttatgccacccaagaccttagattaaaggcatgcccattatgctcagctagaacttctgcattgctatgtctacagcaaagcaaaggcatagctcaattcctaagagctaccaaaatgatttcaggcaatgtaaacaaggcacaacccatgatcctagcattaacaccaggcatatctgtggtctattcacacattaacaaagaatagtgtttaccttaaagatttcccaaactctaaaacttcctgtttttatacaactgggttacattaatttgccattttctctaatggaaacactaacagaaagaaagttttcctacagccattacacatacattcacaatactatacatacaaatatacagactttaaaggtctagagaagtggctcagtggttaagagtgtactctgctttaccagaaggaactcctatcagatggctcacaatcacctgtgactccagctccaggggacatctaatgcctctggcctttcatgtgcacacaccgacacatatactcatataattaaaaataataaaaaaaaaatgaatcttttagaccactgaggtagaagcaggaagacagtgagttcaaggtcagccaaagctacatagcctgtatctcaaagaaaaaaaaaaaaagcttaaaagtgactctgaaaactaaatgtatactgatactaccaaaaataataaataaaaatataaataaaacaaatgtttatcatgtcattgagccacaagaaatccttactagctacagctttaagaaaacagtgaccatagcataatgtaagtcctccaagtgttaactaacaaccaaatctaagaaattaaaagtatagattatcatctgtcaggctaccaaccaaatctgtggccgttcaaaagaataaatgaggttcatttcatttcagcactcgtgcataaaaattaagtggcagaggtgttgggttgaatataaaacaggaagcaaatatggttttccaccaattccaattatcttcctatcagtataagaggtaagaaagcactttacactgagctatggcccagcacacagcaagctgaggctggagacacagatcagtgagtggtacagctggacagaggaaagccctcctgggtttgacagttagcatgccctcctagtgcaaaacacaaggtgggggtagattcaaggaattactacaatttaaagaaaatgtctagttaagaaatatttacatagctactctatatgttaccactaacatatatactgtaacaatttttttacattaaaggtattgtatacataccatcacaaaaagtaagctaagtaagcttgaatattaaattttatttaataaaataccattgaggcagggggtgtagtatagtatatgttaggcgtttatgggaaacctggtattgatcttcagcactgaaggaaaaaaaaaatcaatgacatgccctttcagctattatttttagcacaaaaataaatattttaggataaaaatacaatggtaccttgtatagaaaacttcctcatttgaacacctggcatattttttaaatccttagaaactgcttctgacagctgggcaggactgagcctaactgtataaaggaaagtgctgtgtccttagcatcttggaaagataagcatgctggagagccacctgcttaaccattcgtgtaagatgcatagtttattagataaaaccaacaggtgaagacatgatacattttcatttgaaatgacatgatgtgactataatggtaactatattcaaaaaagtcaaagaaatcaaggacttttctgaggtagttacaatggatcatatgtacttccagccacagaagcccactgtgacacagtgactggctagcacctgaccacgtgagcaacaacagccaataagatcggaaagtaagcagaagacaaagcaccaccagtcaacatcaagagtcgccatgtaaatgctcttcctacacatgagtaaggaaaccatgggcacaatcttatcattagctatgaaaacccactctctatggatttatagtctttattaactaagctcttggaacacaatttcaaagtaagcctttgttaagtttcaataaacatcaatgtcaagttcctatcaatttttgctaaatgatcatatttactaaaacataaatcctttaaataatagctgttttactcggtttctaattttccgtataccattcagcatcaggacactcactctaacccaaggtctgaaagtaagaaacaaattaaaacaactgagtaagaaaaagttaaaccaaaaacacaagaaagatgacattcattaagatgttagcattttctagaaaactttaggaaaataaagtttagtgaaaaataactactgttaactgggcagcaatggcatggcaatacagcattcctagagaaggaaggacccagtcaacccgttaactccatcagcaggaatgagaagactggaaatgcagtacacaggtggaattcaaagctcatagtttcttactggtgccattcgtattgctgggtgcgctccacagccttgcactgctttatgaagtgtttcaccaaacatattgcgaagttcaactgagtgacaatatacagcatcaatcttaggccaccaatccaacgcagactgaagaaaaaacgagagatcagagtacaaaaatcacacgggctgtacacattcttttactgctgtataccttcttttttttttaaacacttttatacttttctgaaaaactttctaagaccatgcaaacatacaatatgattttcaaagtcttcaaatgatatctttaagtcaaacactaaccagacacacatgttaaaatagaatactgagtgtgcaaatgaggttgtcctttctcaacaatgccatattaaatttaaaaactatttgtaaaattcttcaaccaatttttatcttttaaaaaagtttagtattaacaaatttcagaaacacatgcatacattatatatttttcaccaggtaagaatgctatcatcacagttttccatgagattagtggttcaacacaatgttgaaagactatgtaaaaccattagtcaagtgcttacaaacaacaattaacatgaaattagtaaatggaataaagccattagtatatcaataatcttttacattgataagcagatggcacaacacatggaagactaaatggtcacccaaaacaaagacagctgatcctagctaagtatctttgtttttacaaagctagacattaaagtcaggaccctgggatgtgtgtatgttaagcaagtgctctaccactgagctacatccccagacctagctaagggtttataaaataattattctatatagatattttcctatttccatttagccaatctagctgatttataaaatctgtttaagtgtatccttaaatgacttttgctttaaatttaattaatatatttcaattttaaatgcttgaaaaataataattgtgaaaaagcattaaagtttatcagtttatagaaaagtgactggataaactttcactacttatataggctatacatgaaaacaatatgctctaaatataaattttcaatttgtaatactttaattaaaaatctgatattaaataacacagtcatatagtaaatacatgtgacttaacagcttcatcctacttatagtttattcttcatttaaaaaaaaaatcaagctagtcttaacatttaagtttctcacagctcacagtattttgagttacaaactctctttacagaaaaactaaggcaagcacagtagtgtacacctttaatcctgacacaagggaggttaaggcatgaggaacttcaatgatatcctgggcttcacagaaagacttcatcttaaaaaataagtaagatagaggctagagaagtagctcagcagttaggggcactggctactcttacagaggaccctgattcaattcctagcacctacatggcagttcgcatctatctgcagctcctgctccagaggatccaacaccctcttctagcccctactgacatatagtaggctaaacaaccatgcacattaaaaattcattaatttaagaaatataaatgttaaactattgtggttatgctgtctctcagttatttgatttagccaattcctacacactggtggtgtttactgtctccgtttcttttcatgttgttgtaattagatactctgacaaaagcaacttcagggagaaagaatttatttagctcacaattccaggttctagtggcaaggaagttaaagtggcaagagctggagagagctggtcacatcaaatccataagcaggaacaaagagctttctctgctcactgcccagggaatggtaccacacagtggtcaggggccttcctatctcaattaacgtaatcatgatatcaatcttcatggatatgctcaaaggctcatcttcagactttattgacaacactaaccatcacaaaatataacacatctctcagatttgaggcactgatctgcccaaggccatcagtgatcagtgtaaccagatttctatgttttgttaatcacctgaaagtaacaaaatgctcaatgatttaaaaaaaaagagtacactgagtcctgacttcttcctatacactgcataaaatcttggcagaaatcaataaactaaatagacaagcatctcctttaatatcttatcaaactactgggagtggggggttgctattttcagttttggtttagtttacatctgtttggtttttgacacatgttcttgctggaattcactatgttgtccaaactggtctagaacctgtgattctcctgcctcagcctcttaaatgctagaactacaagcataagccaccacaaccaccttactatgtaatcatttttgataactgcaaaactgtaccacagtaatatgtatgcactattgtactggctagttttatgtgtcaacttgacacaggctgaggttatcacagagaaaggaggttcagttggggaagtaagtgtctccatgagatccaactgtaaggcattttctcaattagtgatcaagggggaaggtccccttgtaggtgggaccatctctgggctggcagtcttaggttctataagagagcaggctgagcaagccaggggaagcaagccaataagtaacatccctccatggtctctgcatcagctcctgcttcctgacctgcttgagttccagtcctgacttcctttagtgatgaacagcagtatggaagtgtaagctgaataaaccctttcctccccaacttgcttcttggtcatgatgtttgtgcaggaatagaaaccctaactaagacaactatatattaacttttagacttaagatttaaaattttttataattttctattttcataaggaattaattcatttatttcaaagtaaaggctatattctcaaataaaataggcactaaagattagacatccctgagttaataaaactttagtgttttagtcagttactaagtgtgtgcattctgaaactagtcaatgaaatagacatttccccttaacaatagtttattaaaaatattaagactaatataagtgaattatgtacattcctcaaggttatttaaataattttcaagtaccctagaaatacttctttaaccatctcttgccagagattaccttcaatatatgaactattaaaaggcaaactacaataaactgctacaagaaaaaaatctgcaatgaactactgtcctatctgtagcatgttgacttacatgtatatttttaaaatttcctagctgcacatctaatttaacctttaaaaagcctataaagatgatacagatgtaatatagatcttaaaactatagtttctctcttagtgcacatcattttcaaaaagtgacagtataaataccactttagaaactactaaaaaaaaaattaccactgcatcaaaattcaaatagtgaatagactttaagaatctctaaaagaaattggaatgttttagatttaaacatagtacttataaattgtgtatgaggacatctcacagaagcaatataaaactccaaacataatttctcattctatataaacccacaaaaagattacaacttttatcttttaggagaacataataattttttaaagctgtaaactggcttagtagacatggaaaaggtgcgctgaggaggtatactgaaccaaagcatttaaaaagaaaatatataccaacaaattaaagatctagactccatgaatctaggaaagaattcatattacttgaaaacaaacattttcctactaaaagtttccagtaaaactctataaaactcaactgtataaatctgcatatttactgttacagtctttaacaattaaaagtactttaaagtcagtattttttggcctcaagtcttggtagtgtggactctaataaaacacaatttactcagcaatctctaaggatgaggtataactaaagtataactgaaagtcactttggaagctgggtacagtagctcagtcctttaaccccaccactcaggaggcagatggagctctctgagtttaaggcctgcctggtctacatagtttcagaccgtctaaaactacatggtgagaccttgtctcaagaaacaaacaaacaaaaagtcacattggcattatctgagttgtttacaagctattccactcaacagatgttgatgtatttaaagactagtcagtatgggtgctttatatacaaatgtccccggatgcagacacactctgccttcatacatgcagcactcctcagaaaggggagaacacgctttcaccaggcacacagacggacggaggcatgcaggaactaacactccaggcatgcttgaaacccagaaagaagcagctcagccacttacagcagtgccaagtccatgcttgaaagtgctctatgtattcaattatagacaaaaatatttcacaattaaagtaactaatcacagaatatccaaagactataaacttggatttattaaatgttaaccattcatataaagttatctaattaagtggaatactttcaatattttgaatcaaggtaggcaactagtattttggaattacatataaacttatgggataggaaaatcatcttttttgttgttttttaaatttaaaactaaagcttagaatgagtcaatgtgctgagtcaatgagacgatggcctgagtcattacactggcaaatgtacaggttttgatataaacatattctatctacacttagattcacaatactatcctcattggaactaactggattaagtgtaacttatacctctatcagtgatattcaaatgagggctgtattattcctaagcatttagttgttcataatgcaggagatagagcgtggttgccgtttcatgaatgatggatgtcctgcaaggccaggctaaaacagagacccaacatcctaaaatgctactagcactccaccaagcaaaatgagtatgtcactaagtagcttgatcagcagttattttcccctgcaaaaatacctttaaaaaagagtaatgttaggtttaatttgataattccaaggcaaataaaggaatgggtattattttaattcacaagtcataacagaatttagaagtaagacaaatactccaaagtattagtcatcaaagactttaagggaggaaaaaaagaaacaaagtgaacaagttactcataagtgtatcatatctgccaatgtgtaaaagtagtactaagaaaaacatacatgactaagaatgtccatacatggagattttaaattctgcagtccacatctactactaccttcctgtctgctttccatttagtacacacacagcacaaatacctctaatgaagtcagctattttctctgaaatgcttttgtctcttgtggtatttattttaaagcatgtgttttattctaattaaggggatgaaaaggtaaaatcaaatgaagcttcaccattttaaatgcccatagctaggctgtactacaattactcttccttccaacttaacaaagatagtaagaaagaaagcactaaattgtttttcagtggcattgttctcaacagattttgaactttaaatgacactttgtaggcttattccttacaaaagattctattaactccatccctctcactaaaagcctcaggtagagactgaatatacagctgcagctggacatcaactgctcgtgggatcatcttagggaagctctgctttacagaaaggtctaagttcagaacagttgataaaaccagaatcttccttaaaaagaaaagaacatataacccaaatcaacaaagagacctttacttgttagtagtacagtactagcttttactttacttgttagtagtacagtactagctttagacttacattggtgatgatgcggtgcagtgagtttaccaacacatagtgaaatgtagaaggtgaattctgagccaggcagatctgccaaaaaaaaaaaaaaaaaaaaaaaaaaaaaaagtacattaacaaacagagagaaaaaaacagcaaaaagtaagttactttcaataaaataaatttaaggtgttgaaattaacatcaagaattagagttaagaaatattagtaagaggctagaaagatatctcagagtttaagaccaatgactgctctttaaaacgatctaggttcagttcccagcactcacacacagcagttcacaattgtctagaactacagttccaggggacacaatgccatcttctggcctccgtcacccccatacacatacatggtgcacagatataaatgcagctaaaacatccagatgcatgaaataaaaataaatcttttaaaaaaaagaaacactaatgaaagtacacctattcatctttatagtttctgcattttatagagataaccacatcaatattatgttatataatacatatatataatatgcatggttatataaaacaacgatctgaccttaaagtgttggttgttgtgagggcttatccgaaagcaagagacaagacagtcaatcatgaggtccacatctgcaggctgactgcctctagagaatggtttacttggattaaaaagcaggttctataaaaatcccaatagaaaacaatggcctttaaatagtcatgaagtatttacttaacaaggaatataaacataatcaacattagtcacattgattataataaactttagtcgccggaaaaagcactaaatactggttactatagtctatcgatatcatctacgatccaagcatctatctatacattaaggaaacccagtgcatatcagtcttcctgttctcagtctaatgagcacagtaacaacaaaagcaggtcctctgaacacaacatctaagttaactcaaaatttagagttagcaattatcttcagcagaatatttatacaagaaggttatccacttaattttcttaaagtctatagaagggaaagaacagcatattaccttaagatcaactaccatggactgaaccagtaggaaaatgacagaattatcttcccagttgatgtaagtacttgctttacacaacttgacacaagcaatggcagcactctcagtcagctgcctgcttcctccatggccagcgagtgctttccgtaaactgtccagaaacagcttctacagaatggaaatacaggaagacaaaacacctagtttgtactactacagataaatctaacaaagtagcaaattagccaactctaaaactccaactataaacacaaatggcttgtatttggctatcatttcatatttaaagagtaagcacttttttaaaaatgcatgaaacacttttctctactttctctgttgacttactatagagaaaggaaacattccttactatacatttgaactaagtattagttgactatatctttcctttcgatgttacctttgaagcttaatcattagcctgtattggttgtggtagactttttttctactactctagagtatagaaacctccagtcttctaaacaatatacccaagggtattctgttatctaaatttcatttctagaaataaaaaaaaaaaaatttaaatgcagctttgccacaagccataattaaagccagctgaaacaagatgttccttaggagctcagggccctacatagacctagacgaagatggaagcagcaccagtatctaacagacttgacagctaataaaaaggcagtccatgcagaattaaaatgatactgaggatgatgatgacgcccagtgacgttgtccagtcacctgtgcactgcttttgtgatatgtcctgaacagttcaggactgggtcaaatggttatagagaccttatgaagatcactaggaaatcagacctgaccaatcaaaggaggaagacagaccggaccaactagatgtgcaaagaatctctaagtgtgccaggcctttgtccttgtatgttttaattttaaaaagcagcaccagcaagaaataaaactattaaaaattaactacccagaagcaatggttttgggtagttaagaccacttgctactctttcagagaacaagaattcagtttatagcacgcacactgagtgctcagaactgcttgtaactccagctctaaaggatcttatgcctctgttggaacacaaacatacacacagagcacacacacatttttttactgaaaaataagtaataaaaaagcaaaaaagtcgatcttgttaaaagattcattttagtttctgtgcatgcttgtgtgtctgcttgctttatgtgtgccatgagtctggaacctgctacccatcacgcacgcacacatacacacagagcagccagccaacctacagaccaaccaaccaagtgttatgcatgcatgcagactgaaattaccaaaaccaaaactaaatgtggtgacattaaagactctgaaagccaggtagggctgtaacatgattatataaaaattgtacatcaataaataagaataaagtgaactcaggtcctctggaagagcagagagtactcttaaccaattaataaccatcttgaaaatctctgcttttttaaactaatgataataaggaaaatttagaatcaccaagacctgatgattttaactgatttttatctaactaggttatttcagcccatagaaaaagatgaaaatttccaatttttattcttagttttgcagaaattaaattgttaggacagttatgtttcataatgaaaaaacatagtcaatatacatttcctcaagtcattgtgctgaagccttagaaaatgcattgttagctatacaatttatttgcaaatagccagccaaatttaattcataaacataaaggtaaattatatatgtctaaatgtattttaatggtgaatacaagcttaaataacagaatttatctggtttactattattcagcattaaaaccaagagaggtcagagcctttcagtcatgactataacatgagtaatctctgctaagggcaaccaactgtttgacctagcatggacataactaaaatgtacaccttgaataaacaagctgctcccatcaggagatggcagccactcgtttccctcctgaccttgtttatgttgctctcgtccaccacatccttggagatgtcctggattatttctggacacaagataaggagaatgatttgtaggggccacactgctgctttacgtttggtgctttctgcaaaaccatccaccaagtcaaacagcttctctgcacattctgtgaaaaatacaaacattaaatgattatattaggcaagaaaatccttgcattaaattaaaacctagaattattaaaacactcaactatcacagtctaagagaagtgtaagaagagctaatgtgacacatcctagaagcattggtattttagaatcgctgtgtgttgtcacagtctcagggtctcacagagaaacaaaaggctgatagtttcccgggggtctctagcctctactatgcaggcgttcccccaaaattgctattcagaagtaaaaatagtatttcctccttagatatacctaaatatagaattctaggaaacacacactcacaagcacacacatgcacgctgtgagaaagccaccagtattcaatcacaacatgaaagactagagcttcacttcaaacttcttttaccacttgctcagaagggaaaggactggaaataatacagaaacaggagagaaaactgtaattcctgttagagctgaacaaagaaaacagaaaaaacacttttgaaaaaaataaactgaaaagcagcacatttccctctgagagtttcacaaggtgccatgccgcccctcaccccacacccagtcactctttagccagcttaccagccatatctgtctgtggaatttggtatagctttgtaaattcatccggataattttctacccagttccaaaaagcctacaagtaacaaaaatacatgtttttataggaaagcagtcaattttccaatatattaaataacacagaatttaagtttcttcacacaaatatcgtgttgcattcttcccattaagaggaagtaccacacaagtcttgactttcttatactcaagataccgaatacagccaaggtcataatcaaaatcaaaacttgcatacccaagaggttgaagcttaccttttctaggctatttataactgccaactgtgcaaccttcttcagggctttaaatttaaatgctgtttctggagggaaaaaaatgctttattaactctcaattatttaacaaataaaattcagaactactataaaataattttataaactgttttgcttccagtattattaataagcaatttaataataaaaataaatataaacccccaaacccatgagctacattgatagagacagaagtaaatgaaaagcaaacatgtcttgaacatcaagttttccctttgctctatttttaaattgattaacaaaacaaacaaaaactataaacatggggactgagaaatggcttggtggttaagaacactagacactctaccacagggcctaggtttgatacccatcacccagaagggagctcagcatcaggcgccctcttctgtcctcttcggacaccaggcactcacacgccacacagacacacgcagccaaagcaccctcacacatacgataacaatatacatcttatttttaagtctattaaataatgacacagaagtcagtcatgatggcaacaccttgtagatgtagaagcaggatccctgtgagttcaaggaaagacctggtctgcagagaaagttacaggacagccagagctacatagagaggccttgtcccacaaacaacaacaaaaacaaaaacctatatgggctggagaggtggttcagtggtcaagagcactggctgctgttcacaggacctgagttcagttcccagcacctgttcacaaccatctataacctcagcttcagaggatccaacaccctcttctgctgtctgagggcactacatgcatatgcacacataacaaaaccttaaaaaaaaaacagacactggttatttaaatgtttttcagtcatacatttaacaaatctctagcatttcagtattttgagtagtactgataaatacttatacttaagtaaagttttatccaccatctttttcttcaacgtaagcaactgtgtcagcaaggaacaaatactttctgaggattttgaaatctacagagctgcttttcagaaaagttgtccactgagctgtatactgacgatctgccacatgcttgccatcactgtctagtaggacagctttaattttgataatctgaatacttagattacactttatctttgaattcttttaatttttaagttaccatgcaaagaattgggtatcgtgacatttcataaacatgtgtcattctatgttgctctccattgttatccctaacctacccggttttacctgcctcctcctagctggctccctttcttcctaaccaggcagtccaaccttctgcttccatattgcacatattccataccctctgtttcccctttacttaagatcttttccgtttcatgatctatctgtagtgtgtgtgtgtgtgtgtgtgtgtgtgtacacgagtgcgcatatgcacataaacacacctttaaattcaagttccctacagaaaacaaagcatgacttgtttgtctgaaccaagcttatttaacttaacataataaattccggttgaatccattttctggaaattgtcatgatggcatttttcttttcagctgtataaaattccattatcataatatagcattttagttttttattttataaaaatattttttaataaaaaacacgaagtagaagtctggccaatcaacacagaactgctaccacataaaaaggcactttaccaaactctgctccaagaacatacaaatgttttgttttgttttgttttgttttgttttgttttatcatggctatagtaattgtctatacttttccatttaactattttttaaaattccagactggagagatagcttagtggttaagagcactgactgttcttccagacttcctgaattcaatttccagcaactacatggtggctcacaaccatctgtaatgggatctgctgccctcttctggtgtgtctgaagacagctaaagtatattcataagcaataaataaacaaacaaacaaacttccacatctgctcaccgttatcttctgctccagttacagaacactgggaagtaggttggttaaaataaccctcctgggcagctttctgctgaactttattttgcaatctgacatctgtggctgtaaagaatcacactatgcccaacagtggtagccttaattggtgaatccatcttcctcaccacagactgtgagctgcaagtgataccaactgataggcttccttgtgagacctttgaaagcattacgtgccaactccaatgtcttggcagtaaggtgccctgtacaaagcagcagtggcacccacatacccatggcccatgatgtgcatcttcaagtgttcgttgatttggcccacaggaaactacatagccagctctctatgagcaagaaattaacttagccttggccattccactagcctttccagttttcctccactccaccacacaaatgcctactgttgcagccaccaccactcactgtaccaaatattctgtatccattattctcttttttcttttttctttttttggttttttgagacagggtgtgccaccactgtccggcttccattcttctcatgatggacattcaggctggtttatttcctaagccaccgtgaattgtgtggcagtaaaaatggatgtacaagaatttctgtggctatacaatatagtagtatatctgggtcacatggtctgttatcagtttttctgaggaacccttcaaactgtcatagtggagtttcactgccaggcagtggtggcgcacaccttttatcccaacacttgggaggcagaggcaggcagatttctgagtttgaggccagcctggtctacagagtgagttccaggacagccagggctacagagagaaaccctgtctcgaaaaacaaaaaaaagaaaaaaaaaaaaaacagaaaaaaacagaaaaataaaaagtagctactcaggatcccactagccccacccacattttcccctctgttgtcttttgttttcttgacaacgtcccaactgaagtgagacagaatctgaaagaggttttaatttccatttccctgatgtctatgaatgttgaaaactttttccaagtatctactggtcattgtatttctcctattagggactctattcagctcatgagcctatctacagactctaaaatgattttagagtttaattttagcagttatttatatatcatagataccagtccccagccagatgtaagcctggaaatttcttttcccaagcctgtaaatggtctctttactctagtgactgtgtcctttgcttggtagcgatttctaatctcatgtaactctctctgccacgtcttggtattgtttcctgtgctatagtccttttcagaaaattcttgtctatgcctatgtcttcaaatatttttacctgtcttcttctttcattagagttttgatatactgaatgtcatggtttgaatatgcttggcccaggaagtggtcttgttggagtaggtgtgtcactgtgagcgtgggctttacaaccctcatcctagctgcctggaaatgaatactctgctagcagccttcagatgaagatgcagaactctcagctctgcctgtatcatgcctgcctggttactgccatgcttctcccctgatgataatagactgacccctgaacctgtaagccacccacaattaaatgttgtcctttataagacttgcattggtcatggtttctgttcacagcaataaagccctaactaagacactgaatttattgttgcacaatatgtatagaaatccagttttcaagctggagaggtggctcagaggttaaagagcaccaactgctcttccagaggtcctgagttcaaatcccagcaaccacatggtggctcacaaccatctgtaatgggatttgatgccctcttctggtgtgtctgaagacagttacagtgtactcatataaataaaataaatcagaaagaaagaaagaaagaaagaaagaaagaaagaaagaaagaaagaaagagagaaagatccagttttcccagcaccacttgttaaagagggcaccttttctccaatgcatgtttttgatagctttgtcagaaacttaggtaatatgatggctaatcttgtttgtcaacttgactatatctggaatcacacctgtgaaggaacatggaaggagaaacttttcacttttgcctgcctgcctgcactccccctagtcaagtgcacttctcctgttgctaaggtaaataggagcctaaaggcactggctggtaaggggtgggatcctgtaacttgagatggagaagtgtaggggacaggtgctgaggactttgacccttcaaattctgatgcgtctgtctcacctgtggcagtagtctgcccactcttagtgtagggtgcggccccactgtcacaccttgcaatatttccttttgtaccttggcctgaggaaattaatcctttgttgtctacaaatttcagtgactttcactgaaagagaaacatcaagcaaggcaatactgatgccgctcagtgtctgtcgacaataattgcctctgaactataatcagtatcaaggctaagaaggcttctaggagcgaaacagaaagtgaaattcacaacaaaggtgtggtacaatactaaagtttactgagtttgtgaattcattcaagccgtagtctgggcaatatatatgagaatggatttttaagggcatgaaataatggtgaaaaaaaaaccataaaactgaatcaagctgaatttattgatatgggcccactgagttaaggttctaagttcaatacagacgttcttacagttaaaaaggtatcaaaagcgtgactggttggctaagcactagccatactctactgaaagggaactgtggatacctgatgtcccttgacttagtattgatgaagggattttagggttcagagaaactgcaatgatgggtgtgctgtataaaaccgaatcctccacaatgggaaggcccagaagacattctcttcactaatcctgtgaggcacaaaatggtaagaggggcaccaggatttgaagggctttgcccccgctcttctctttgtgccagaccttaaggttggagacactgatgctcaatccaaaaagttaaatgggatgggcttaattaggcccccagagtagcagggccaggtatcagcactgcattgccaaaggcaaggcgagaatatttatcatgaagggcagcacagacagagtaacttttatgatggcatgactcctacggatctttttgtactggctaataatgcttccaggaatatatgtttttattttgttttgtttgtttttacatctatataagcaaaaaaaaaaattctcaaacaaacaaaaagaatactgcagagtagcaaaggggtatctcaacttatcaatcaatttccagacttgagctagtttgcagaccccaaagtccttgaatgatgagaaggctaggtccccctgaggaccttgctaaaatacctaaaagttttactgttagcccttctcccatcctatgaccttttacaagggtaaatgtactctgggaaaaaggaaacaatcaggttttccagggtttactggacactcgttttaaactgacactggttccaagagacccccaaatagcactgtggccctccagttaaatcggggcttatgattatcaggtgattaatggaattttgactgaaacccaaatcacagagagtctactgggtccccaaactcatcctgtggttatttctccagttccagaatgtataattggtatagatatacttagacattggcaaaatcccacgttggttccttgacctgtgaactgaaagctattatggttggaaatcacaaattgaagagactggcattgcctctgggaacatagtgaaccaaatataatactccatgctaccatcaaggacttgaaacatgcagggatggtagttctcacatctccctttaactctccagcacaggagtcagatggatcatagagagtgaccactgaccattaaaacttaatcaagcagtgactaaatttcagctgctgtactagatgtgatgcccttacttggatagattagcacagctcctggtacatggtattcagctatggatctagcaaatgctttctatcaattcctgtccataagcacaaccagaagcaatttgctttcagctggaagtcagtagtatgcctttttacagttttacctcgaggttagtacttatcaactctccagtcctgtgtcataacttagtatgaagggagcttgagcatctctctctacaaaatatcaccctggtccagtatactcatggcatcatgttgactgaaccaagcgagcaggaaggagcaaccactttggaaatattggtaacacttatgtacatgggaggatggtaaataaatccagacaaaagtcaagggccttcaacttcaaggaaatttctacaagtccagtggtgatatgcagaaatattccttctaaggtgaagggtaagttattgcatctggtctttcccacgaccaagaaagcagcacaaagcttggtgggcctatttggattccagaggagcatactcctcactttgttttgttatttcaagtaaggaaggaagcttctagctttgaggggagctagaacaagaaagctcgtcaacaggtccaggctgctgtgcaggctgctctaccacttggaccatgtgatccaggagacccgctaaaatggttctttagatggcagtagcagtttatagcctttggtaggctcctctaggtgagaggagacccttgggattttagaacatggatctattgccatctgcagacaaccattctcccattaagagacagctctttgcctgctattgaatgggccaccaagttactatgctatctgagctacctatcatgagctgagtagtatttggttttaccagccataataccaagccatgaagtaggatgaacataacagcaaaccattatcaaatgaaagtagaatatattgtgatcaggctccagtaggtcctgagcaagatatatgaagaagttgtccaagtgcttgttttctacttctgttaaagtgtcttttcctaacaagcatgtacctatgatctcatggggtgtttcctagaatcaactgactgagaaaagaaaagtttggagaccaaggtttcctgatggttctgcacactatgcaggcaccacccaggtgtggaaagctgctgcattataacctctttacagaacaaccataaaaaatgccagtgaagagaaatcttcattgtaaagcaaactttgggcaggtcacatggttgtaaattctgcttggaatgagaaatggccagatgtgactgtttttgaactcatgggctgaagccaacagattggcaggatggttagggacttaggagcatgaatggaaagttagtgagaaaggttaactagggaagatggggacaaatctctccaaatggacaaatgatgtaaagatacttgtggcccatataaatgttcatcaaaaggtgacttttgcagaggggttattcaataatgaagtagaaaggatgacccattctgtacacagtcagcctctttccccagccatctctgttactgtccaatgggcccatgaacaaagtggccatgttggcaaaaaagaacgttatacatgggcttgacaacatggacttccagtcaccaaggctgttctggttatagcagctgctgagtgccagacctgccaggagcagagacccaattctgagccccagatatggcaccattctcccaggtgaccagccagagacttagtggcagtctgacaacactggaccagttcttccatagaaagggcaactcttagtccttactagaatacttactctggttatagatttgcttttccttctgccaaaactatcatccatgaacttacagaatgtcttatccatcatcatgatattccacacagaactgcttctaaccaagtaactcacttcacaggcaaataaatataatagtgggctaatgctcacggaattcactggtcttaccatgttccctacctcctgaagcagctaacttgacagaatggtgtgaatagcctttggaagacatagttacaatggatatcggtgacagaaccctggaagactggggcagggttctccagaaagcagtatgtgcttcagcatctaatatatggttcagtttctccctagccaggattcaggaatccagggatcaagggatagaaatggaaatggttccactcactatcacccctacagtcctacaggaaaaacttttactttctgataccacaaccttaagtctgctggcctactagcttgtgttccagaaggggggagaacttttctgcccaaggcataacatacattccattgaactggaagcttaaacttcttcctgaaaactttgggctcctggtgccctttagagtcaacagacatcatcatcatcatcacaacaacaacagtgttaggaggggtggcccctctagacttccagcggctaactggattgctctgaaggccatgtcttgagtacagcagatcctttagggcatctcttgatgctacttcttctgtattccaacatatcctgaacaccagtagctttctaagacttctctaggactccagcataatattaggaccgctgggacatccagtctggttcttggcccttctgtcaggagacagccattgctggactatctgggccacacctataggttactctaataaatccccttttgggtgtgtataaagtctatttttttctttcttaacaaaaattgtatttactcatatttctattcattactttattatttttgttcttttgacaatttcatacatatatgtagcctatttctgactcctgtcaaacttctccctcttatttcactattacctctatgactccctagaatcctattcacacattacatttttgtactcagtgatgcactgagtttaattagggtcacctgtgtgaccaggggtctgctactattcatcagagaacgataggctgatcaggtggtacacaaaagataacattgtttgctctcccccaacccaaatccattagtagttcatagttcagcaaggaaggggaggaccaaatggacccttctcagatatatgaagactgtagatgggaccagtcttgtataggtccattgctgctgctgctgctgctgctgctgtgagatcatgattttcattggctgtgtcacggccacatgacagtactttgcagctcttctcattagcttccagctcttctactcttcccactcctcattctacactgctccctgagcctcagagaggtagcctgaatgttttgttttttttttttttttttttgagggctgagcacttgcccactacttactctcagtatcttcagcagccatgtgactctaaattttccttattcattatacttttcaaagtagtgtttaactcacgaacataaacctaagtattttaaaggcagcttggcgctttatcaatttaactaaacaacaacagtaagttcccttccagggtcaaagacctcaggcataggaagttaactaggttcacagttccaggcatggactccctcttggggaacaggcttcaaaaccaagcacagagcatctggttgtttccgtatggttgtgccactactgcaatgagtacatcttgcctacaagttggtattatgggtggcagagatctctgcggtgcgatcctcattaatgcctttctcctccagtctcccacatacaacttctgcactgtgaaaactagccagcagggggagctcccacctcagttctgctgtgaaacaagacatgttgcctcagcactggggaaattggacttttgctccccatctgaattccttttgttgctctctcttgacttactgccctaggtaagatttggcatactaaactaagttctaaaagagaactggaaacttttaggttgtttgtttttgttttgctgttgtttttgatgcagtgtttcaatatatggttttagctggcctggaactagatcaaactaggcttaaaccaaagagatccacctgcttctgccttctgagtactggcattaaaagtctgcaccacacaaagtctgaaccttaatctcattctagattttggaggaacttctcctattttcccctcaattagtataatgttggctatgggttttattcatatgcatccttttttatgttttggtgcattcatttatgcccgctgagcttttattataaaggaatgctgaacttctgaagcaagggccttttctgatcacctgtgattaccgggtaatttctgctcgtaaacctacatgctggtttactctatggtttattctatgttgtgttaaaccaacactgcatccctggaaggaaaccacagtgttctggagttttgcttctggagttctgttgagaattcaagttttctttttgttgcgtatttatcactgtactgctggcttcacagaatggtagtactccttcctttgctatttttctgtaaaggaaatttttgtttgacttcggcagtggattccatctgctcttgcattctttgttgggagatcttttattactacttgaattgccttatagctgcttcaatgtctttgattgctatgcatctattgaggctgttaataccatactgactcagttttgatagacctaagaatttacccattttttttctaggtttaccaactatttagaatataccctccttctctgcacttcactaggacctgtagttaactcagcttgttcatctctaatttgatggagtcttgacaagccaggacttgccaatcctgctgaactttccaggagccgactctctgtttccctctacacagttctttcatccttcagttcactgatttctgctctgaccatcgttacttccagctgtcccctgctgctgaatctggattgttcttgcttttctaagaccttgaggttatcattaggttatctgggatatttctgactttttaaatagtagacactcatgtctataaacttttttctcttaaaactgactttcaaagaattcaagattccatgaacacatgtaaaatttgtgtactaaattaaaggcaaaaaagaaaaaagttttctgtcactgtattgcttttgtttttgtttctttgagattgggtctctctacagaaacctggctgttctggagctctgtagaccaggctggtctcaaactcacaagatctgcctgctcctgctcccaagtgctggaattaaaggtgtatataactacatccagcttaatagcatgttttgtaatattaagtattttgaaaactgtattacacaactattaaaacttctcatagcttacataactcaagctcagtctctcaggtcagaaattaagccactgtttgagattttcactccgtcctttgatgtggagggagttgttcgtttgttacttttctggagaccagggcttcctctatagcccatcatgacactgaactcactacatagctcaaactggtcttgaactctccttcctcatctgcccatgtgctgggattacaggcatacactactccagcagctcaaggccatgttcttcaagcacctggacaaccaaacaaattgattctgcgacctagagtcacttaagggatcaaattctaaaaggataacattctccttattaaaagcaaaacttgtagctcaagaaaacttcccaggctggagagatggctcggttaagagatggttaagagcactagctgctcttccagaggtcctgagttcaattcccaccaagcacataatggctcacaaccttctgtaatgtgattccatgtccttttctggaatgcaggtctctatgcagttagagcactcatatacataaaataactttttaaaaaatctttaaaaaaaaaaaggaaagagagggagggagggagggagagagggaaagggaagggaagggaaggaagggaagggaggaaggaaaaagaaaaaagaaaacttcctactgccaagattttaaatatccatattctcagatgaacatgacagtaaagacccttcttgatcccagaactcagggggcagaggcaggtggatccctgagttcaaggctagcctgatctacaaaaatgagttccaggaaaaccagggataaacagagagaccctgtctcaaaaaataaaattcatgttctgctgtattattttcaaatgcccaaaatccagtcaagcacatacatttctggccatttcacaagaacatgcacactataaaatctattttgatatccagttcaaacaagtttactataaccatatctatttaaacctacccttcagaagtcgttttaattttgcacaatccacattgatatactgtaacaattctatatcgtgaacatcaacattatcttctgaacagacagtcaactcctgtaacctgaaaagtaaaaatcaaaagtaatttatcaatttaagtcttagaacagtccaagattctgatttaatagaaagggggtttatgaatgaaagacacataaaataagaacatatttatttaaaaaaaactaaataattcaaccgatttaagagtcatgacaaaaagtgatattccagtaaactttgtatttgtatctttaacactgaggtctgaattgtatttctcacattagccatggctcttctggaaaaactagttaattctaagattggagcatattttcaaatgtatttaggtttccctgaaattgaagacaaggaaattagcaactattatagtcaagtccaaaatcatacagctgtacaatcagacactataactgttaaactgggacaattggagtatcagattttcttcctttgtaaaaaatcacatttatttattatatgtgagcatgcattatcaatcagaaaaacagaactgtcctctctatccaccatacaagtctcagggactgaaactcaggttaccaggctggcagcaagcaccagtacctgctgagccatcctactgcccctgccccaacttttcttttttctacaactgcaatccacatgggggcaggaggagcagtagttactgagagaagaaactcacaggtgagcttttccaacttttagaatcacttcaatctaaaaaggaataatggtggaacaggcctctaccctgcattccctgtttagattatattatattaaaatgatataaatatacaaaaaaaaacagtttacaggaaaaaaatgaaatagtttacatttgaatctagtttcagctaggcatagtggctcatgcctatcatagcccatcatccaagcactcgggaaactggagacaggagaacacaggagaattactgttagtgtgggctacaaagtaaagcctggtcttgagaaaggagggaggaagagaggggaaagaggaaagaaggaagaaaataaagagaaagcacaatttaatgcaaggggctctggattttaattctcacaatcacaaaacccataaagaaatacagtatgtccaatttaaaaataaagaatgatagactccagccagatgtggcggcacacacttttaatcccagcattctggagtcagagacagaaaggagagatccatgagctccaagcaagccacagcaaggccagccaagctacacagcaagttccaggccagctgaagctacacagtgcgaccctgcctcactagtcaaaagagggggcgtggggcgtgcgtggggaatgtttttacttttcccacttccaattaataatcgatccagagattatcaagtaggtaaaatttttatgggaaatgttggatagtccagataatatctatatctaacaactgattggatgacttaagaaacctgtctctaaaagaatttaacaaaaataaataaatcaccaaattaagtattatcaagtctgttataaaaaaacaattttctatgtaagaaagtacaatgggaggagggggggtgcagagagatggctcagctaacggacttcttgtccaaaggtcctgagttcaaattccagcaaccacatggtggctcagaaccatccataatgagatctcatgccctccctcttctggagtgtctgaagacagctacagtgtacttagatataataataaacaaatcttttttaaaaaagaaaagaaaagaaagtacaatgagggctggagagattgcttaaaagcactggctgttcttccagaggactcaagttcgattcctagcaccacatggtagcttataaccacctgtaatctcagcttcaggggatggatcccttaccatcttctggcctccacaggcactgacacacaagtaacatatataaaacaatataaaattaaactctaaagagtgtaataagcctacagcataagacagttcagcagaataaagctatgttataattttttcaattaataaatgaaacaaacaaacaacaactaaagctgttgtgggtgttacagacctgtaatgacagcttctaagagagctgagggaggacactatcaaggctagcctcatctacaaactgagttccaggcctgcctgaaaagcttggtgaagccctttttcaaagtaaaaagaagactacagctgtagctcagtagtagaacatatgacaccctgggttcaaccaccaatactgccccgcccaccgccaaaaagaacatctgctgacaaagaaactggtaaagttcaactcatttttatgatcgtaattataaatgaaatgtagttgggtggtggtggtgcacacctttaatccagccctgaggagaaggaagcaggaggatctctgagacggaggtcagtctggtctacagagagctggctgcaggacaaccagagctacacagacaaagtctgtctacacaatcaaaacaatgaagggagggagggagggagggagggagggagggagggagggagggagggagggagggctggctcaaatcttctatatatacagaatatatagataaaggaatagtagctataagaatagtatcataagatgcccccatgtaaattaaaccatcacagcagtctgttaggtgagtggtcctaattctggtactaagtaaatcaagacacatagctgtattaagcatttatctcatagatcccatttctggctaatctgccaccgaagtcaatgaaactctagccacaacttctattctggcaacagataacaaactactagacttggaaaatcaacaaaagttgcctataaattaactaatgctgccaaacttcatggaagcagctttgggtgagttagggtttttcttttttttttttttttaataaataattatttaagttttttgctgtaggagtgctctgtctgcatgtacacctacaaagcagaagaggacctcagatgcccttacagatggtcatgagccaccatgtggttgctgggaattgaactcaggacctctggaagagcagccagtgtccttaaaagctgagccatctctccagcccaactttagggttttcaaagatggcacatttgttctattttacagaataatacacttactcaaaaactttatggaaatatagttctataaaaacattaacaattcctgcatggatacactaagaaactgtatttttctatattgctttttatcttctttttaagaatttttttccaagtaataaaactaatctcgtactgacctaaatgaaagtgttttactttgtataaccgcccagaatcctatttccctgtttgccaccttgttggctccatcagtgtatggtgactcagaatataaaataaatctacaaggccagctttgtctgcagagcaagttgcagggcagccagggctacacagagaaactctgtctcgaaaaaccaagaaaaaaaatatcatggaaatgttctgttatataaaccttaaccaatgatatatcattaaataaagttttgattttcttttcatagtttattaagactgtaggatacaatatcatagaatattgtcacctaccatcataattatagaacaactttttattaaaaagagttcttttttttttattgcaagtgagttcttaaatagcgggccataaattcttgaattttaatgtatattcccattcacctcactgggaaacaagagtgaacataatagaaacccattcgtgtaactctagtaagtgacagagagaggaaccaaagagtaaaaaggattacttttctctgtttgtatttgtcttttagtcactaaatctttacgtgggttgttttatactttttattttatcataattaagaacccatatgagtgtacttatacaagacaggcaaatcattttcatgaagacaaatcagtcacaatttatttatcatttcatcccactgagcaccattttaaactaattttctcatctgtaatatcatggttatgattttgactgatcaggaaatatttaaacaataattttctttcatttttaagctttatgtgttaggaggtgtaggtcagaggacgacactgtggtagtgattcttggtcccagggataaaacccacatccagcaggcttgctctgtgagggtctttacagaccaagtgattccccagccaacattttctttactttccgtttcaccgaaattacatttttaaaagtttgtttttattttatgcatatggttgcttatatgaatgtactgtgcatgtatgtgcaccacatgtgtgcctagtgtccaaacagggtactgaattccctaaactggacggtttaggttgtgaggcaccatgcagacactgggaaccaaactcaggtcctctgcaagagaaccatgtgctcttaactactaagcgatctctcctgactatttcatttttgaaatcactaaattaaatgtacagtattttaaaattccacaagatagttaaaatagaaatactgaaaactaatataatgaaactaacgtagttcttgaggcctatccaacttagaaatttggaaatgtgtcaaattccattatttgacacaattccttgtttgtttgtttgtttgttggagttttggggggggggttgagacggagtctcactgtgcagccctggctggattcaaactcattaaagattggtcttgaactcctgtctctgctcccaaatgctcagattttaaagttgtgagccactataccagcacaatacatttatttttgaggggtatcaatttatttgcctgtaacaacctttcattatcactgtgagacatggcataaactgtgaatcctcagtaaatgggactttcatagtcactaaaacacacctcactttccaactttgtaattacttccttttgtttctatattacttagattatttttaaggaaatttaggagccatgagaattaggtcattagaatgtctgctattcttctcaactattctacctatttgcatagtttaatctgaagaatatgtttacagtgcctacccatggctggagtgtagctctgtggtggagcacttgcctacatacacaagaccctgaattcaaaccttagcaccacaaggaaggaaggaaggaaggaagggagggagggagggagggagggagggcgggcaccagagagagagagaaagagagagagagatggccatggagatatcttctccaagtctgtaacattattcataatagtattcatgtctaaatatcactatctccaaagtaatttctaatattatataattaaaatgtcaagaaaaatcaatatatagaattccttcaaaaacccagatgtcattctgttaaccactcttatgcagacaagaattctaaaattgattttacttaatttcccacatgctttaggcactaaccttgtagaaatgcgactaaagactgcattgaagttgttgcagctgagagaaaataaaaccccagaggcagaattccgaagttcggctgcatgttggtttccttcacggcaggtgtgaagaaaatggcagatttctggtagtaattgtttgaccagcattgtctcatctaatctcattgtgtcctttggttgctaaaatggaaataatcacataattataaggcttttcctttacctgcaaacattcacagttaagtgtcaagcacacagagaagctggaatagaaggaacagccacacagctatcactcgaattcaacacctgctatcgtttccttgaatttgccacatcgtcctatacctggtcagtaaagaagacatcatcaccctatctttaccattgaagcccgaccctccatcttgcctcacaggtttcctagtttatcagttgatcctttttttaaaaaatatttatttattatatgtaagtacactgtagctgtcttcagacactccagaagagggccttggatcccaatacagatggttgtgagccaccatgtggttgctgggacttgaactcaggacctctggaagaacagttggcgcttttaaccactgagccatctcactagcccgatcccttcctttttagaaacttgcagttccctgtgagttctcaataaactttattcatattcactgtgagtacactatatcatttaacttccagaggaattaggtagggagcacatggcctctgtataatctgaccaaaacatgtactatgcacctcaaataatgctgagctaaatcacatccaagtacattataaacattataatatctcagcccttgtgtatgtcagcttatcctaatgaggatattctctaacgcaatttcaacacaattaacattctaagaaataacaccattccatgtatcaaatacccaatccacactgcatgacactgaaaatgtcttcatagctttttattcactgaagacccaaaagtgattcagaggtcacagcatgactattctgtccttcagtgtctttattctggagcaatttccaccccacccccatactccacatatctcatttttacattccatgaaatttacttttaaaactggcccaactgtcttacagattattggattatttcctaagcagcagctaactcactaacctgacatagttctagggctgtggctcagtggtatacgcacaaggccctgaatacaatctctaattccacaagcaaaaaaggaagagaaagaaaaaaaggaagaaaaaagaaaaaaagaaaccaaaaagaaacaatttcaaagcagaccaagtcaaagtaatatgtaaactatacaggtatactgtggaaatatggcatcattgtaattaggatatctccaaagaatatcagcaaccactctccaagataacattacctctcaattaaaattgttaatgaagaaaaagttgtgaaacttaaagaggcactacaccattcttcccaactcaatcatggttggtctgatacagcaaaaattacaaagtactaagagcactgccaaggtttcaatgtctaaactcccaattccgccccactagataatagtgtttttgttctccatttcacagattaacagagaacaccaagctaaaataccattttagtataaatggtattcctaccattttaagtataaaacttacaaatgctgtaattctggactatggccagagatcaatgagaattcaaaatatcagggactagagaagtggctcagtggtttgaagcacttgttcttgcagaggacccatgttcagttgtcagcacccacacagtagctcacaaccatctgtaactgcagtttcaagggatctgatgccctcttttgacctcctcatgtaccaggcatgcacgcacatacatataaacattcataaatgaaggtaaaacactcgtacacataaaataaaatagataaatacttttttaattttaagagtttgaagtattatgctgggctggcaaaaatggttccattagtgagtacttactgtgtaaaaccaacgacctaaagtcaatccctaaaatccttgtcaaagtggaagaagagaactgactatccaagagttgtcctctgacctccatatatgtaccccatatgcacataaataaaaataaatattacaggagctggagattctgctcagtggttatgagcacgcactctccttgcatgaacttgaacctgagttcagttcccagcacccacgtaggattatgatttgccatcacctgtaattccagctccagggggatcggaagcatctgccctttgagggcacctaaactcaagcacagacccacatgtaagcatacacacacaaatttaaatcattttaagttaaactttaaaaactataaataaatcatatacttttttttgtttctggctcacaaacttccctagagaaagttttgtgtgagtgagatgttttgggtttttgttttccaattccctgcataatcctcgtcacttctaaacattctttctcttctcaactacatcatcaatcctaatacattaaaatctcttccttcttgtggccagagagtggctcagtggttaaaagcatctagaggacttgaatatggtcttagcacccacgtggtacttcacaaccactagtaactccagacccgggagatctgatgccccttctggctctgcaggcaccagtcatacacacacactcatacacacgcagccaaaacactcatccacacaaaataccttttcaaaaattgttttaagtgtcttccctctagatttactgtagagaactcataagagaaaagctattctgaataaaagcaaaattctgtattctgtgctgaataaaaagaaataagctaactagcataaatggagtagacaattttaaaacaaatattcatcatgtatttatataaacacctacccatgtttggggaaaattaagattagggaagaatataaataatgtatgcagcagaaaacatcttgaaaaagtgaaagtcttaattgaaataagtagacacagcgactcagaggcaacctgggaaagaactgcgtggtactcaatgactcctccacatgcctatgaaaatgctcacatttacacaaatcttctggtagtagctatcctcagaaggacagcttcaaacaaagaaaggatagatcccattgtcggggtctgtataaagttgaaaccatatcatgaaggcaggaaagtaagactacccttggtgtgctgaccacattcttccaactatacaaaggcacgggtctaaagatatctgaaaaataattaaatggaatagtgattccttcataaaaatattttcttaaaacaaaatcttaagagacagaaatggggctcaaacttaacattttaagtaaacttaaatatctatgggatttataaaagctgagagaataattttctctagactgagctatcaggtcatctgtattaacagaattcatattcatctaccacaaagactcttagtgtgtcctcagtgtcccacactgacctttcagtgttccacctcattctcaagactgaattcacaaaacctgcctctttagaatgaatttacttaccccagcaagacatttttccagtgtatccaatatgatcaactgagagagatacaaatttttttcagcagcttctccaaatatcctctaaaaaatatattcagaaaatatgattaacacttcactacaaattagcacacatgaaatataaaagactgaagatcaagaaaaagtattactcttccactttgtcttttacattcaatgatacttaaatctatcatttcttcctttaccctaaaaataaatttccaagctaacagaaatagagatattagccaggagtggtggtgcacgcctttaatcccagcactcgggaggcagaggcaggtggatttctgagttcgaggccagcctggtctacaaagtaagttccaggataaccagggctacacagggaaaccctgtctcaaaaaaaccaaagaaacagaggtatttataaaagcctgctgttagctatataacagtaaaacatgatgctttatattttttaatatctataagctggccagacataatgaaaagacattggtagtcccaacactatggaaatagtggcaagaggattagaagttcaatgctagcactagggaagtaagtttgaggcgccagcccagagtatgttatacactctatcggggtgggggagtgacagggaaggaaaaagaaaaggaagaagggtgtgggggtaaataatgaatcaaggagagtttaaaataactcatgagttaagaggcttgtacctgtcctgaattagcatttagctatcgcctcctttgcaaaacaattaacttcttaattcttattaaacagaatgctactacatcgcttacagtgaatcttaagcattcattactttcaaactgaaccctgtatcacctacctactaacaagaaactgactttcggggctggtgagatggctcagtgggtaagagcacccgactgctcttctgaaggtccggagttcaaatcccagcaaccacatggtggctcacaaccatctgtaacgggatctgactccctcttctggagtgtctgaagacagctacagtgtacttacatataaccaataaataaatctttaaaaaaaaaaaaaaaaaaactgactttcattatatattttttcttttaaatttttctgttttctattttatcattattgtacatgtagtgtatgtgctagtatggctgtgggcactccacagtgtccatgtggaagtcagagaatgacaactttcaggggttggttctcaccttcaaccagtttgctccgaggaccagtgacaattacctttatgcactgagccaccttacaggccctgtaacttttcagtgaggtctacatgaatgccaacatccctagagttctaaagaagattgcaaatataaactacagcagtgcgcctgggacggcagcagcatgctcagacagaagaaacactaatactgcgctccacagcaggcgaagagctacagcacaacaggaagtgcatcctgtaaatcactgtacagtttattaaacgtcctatgctttttagaagaaaaaaaaagcataaatttagcaaagaaaagaatctattgaactgcccatacccgcaattcatcagttctgtaactctggtattgaacagccttcttaaaaggaaattctccaaagctgacctgactagaaaactaatcctcagaatctacaaaagtggctgcttcacagctcagcacaaacagcacaaactgagagaaggagacgtccatctactgtctggagaagtatgaagtagattgttaaaagctgttggagtacagaggcggccgggtgggaaggatggaagaaggactggcagctctcagcagtggactcccttgatgaagtcagctgactgctaagatacagagaacgctgctctctaacactgagtcgctaacactacccagcctgcttcagatttggggaaggcagagaaaactctttaatacagcgggaaaaagtaatctcactttagaagtgaaaggtcatactctttttcaccacgtagtttggacagggacaatcaataaatacatctaaggaagcagctaacagaaagcatattaacaaagcctgtactacccagctgaaggcatagcttaggaaggaaggagggaaggaatctatattatgataactttacatacaatacaaaagagatataaaattctaattcccgaataacagagtaattaataagagaagcttcaacgggaataaaaacctgaagtcaaaatttcaaagttactcttgagcttgtccattaaataacttgtgtctgaaagcctaagaatatgttttccatactttaaaacatgctctccaaacttccaaaatcacaacgaaaatgaagcaaattcaccacaaagcagagatcatgtaagtcagatactcaccatattgttaacattctttaggatggtggtgagcccactgatgaccagagaaaacttgtatttggaaatgttgatcagacactccttgttgtgctcggtgctgactttggtatgtgtgttctgctgtcctgtctttattggaagctaaaagggaaaaatagtaagactaaacatgtattttcagtgaaaatcacaactttttaggaaatctttatcaaccatacctacgaatatttatatctcaaactctaatgtacaatgcaacctagaatttagagcaaatcctaagtggcctgttagttttaattttcagtttcccttctgtaagccataaacctgtatctataaagtcaaatcttctatccagtgttttccaagaagaatgatgacctaggaaccagagctatgtccctctagctacaaagtaagagaattccgcaagaaatacacacagtccttcagtgtatgcactgaatgaaatacagacaaagaaaatctaggctgcaaagcactaatcaataggaaataagagcaaattgttcaaattcaataaactataaaatcaggaacagagttaaaactgaccgcagtaaagataaccaaccacacaaccaaggcagtagcaacacaacctagaaattcatctcacaaaaaaacaaattctttggaggctcacatttacactaacctgtggatgagttcaacttcactgcgtaaaaatgcatctcaactcaaaagcataattctgtacgtaagcatcagaaatcaatgcactattcttagaccctggtgatactgagagagaaccaaggaggctcctctgtgagaccacacctacgactctctccacttgagaggtggtgcaagtaaaggtgggaggaacaagtgacatgccagacagttgtagtcagtaagacaggattagcttgacagcagagaagtaacaaacacagaggggatgaggttcagatgtaaggaaggcagtgcacagaaactatagaattacataactgaccataaagaggaggaagctgaacagtagtagcacatgcctttaaatcaggaagcaaaggcaggcagatgtctgtgagttcgaggccagtctggtctatacaatgagtttcaagacagccagggctacacagagaaaccatgcatcaaaaaaacaaacaaacaaacaaaaaacaaacaaagaagactatggaggaaaaaaattgaaaactcaaaaaaagataattttagaaggtgaaaatgtcaactgtgccattttcacacaagtgaaactgtggcttaagtatacttggcccataggaaatggtacgttaggaggtgtggccttgttagaataagtgtgtcactgtgcgggtgggctttggaggtcttctcttatgctcaggttctacccattgcagaggagagcttcctagctacctgaggacgccagaattctcagctcctctaccaccacgcatgcctgcgtgctgccatgcttccagctatgataataatggactaaacctctaaaattgtaagccagcctcaatgaaatgtttgcctttaaaagagttactatagccatggtgtcttttcatagcaatggaaaccctaactaaggcaacaacaatacagcttgtaaatctaaatttccccagcccttccatacaatcaatagaaaatccagaagaataaagctgcaaacttacacacattcacagatgtgtatgtgtgtacaaataggacccacttaacacaacactaggggagtatacgtatacacacaacaggaaacagaaagcctgatgaacgaacaatcttcccaaatgacaatgcactctcaatgaaaacacagaaggcttatataggaaaacacacacacatacacacaacagggatgttggaatagacatacacaacaggactatgcacaagtccgaagaactgtggcatattctaaataacaaataatagaattttctgcaatgatattctgtatccgcaatgatcagtaccttggccactagccagctctaccttgctattgtaaatatctgcagtatggctagtccagataaggaatcaaatgtttgattttatttaaatttaatagttatataagatgcagctatctaatcctattaggcaatgttctaaaccacccaactgaagaatcacttaatccaaaagcagcctattttgagaagaaaatgctgaattaaactccaaattgaccatagggtgaaaagtagacaattaatgggattaaataaaggagtaaggaaaaggaagccaagagaactccaaaagaatgaagccatcttatgtttttaattttatgaactttaacttcaccagctgggttacagaaacccagctgaggtggcgagcgcctctgcggctcagtcagcagcacactgtccccctggactctcttgttccctcctcctttactgtgccaggcttggacactctgcttgtgctacactgcttccccatatgcacctgctagagctagtacacgcctgctctggccacagcccaccagcaccttctaggcccactcaggtactgacacctatctagggatatctttcttataaattctatccttatcccactggggccttgtcatcctgtggcctattgtcccctcctccctgtgtgaactaatgttctgtctggccaccctctacagagtagtctctccttgtctgactctgcctagcctggcaattgtggacactctttctgtcttatgctgctctcctccacagcaatgcctttttcactctgatcaggctcttttacccaagcatgtacagagatgcctacttgctctgttttacctaatggcttttgaactttacagagggagagaaggaaataatggagccagcattttctgtgcaaataatacaactgtagtttaggctggtaagaagcgggctcctgctgaaaagacatttgggaattagcttttggagtttcaatagtggttgcataaataggggtgaagtgagtataaataggttctataagacgcttctgggctggagagatggctcagtggttaagagcactggttgctcttcaagaggtcctgagttcaaatcccagcaaccacatgatagctcagaaccatctgtaatgggatccgattcctcttctggtgtgtctgaagacagctacagtgtactcatataaataaaataaatctttaaagaaaaaaaaagacttaatgcttctgtgcatgaaaacttaggtggctattcagaatagcaggaaaagaataaactaaaactcaagctttcaaggaaaagtgaattcaaggaaattcgcttcttggcaaaactagtttggctccatgcaaatacctttgcctacagatggtttatatctgtatggttttaaaaatggtaattatgtaatacctgttttatgagctcaggattaaatttcaggcttatccatccactctgcccaactttagtgattcatatattattagcttagccatatcctgtatcatggattcctggcttaacaatctgcagttagctcacctttttcatttaactttgctaaaggaataatagctttgtttgattgccaattatagacttaaaatgacattaaaataaaaacaaacttcataattttaagttcattgagtactacataaaggactattacatatgtaatacgtaaccaataacacagactcttctgggagatgtgcttaatataagctacaatagtcaagggtagtttaattttttaaaaaatattaataataatgtgtgtgtctatgtgccatgtacatacaatgcccttggaggccaaaagagaggaagtcagatgtcccagaactggagtttaaagatggtcacgagctgcctgcctgccatgtggctgctggaatcaaacgggtcgtctggaaaagcagccggtgcttttcatcagtcagcctgtgctccagcagagaagacacctccttaatgtgtgtatttcctaatacctaaagatgacatacggggtgttcttcctcctcatgagctatttttcctttgctttcttcctgtgtgtacactaagtgaaatgtaacatcacccctaacttccattacagtctgagaggccttttagaaactcattagaatgtacacagaagcacacattttagtctgtgacctttcaaagaatttctgagtgaaaatagaaacaaactactcattgttcacagttctttgtttaatgttatgctttcttctaaataactccctatttgttgagatcttatagtagatcatattttgctttaaatagagataattcaaaggtgcttctttttcctttttcctcaggcaacctaagccctttatattctattatgtccaaagatatctctatattctactatagctaaagatatttgtaatatagcgtatttttgaagtttaattcacttttccccaattgtgaaagtaatatacgctcactgaaaagaaagccatgaaagaaaaaaaaaaaaaaaactctcaaatacaattattttgctcaaaaaaatttttctctatttctctagtgtctcatctaccctagactcaaactctctattgcaatcaaagatgaccctgaacttctgatccttctgcctctactccctaattactaaagttgccagcatgtaccaccatgcccagtttcatacagtgctacagatgtctataacttcatggaggctaaacaagttctctatatcaattaagccacatccccaggatgtttatgattcttgtaacaaatataattagccacatgataaactgtttaatgcatatcactcttgcattttaagttccatggtagcaagaaagacatctttctcaaaagtcgttttatcctttgattaggaggttttataaaggcaattaataaatgtttgttgaatgaaagaataaaccagtaacattacactgcctttccaattgcctttaacaaccaccttttattacctggagcaatgtgcctgagactgtggtccaggagcaacaggttgcccctgctaggctacagacaaagtacagacagttcaccgaattcagaggtaaagacacaatgaccatttcctttgcctatattttaaaacctgaactataaaataacctttccatgataatcctcttacttccttaataggtgacaatctccataatataaacctaccaggctcttggcttaatcctttaatcaagcattactacccaggcaaccagtgaggcaatattcgtccagataaagtggatctccactgaaacacatctggagggtcaacaaccatgaagtgagctccctaccaacctgccctacagaaaggcgcatgtacaagaactcccaattatccctcatttaaaagcagacttttacatttgttttcccacttaggcataattagcaaataaaattttatatatttaacttacataacaagatttcaatatcctgtgaaatcataaccacaattgtgatagtctgaatgaaaattatccccatggttcatatatctgaacacttggttcccagctggtagaactgtctaaatgcatcacttggggtggtctttccgatttcaaaaagactctttgagattcccagtgctgctagctcgctcgctctcgcgcgcgcgcgcgcgctctctctctctctctctctctctctctctctctctctctctctctctctctctgcctcatggttatgggtcaagatgtgatctctcagctattcctttgctccgacatcatggattctaaccctctgaaagcataagccaaactaaacttttttttcttttttcttttggtttttttgaaacagggtttctctgggtagtcctgactgtcctggaactcactttgtaacccaagctagccttgaatgcatagagatccccctgcctctgtctcccaagtgctaggagttaaaggcgtgtgctgccaccaactccactgctgatatctccgccatccccgccacccccactgcccccacccctgaacagttttttataaattgctttcgtcactgtgttttatcacagcaatagaaaagtaactatgacaataatcaagtcaattaatgcattcattactcaacataattacctttggtgagagggaaaatacaaaaggtgaaaaagaaaaagactttaaagcagccagaaagaaaaataccacctatagagtaatggcaattataatgacaactgagttctcaacaacagcagaaaagtaagaaaagggtatctttaatagacttaggaggcaaacaactacccagatttctacatactggtgaaattatgactcagaaatgaggaggaaattaagatatttttaagaaaagaaaaagagcaattactgcaatagacccttatttaaaatagttctaaagaacatgcttcaagcagaagaaaaataagcctaaaagaaaagtcagattcaggctggagtaatggctcagtggttaaaagcattgactgctcttccagagatcttgaattcaatttccagcaacatggtggctcacaactatttgtaatggggtccggtgccgccttctagggtgtctgaaggcaaacaactacagtgtactcatatacataaaataaaataaaataaaataaaacaaaacaaaaagtcaaattcaagaagggggtagagtgaaaaaaaggaaaataaaagtcttataaagtaacagaaataagttcaaatatgccagtaatcatgattaatgtaaataaaataaacattccagttggaagaaaaagtcaaactatctccattgtactatttataagaaaaacttaaaccacaaacatacacaaagattcatggtcagtgaatggaagaagacccagcagatactaaagaaactcaacaagaagtggaatgcatatagcagatggcttgtccaacacgtgcaaggcagagggagggagggggagggaggggagggagggggagggagggggagggaggggagggagggggagggagggaggacctgaaaaagatgacctcacagcatgagattctgacttctgagcacctaattatatacacataacaaaactggcatatctactactttggcctagagagatggctgctatacaagcatgggagcctgagttctgctgctggtactcaggtaacaagctgggcgtggctgtgcaagtacctgcaacctcaatgatgttaggggtataaagaatggagaactgttggggtttgctggccaccagtctagctctaagttcagtgagaaaccctgtgtcaaaagaataaagcagtgacagagcaggacattcaacaccctcctctggtctatgtgtgtgcacatgcattggtataagcatgtgtgcacataccacatgtacacaaacacacaataaaagtaaaaaaattaaatcacatcaaattcagtgcaagactgcctaacatatatttctttcagttatacattgtagtaagggggaaaaattagaatgcagaacttgaccaaaacaacacataagaattatacccaagaaccagagattacacattattttcaagaacatataaaaactttataaaatgaacttcatgactatctagactccaagatggcccataattattccaatgttgtagtatctttgtgtagttcttgcaccctatatgaaaactgttctctatgggtaattaatataagatagcagaagggagggtgtatcaacttccaagggtctttaaaaaagacatagcttctgattctctcaaaacattcaccttccacaatgtcaattgtcatgtgttcaagaaggcctagcaacaggaactgagcccttttgcaagcagctagaaatagattagatggattagataggttagattagatagacagatagatagatagatagatagatagatagatagatagatagatagatggatgggtgattggatggatggatggatggatggatggatggatggatagatagatagatagatagatagatagatagatagatggatgattggatggatggatggatagatagatagatagatagatagatagatatagatattgaagtagatagatagatagatagatagatagatatagatatagatatagatattgaagccacccccctatagctatgtaaatgatgtcactggaagtgaataattagtacatgtcaaatctttagatgactgctgctcatctgcaatcttttgaaaaacagtgagcaaaagctattatcataaagccgctcatggattttagaaaagcagaactttgagatattaaaattgtctgttgttttttaaactgaacctggcatgaacctgtaatcccactactaaggaggctcagactcatgactcaaatgctagcctgtgtaagagagtgtaaagcaagcccaagaaactcagagagaatctgcttcaaaattacaaagtaaaaagtacagttggagacatggcttagcagtttagagtactgactactcctccaaaggacctaggttcaatccctaggccccacaaggcagttcacaactatctgtaattgtgctactaggtataaatttattaaaaataaatcttcttttaaaaataacaaaatagccgggcagtgatggcgcacacctttaatcccagcacttgggaggcagaggcaggcagatttatgagttcaaggccagcctagtctacagagtgagttccaggacagccaaggctacacagagaaaccctgtctccaaaaacccaataaataaataaataataaataaataaataaataaataaataaataaaaataaataaaatgtaaaagctaaagaggatcaggaataagcccaggatacagtacttttctaacatgtactacattttgaaaatttttgcaacagcagtaagtaataaaatattcaactataaaaagttaaggtcaaatttgaaagtactagtaacatgaaaaccatatttgctgacaatacaattaaaatagaaatacttttatttaatttttattgagaatttcatgtgtttacaatgaaatatgattatgtccagccccatttctccccctccaatgccccagatctccacatgtctgcctcccaactttatgacttttttttaaaaaaacctctgagccatctcgccagcccttttttaaaaaatagtctactaagtccatttaatgcagaccatatgtgcatagctatagagctattgaaacacgggcaaccaacactggccacaccttcgatggtctttccctcccacagtagctatccactaccaacaaatagctcccttgtcagcagtggggcctctcaagttcctccctaactatgctgaaattttgaatggcttgatcttcaacactgaagtataaattaataaataaaaccagacactggtggtgaacacctttaatcctcatactagagaggcagaggcaggcagatctctgggtttagggccagcctggcctagagtttttcccaggaaagccaggactacatagagaaaccctgtcttgaaaaccggaaacaaacacacaaataaagatagctaggaaaacatctcaaagacaataaaacatcctggataaaaaggaaaatcataaccagaaaacgaaaacacctaaaattgaaaaataataaaaagcctggcaaaaaagatgtctcagtggttacaaacatgtgcttagtctttagaggacctgagttcagtttccagcacctatgtcaggcagctaacaaactgccatgactacagcctcagaggatccaacttccacttttggcctctacaggcacctgcatctgtgtaaacacacacacacacacatttataattaaaaaaaaaaaaaagaaagaaagaaagaaaaactgggagccagataattagctcagcagtttaagagcacttgctgctcttacaagaggaccaggatctaatttccagcattcacatgacagctatataattcacattataagtctataatttttgtcctaagtgatctaatgccctcttctgacctcgacaggtgctatacattgtacatgtacatgtacatatacatatacatatacatacatacatacatacatacaaacatacaagcaacatactcatgtgaaataataaaatacaacttaaaaataaaaaaataatgaaatttcaaatatggaatatggttaaagtaatcttttactatctgctaggaagaagtgatgtatcactaagcgggtagatacaaatgttacatacacaacccaaggacagtgagcaacaggaagacatgctgaagggggcagcactggggatcaaagacttttaaagacaatgtggcattttctggtaaaactgaacattctcatatacgctaacgctgagcaggtctactactagacatatatttccaatggtcagaagcagcgttattagttacagcaaaaacatgcaacacggggtgtagcccagagatggaacacttgcctagaaggaacaagcaagtccttaggttttgacccccagcactaccagaaaaaaagaagggaaggagagagtgtatgtactaactgtttattatcaatagtataaatagtgaagtatgaaataatctgtagcagtaatggactccacaaagaacagaaatgacactccaaatgcatgtgaaagacaacacctatagtattgctgtatcattaaaaaatgtcgaagacaagtaaacaaacgtgtttggagagactcactagaaagcagggaaattttctaaacacgattcaggataacagtaaatgctaagaaaaccagtgtgatttaggttatcaacaagttgaagacaccagcaatgttcttccctaacctcaatacaagagtccacagtattactgtttagctatgaactgtacaaacacacttcacataatcttttattaaaaaatgtatttattcttaagtgtacaagtttctgtctgtgcacctcgtgcatgcaatgcccatggaaaccaaaagagggcactggatccccgggagctagagttatagttcagtgttaagtctttatgtgggtactgggtcttctaaaagaacagctagtactcttaaccactaagccatgtcttcagccccacaagattttttttatgtgtatgtgtgttttacctatacgtaaacctatgcacaaggtgcatgcctggagtcctcggaggccagaaaaggttacaggtggttgtaagctcccatgtggatgcactcaaacctgggtcctctgaaggagcagcaaatggtcttaagcactgagccatctctccaccccattatatactcttgtatactatgatcctccacagtagaagtgtaactgatcctctgtagttgaaaacaaaaattgatttgctgaacatagaagcacatgctctacaataccagcatttgggagctgaggcaggaggaccgcagtgagtttggattctgtctgaattcatgtaatagataaactgacattattaaaacagctaaatttaaatcaagtgagtatctatgcctaaaaacaagaacatacaaaaaggttttaaagcatttaaaaaaatattccccatatattttccatataaaaattttttttcattgtgtgtgtttaaaacaggtcttactatgtagcccaggctggccttaaactcaaaaaaaaaaaaaaaatggggctggaaagatagctcagcggttaagagcactggttgctcttccagaggtcccgagttcaattcccagcaaccacatggtggctcacaaccatctgtaatgggatctgatgccctcttctggtgtatctgaagagagtaatggtgtactcatatacataaaataaaaaataaatcttaaaaaaaaaaaaaactcaaagaaatcacccgcctctgccacgtgtgctggtattaaaggtatacacttttggctctctactcctccctgttccagagacagctgtgtcagtcttgtcccatagacaagttggtgaaggtcggtgtgaatagatttggctatactggacgccaagttaccagggctgccttctaaagtggagactgttgccatcaatggccccttcattgacctcaactacatgtatgactccacccaaggcaaaatcaacaggacagtcaaggctgagaatgggaggcagtcatcaacgggaagcccatcaccatcttccaggagcgagatcccactaacatcaaatggaatgatgctggtgctgagtatgtagtagagtctactgggtcttcaccaccatggagaaggccacatgaagggtggggccaaaacagtcattatctctaccccttctgccagtgcccccatgtctgtgatgggtctgaaccacgagaaatgtgacaactcactcaagattgtcagcaatgcatcctgcaccaccaactgcttagcccccctggccaaggtcattcataacaactttggcatcgtggaagagctcgtgtccacagttcatgccatcactgcaactcaaaagactgtggatggcccctctggaaagctgtggcatgatggccctggggctgcccagaatatcatccctgcatccactgatgcttccgaggctgtgggtaaggtcatcccaaagctgaacgagagagaaactcactggcatggccttctgtgttcctactcccaatgtatccattatggatctgacatgctgcctggagaaacctgacaagtatgataacatcaggaaggtggtagagcaggcatctgagagcccactgaagggcatcctgggctacactgaggaccaggttgtctcctgcaacttcaacagcaactccctctcttccacctttgatgctgtggctggcattgttctcaatgacaactttgtaaagctcatcttctggtatggcaacgaacacagctacagcaacaaggtggtggacctcatggcctccatggcctccaaggagtaagaaaccttggaccacccaccccagcaaggacactgagagcaagagagaggctctcagttgcagaggagtccctttcctaactcgacccccagcagtaagcatctcctccctcacatttttcatcctagacccccatcctactctcttgaataccatcaataaaagttccctgaacccctgccccccgcccaaaaaaaaggtatgtacttccatacctggctggagacacagaatacaaataaacttcaggccagtggttaaaatgagaggaataaaggggatcagagggtacaaagaaaccttgaactttatgtacaacattttataaaataaaaatacttttattacctaggttaggtggaacacacccataatcccagcattgaataggctaaggcaggaaaatattaagttccagacagggtgtgttagacagtcagacccattttcaaaataatgaacgggtctgtgatagtcaatctttatagtcaagctgacaagactgaaagctacagaaccctttccaacatgtgggagggtctcagaggggtttgaggtggcaggaagacccgccctgaatgtgaacaccaccattccattagcagaggttgcacactcactgagaagaagaatgctagtctggagagatgctcagcaggtaagagctccagctgctcttccagaggccccaggctccctccccagcatccatgtggtggcttgcaactgtctgtaacacactctaagggaccatctgatgccctctctcatgatttctcacagagaggagaaagaacagtaactaagacaccctccagaagttaaactagagagatactctgtccccaaagaaaaacaatttttctcaaaagcaaatgccaccccacatggaagttacttgtaccatacaaacatgaatgtagcttctaacaacttattaaaagtgaatgtcagtttttaaaaacattaactccccaatttttgattcacatcaactaaatcaaatattactattttgagcatacattactattctctaactgaacagaaaggggaaggggtactcgctacaaaatttgatctacaatttagacaaatacttttggttatcaaaaaataaaaaaatgcatatggaactaccccttttactattattgttttgggattgtaatctttttttttttttttttaacgagctcacgtaacccaggctggccttagactactcggttgaccgggagagctacctgtctctatcctccaagtgctgggatgacaggcatgaactcctgacattttcattattataaccgtcactagttatgggtagttttcttattatagagctgtggtgattttccccaaaacatcaacccaataaagaggcatgccactttattatgtatatgggaacaaatttggaccagttatctctatatttgagaggtaaaataatctttaaatcctatggtatacttccataggatgaaatttttccatatcattctataatatatctgtatgagcttaaattttacaatattttccaaaaacatttttaaaatatatttctagaaaagacttgtaaatatgtactgaaaaccaagcaactcaaatgagttagacatgagatatacatgcctcagcatacaaaacacaatatacaatttacgaagattaaagtattgaaaactccctacacttaagtccaaagaagataaggaaagcaccactttgaaaattattaatacatgaattgggggctgaagagatggctcagcaattaagagcactggctgctctgtcagaggtcctaagttcaattcccagcaaccatatggtggctcacaaccatctgtaatgggtatctgatgccctcttctggcatgcaagtagatgtagatacagttgagcaatcataaaaattacaagcaaacaaaaaaatatacatgaattatttgagcaactactactagcaaactttaaatataggcatggagtatagtttagtactattttgatgttaagtgtcctagagttaaaatttatattaccacttaaagatgttagctcttactcttaaaggtaccctgaggcatcctgggacagggcactatgactgcaactaagcatcaaatgtttctcttcatgtccccccaattatatgtatgtatggacaaagaaaaggcagggagaataaatgaaaatatatagaagtagaaaagcactgtggtgctgagcctataatcctagctctccagggtgtgggaaaaggataagcttgagtttgaagtcactctgagtaaaatatggaaagccaatctcaaaaaatattccccaaaataacaaaaacaatgtagacaactggtctatcagggtaaggtaccaagaaagcaccacctatacagaccagccttcacatctgcatatgttgttatagtagcccaagaaagcaccacctatacagaccagccttcacatctgcatatgttgttatagtagcccaaacaaagacagaagctaggaccaaagagtagagttgttgttataacataaatctaactgcagaagcaactttggaactgggtaataggtacaagatggaagaatctagacatgtgtgtaaaaaaagccttgtcgctatgaacagagccttctggatgattctaaagcgaccgcacagaagctcactacacagactgcctctgtcttctcagagattacacagatgcttttgaatgaaatgttgatagaaatatgaacagtaaaggtcattccgatgaggtcgcagaaatgaggaacatgtcactgccaacgggaagaacacagagcctgttacagagaagcaaggactactgtgcaatagcagaaaacagtccagcatgctcgaggatccgggttccacatacagcaatgaaaataaaaataaaaagtggtaaagagccattatgaactgagtcctatcctgacgttttacaggaaataggattcatgagtggtaaaattagatgtctggctgatgaactatgtaaacaaaagcaggaaccacagcatggcttctcttgacagcatccgagtaaatccaaatagaaaagtgacttaaagatgaaatttacaatcaaaaggaaagcaaacatgttatttgggagcttcttcctggccatgatgtaaagaatgagaatgtatgtctgggaaagcaactcccacagatctatgacgatttttttaacagattcgtaggggccagagatgaagccatcaaggtaacagaaatagccacaaaggcattcaggaagttatgggtactcctcctcctgtcaggctcagaaacccatagcttggaaaagatcctgtcaaaagaagggtttgggtggccaaacttttgactctagcctggaagagccacagaccagcattccaacccatgccacacaggctgcacccacccagcagagctattaacaccaagactgccaaagttttaaaagctcaaattctacaccagggggtgtgaaaggcaagatgtggagtaaaactcgttattcatgagccttaagatacactattttacactgctgggctttggatttccttatgcaacacctacaatccctttcttctttcctctttctcaccttttaggaataggaatgcttatcttctgcctgccccaaacttgcatcttaggagcagataacttaatttcacaaattcacagctgggcaacttgcctcaagatgaacagcatcttgactctcgcctatgctcacttagatgagaatgaaacgactctagacttcagacatatggtgctactggaatagagcaaacatactctacctacatataacaaagacaccctattcatatgttgaaacttagccctcattgaaggttttacaagaatggaaatcaggttatagagccctcaaagaatgattatgtcctaagaggcccaagtgaaatgaacatgatggcccatgcctcgaattttagcacatggaggtgcagaacgaagaggaactgtgaattaaaggccagcttgggctacacagcaagttcaagaagccagcctaagcaacattacctcaaaaagacataaataaaagagagctaaagatgtgctcagtgggataaggctcccctagcgtatgtaaaggccagtccggggcttaatctccagaaccatggaaaatacaaatgaggcctgtgtgaagaaaggacaagaagggacatttaggaggcacaagccctttgacaccaaacctgctgtgtcttactcttcacccttctcagccaccaggagtgtgatggatgaatttctacttcctattgtactaaatttactacagcacgttaaataaatagacaaagatactttccaaaacaactgcctccaaaactaccagtttagttaattatcccattatcttcactcagaaacaaatattttcctaatattattatttaaaaagccagccaacaaatttcaaaatcattcctcttctggtcacattaacataagacaccctgtctgtcactgaggttaaaaggaagacggagagctggggaggggctccgttagtgcagtgcccgagagacctgagttgcttcttccagaatctttacaaagagctgagtaaagtagcacacaccgagaatcccagcacttgggaagcagggacaggaggacgcctagggctcgactgttagtcaggtaaacatcctacctcacaaatgacgtgggggactcagtgaggtcacctctaacctcccacacgggcaggaaagagcagagaggaaggctggaagagaactttttaaaaagaatgactaaaaggctaaccacatttaatcagatttataagtgtgctttgttaattcaccacaaaaccaaacagggacagttcaatgtttatgaagctaacacgtgtgattaaaaaaaaaatctttttttggtttttcaagacagggtttctctgtgtagccctggctgtcctgaaactcactctgtagaccaggctggcctcaaactcagaaatccacctgcctctgcctccctagtgctgggattaaaggcatgtaccaccaccacccggtgggattcaaatttttaagacataataaaatacactggcaaagttcacaatttatcaattttaataagctaaaataacaaaaggcaacagtgaagattctcatctagattttacctccttcacagtagccgagaaagtaggttctgattaacaaagatgctatgtgttacctgtaacatggcatatataacagttgaagcacctgccactatgctaatttttataacttagttcaaaccagaagctggagctatttagcagtgtgttaatggccattttctttattggactgaatgaaagagaacttcattcataaaacggcaagatgcagattaaaataaacttggaataatcacggagaacagagccagaacaagtttaacttccaggcctgagtctggaagccctttcaacttcacactcagtctatttttaactagtctacttttaacaccccaatgctaaaataataccattagagtcaatggacggggagagagaggtgttgagagctgggatccatggaaatacctatattcctaacactggaaagaactgaaacaggtggattacaagttaggagccaggaaatactgagaacttatgtgccccatacccatttaaaaagatatacatatacatagtgacccagcacgcctttaatcccagcactctggaggcagaggcaggtagatgtctgagtttgaggctagcctggtctacaagagcaagttccaggacagcccgggcgacagagaaaaatcactgttttgaaaaaaaaaattactaataaacttgcttaggaaatattatgttacagaacaaagaatttagctaaaggactgctgcctccagcaggactggaagattggtgtactccaccagacttgttagacaatgtgagaaagaaaactttgtactgtaattgaagtttggggttgctaagaatgtttctgtcgaagtttattcaccaagattgatctccaaagaggctccattcccataacaaagagacaattctgacttacaaacagccattaggcccatccctgtatcaaagaacataattctaagggacagctctggggagcagctcaagatcacagctatcttaagtcctggtcagccaccgagtcccctgtccgcttcacagagaaaacataattctgcaggtgggtcagaagaatctgggtaacaactatttttaaaaacagcactactaaaaaaataaaataaaataataataataataaaataaaaaaacagcactactgtacttacgagtctgacaatatctctcatccgttccaagtgtaacctggggctagacctgaaaaggacttaaggatgagtgtgtggaatgcataagcctaatgtgtccatgctagtgacatcttctatttgaggctggccggtctttgggcattagccagagtcagccaagtgctattaagaagcctctccttcacctcactaagctcagtgcacagatgatttattctttctctaacagtagcatacgcctgtaatctttgagaagagcacagacgggagaatcgggagtcacaggaatccccaatacacagttaactcaaggccatcttcaacttcaaggacatgactcaaagtcaaagcataaaaaataaaccgtgtgtgtgtgtgtgtgtgtgtgtgtgtgtgtgtgtgtgtgtgcgcgtgtgccttcttgcctgccttcttgcctaacctgcctgcctgcctgcctacctgcctgcctgtctgtcttctggtgcaagagatcaaaatcaaacccttgcactctactactaagctacatccctatctcagaaaacatgttttatataagacattcatccttaacttacctgaaaactaaccaagtgaaactattgaaaaggaaataaatattcctctaaaccagtggttctcaacctttctaatgttgtggccctttaaatacagttcctcatgttgtggtgaccttcaaccataaaattacattcactgctacttcataaatataatagtatgaactgcattgtaaatatttttggagacagaggtttgccaaagtggtcatgacccacaagttaagaaaggaccattgctagagaccataagcaaacaattcaacgactgaagaggaaaggatgaaattgtgaactgaagttaatatgtagtcaagccaaataaaacaacgcacaattatcaagactctttctgaacaagttgaaagttgggatgtggattaatgaaagaacacttgcctagcatgagcaaggttctgaggtccatctccagcaccataatcaaagggaaagggtctctagcccaaggagtacatttgcatcctagcactgcggaggtggagacaagcaagattcaagggctcactggcctatcccaatctaccagtctgggtcccagtgagagacccagttgagaaaaaccaaatgtcttaattagatttctaatgctatgataaaacacaattacaaaagcaacttggggaagaatttctttcattttacaactctcaggtcatactccatcactgaggaaagtaaaggcaggaactcaaagcaggaacctgaaggcaggaactgaagcaaaaaccatagaggaaagctgcttacaggcttgcttctcactgcttgctcagcctgctttcttatacaattcagaaccacctgcccaggggtggagccaaccacactgggctggatcctcccatatcaactaaccacgcttgcctagaggccatctgatggaggggcatctcaactaaggttcttccagctatctagtttgtgtcaaggtgacaaaaacagaacaaagcaaacaaacaaacaaacaaatggtaataattaaaaaccaaccaggactaacaagatagagagggagaattttcttttggagtatggtccatggtatgttgtctataagccaatgtttggtcttacatcacacacaggcagtactaattagactcagtggggatagaaaggcaggcaggcaggcaggcaggcaggaggttaaaggcaggacatgaaggtaggcatgagttggaggattcaggtataaaactaccaaagaataagtaaaataaataaataaagtaaaaggtgtatagttcctgaggaacggtaccttaggttgacctctgctctcacacataagtgcacatgtacacatctgcagatatacgaacatgcaccaccacaactttttttttcttttttttatgtttttttaattgggtatttatttcatttacatttccaatgctatcccaaaagtcgcccacacgctcccccaccaactttttttttaagtcctgtcattcacaacttttcccaattttcaactagcttactcccattagtttcttcctttccttatttaatcatctaagccttccaatatcatctcctacacaaatctcacatttaggctctctaaattcctacattcaattccctacttcagaactccattcccattacaatttcttattctcattgtctttaatactgtctcctcaaatccatctccagtataaccataaagaaactgtttaaaacatgtgaccatggcattcagaactccattcccattacaatttcttattctcattgtctttaatactgtctcctcaaatccatctccagtataaccataaagaaactgtttaaaacatgtgaccatggcattcatacttaaagcctttcaatgggtctctgtcacacacacaataaagtcaaactctttcaacagttgactgcctgtcacaaatcatctaagctagaattgtgctgtgtctagcgagattaatagggcactattaaaaacttgcattcttcagacctagagtgatttctgtaggataaggaaaataaaataaattgttcgcagaaagtttccactatctgagctgcggctggaacacttccaccttaccaggtccactgacacttttaagaatccactttattttgtgattatccagaaagctaaagaaaaaagttcccctcaaattctagttcccaaactgcatttagaaacatttattcataagacaacatgtagattaaaaacatataacactgaataaaattatttttacttagtttgaaatagtaaaaaccagttcatattagttaacagatgtaccatatttgaaagacatttttttttagaattcaaccaaattctagtctacaagtgttgatacaaacttttatttattttaaatgtcaaatgactgtatttatgatgatttgattagaacaagatgagaatgggggaaagggccagtctagggccagcaagatggttcagtgggagaatgtgctactgtgcatgtctgagaacctgagttcaatccagggatcacatgttggaagccaaaagaccaacttccatagctgtcttctgacctccactagcacgttatggcacatgttataataattaatacaaaacagtaaataaaaatataaactctaaaaaattaagagccattttttaatctcttaagacttgacatgtgccagacagttctcttaaaagcacagaaaatcatttctcataaattcattcagtaaatttttagtttcttctatgtgcatgccacatatacaatagaggggagcacaaatctttgtctttctggactatgtttagtagagaagataattagcaaacatggctttagagttctaaaatgaaaattccctaacactaatgagaagtacggttttataagtggttatgtcttaatagatccttgaagagaactttatagttttaagttcttctgttccaactctctcaagatttccactgtgatttagcaggcaaggtggataggttctaactagctagatgctcagagcccaattatttatattattcttctgaaatacatacacaactcttcagttgaaaatgactaggactaataataaaaaagtaagccttttgagatttggtagggtagggcctagagagacggctcagctgttaagagcagttactgttcttacagaggacttgggttcagatccaagcacccacatgacagctcacaactcttttataattccagttccagtattcagtgcccttttctgacctttgcattcatcaagcacacacatacatggtaacatatacacaggctaataaatataagtacaaaaaattagatttggcaagctataatagtatcaacaatgtaattcataacaatggactttaacaggtagaggtctacaaaatttgaaacaatggaaaggtaacaaagagcctggcggtggtggcccacacctttaatcccagcacttgggaggcagaggcaggcggatttctgagttcgaggccagcctgggctacaaagtgagttccaggacagccagggctatacagagaaaccctatctcaaaaaaagaaagaaagaaagaaagaaagaaagaaagagagggagggagggagggagggagggagggagggaggaaggaaggaaggaaggaaggaaggaaggaaggaaggaaggaaggaaggaaggaaggaaggaaggagaaaggtaacaaagataaatttgtatgggtaaaatataattcaaaattcactagtttacacttactgtagctcccgactaattcttcaactatgagtcatggggatcatgaaaatgctggcaataaggaaaattttctcaggtgcaacaatcaaaaatgaattggtggtactcactcctgttgcatcatggaacttcactgcagtcttgaaacaaagtgcacatgccatcatgccaaacacttagaataccttggacaggatctagattactgtgcattattaagtgtaatcttttcattatacatacaaagttttctgttcttatagaaacgcaatggtttaattataaaaaacaatggcttgcaatgtttttctaccatgatccctcatcatgcaaatatcaaatcagcatatctttggattgaattatattagaatgtttgactttaaaaattattcttggagtgagctacggatggctcagttggtaaaacacttgccatgaaaatgtaaggaatagaattctatcccaccagccacagcatacatctaaaaatcccagtgttggggagggagaagaaggtggaccactgaggcttactacagccaagctactcaaaatgatcaactacaagtttaagccagagaccctatctcaaggattaaggctgagagcaattgaggaagatacctgacattggtcctctaacatacaacttttctttgagttgctgttttaacccacacacatccccacacacacacacagacacacacccacacatacatgcacacatacacgtacacacacacacacatgcgcacacatacaaaattccatttggaattacaagagaatttccaacaattctgaaatgaccctaaacatatctctgtcattttgaactacatatgtgtttatgcaaatcagcattttgaacatgacaattataaatcaaaatgtcaattacctctgaaacacaatgaagatgttctatgctctgcttatcaaatactccaaggtttactttgatataaaaataaacacatccattgcactatcatgcatatttgcattcattttaaatgattttagttttattatttttatgtgcattggtgatttgccagcatgtatgtctgtgtgagagtgtcagattggtgttttgcctgcatgtttgtctgtgtgagagtgtcagataccctggaactagagttccagacagttgtgagctgctatatggatactgggaattgaacccaggtccaacagaagaacagccagtgctcttaccactaagccatctccccagccccttgcattcatgttaaataaatggtaaaatcacatgtatgccaaagaattgtttttaaaataatttttttatttactaggaataaatgtttcattcatatatatgaatgggctgtgtaaatttttctctggccatgttaacaaggagaaaagattttggaagctctgctctatgttgttcatagggcaatttaactttttttaaagtctataacttataactactttgtttttctttctttttttgagacagggtgttactatgtagtccaaccctccagaactcagcatcttgagtgctgagactatgggcgaggaaccagccaggtcttgctcccacccctaaattaaaaaataaaatgttcacaaaatattaatgaaagttaactactaattacagtggacagtaacatactttttttttttttttttttttttggttttttcgagacagggtttctctgggtatccctggctgtcctggacctcactttgtagaccaggctggcctcgaactcagaaatctgcctgcctctgcctctacctcccaagtgttaggattaaaggtgtgcgccaccacgcccggcagtaacatacttttagggagaaaataagtcatatgtatacatacacatagaactagcatatatatgttcatataaacatgttctagacagctttgcatctcctcctgaaatgcttctgccagcatcattaaaggccttcggagacacactgtttgtgactaaacgcactgctaacagtgcccctgaacaaactcccttcctacgagaaggaatgcagctgggctctggacttaagatgacctggtttctggcatgggccatcccccaaaagcaagtgtcctagtaggaaatgggagttgagagataattccacagggctggcgctcctatctaacagagcgcacttactctctgaatcaatcgtgctttctccatagccagagaacagaagcctggaaataaagaagagcaggagctgttctcacacagtctgaaaacgctcctggcagttaggcttctaatacttccaacttagacatctgtagtttacatgctttgattcctgagaaagaaacagtaccagcataacccactgaaagatgacactgcttagccaccaaaccaggcttgctcaacctcagcagtactgacatttttgactggattaattctgttcttcactcccccaaacactgtcagatccaggtcagatctctgacctctacccactctacccacgtgataccataagcctcaccttctcaaacttgtacctattacaaatatgtccaactattgtcaactgtcctctggaaactcctggttgagaatcactgcactatatccatagtcaaaggtcactccattaaatggtgtaacctatgccataaccaaggagataaagcactgctaccatataaaggaaacatagaagattggaaccttgaatctaagaaatgtctctaacctcatattgtgtaagaccaaaagttaatgaaaatcactacactacactacactacactgcagtacactacacaacactgcacttcagtagactacactgcagtatactacactgcactattctgtactgcagtacactgcactgctgtacattatgctacactacactgcagcacactatagtacaatgcactgcagtatactacactgcactatgctgcactgcagtacactgcactgctgtatattacaccacactatactgcagtaaactacactacactgcattgcagtatactatactacatgcatacacatgcagcaggcacccaggacagactcatattctccgtgataaaggtttggattaccacaacagctgaggtccaaaatgatggtcaagaatatatgaatcaggaagcaatagaaagaaattacacctaacaatcccctgtctccactcccctatcatgctgaagttacagttgcaggcacatatgtggccaccctggccttttcatcagctttgggctccacactctaaccctcatgcctgcacagcaactgctcagatccgctgagtcatttctctatcttccacagctcccaccttgctttttgagacagagtctctcactagaacctggagatacataattaagctagactggctagccagagaggcccagggatccacccattacctatcaccaatacagcaaacaaaaccgacagaagcctaagacctcgtggatctgtttaaacagcctgtactcaactgaactgtttcccaaaaggaaataaaaaggggcagggaagaggcagagtcaagaaaaagaacacggatgaaagaccttaagcaactcgtaactgtgttactgcttcctagatgacctattctctattcccttctatgggttccagctcttcaaagaaattcccagtcatcacaattgtcttttcccttattttctcagcaaatgactttgttttatctttaaaaataatcttatctgtaagtgtccacatgtgtgtaaccggtgtccttgaggccagaagatgacactgaatcacctggaatcaaagttacagagagggagctgtgtgctgcccaaagcaggtcctgggaaccaaatctggatcctctccaagagcagcaactgttgagccatctctccagccccacactgcagggtttttgtttgtttctttgttgtttttgttgtttaagtctttgtctgctgccaactttctgaatccacttctacagtttacttttgatttttgagtatggaccacaatttttcatcattttacatccacagaaacggttctactctgaatattgcaaataaaaaaatcttaaaactctagaatgtatcttcttagacagtgagaattactatttcttcattaagcaaaaagggttgagaaagatgatctctgtaatccaaccagtggttgaagtgggccagggatacactacactttttgttttgttttcttttttgtttttcgagacagggtttctctgtgtagccctggctgtcctggaactcactttgtagaccagactgtcctcgaactcagaaatccgcctgcctctacctcccgagtgctgggattaaaggcgtgcgccaccacgcccggctacgctacacttttaataagattctgttcatctctggcttacctttttccttcagcatgtgtccataatcagcccactacaaatgtctttgcatccctgaaactttaattcatttggtcgtcactgttccaacagccttccagtgttttttaaaacgttggttcttaaagttcatccagtctttgaacttgttgccatggtgtatatggttgtgctattgtctgttaaataaatactacctagaagctaggaatcctgcatatataaatccaacaatggtttataaacccagcgctataaaaaaaaactacctagggagacttataaccacttccaagcattcagaactcatactgtgtctagtggatccaggaagccagtccttttaaagttacaagagaatttatttaatggtagcatttctaaagaaaccactgggcctacatccatgacttcttgctccccctccaaagctcagtacttgtaaggatatttttaaaagaaaatacactacacacaataaataaagaggcagacgagttaaaatgctcaaaatttcaaagtgactacagacgtgaagacaaatgcgagcccttggtggcttctgtgtatatataatatatatatatcatatatatatatatatatattaatgatggcagcactcactgagcatgtgcagagcacctcgatccccaaaagagcacataaactaggtgacccaaacacataactattgtatttttctctgatctattctaacagaaacaaaatgatcttcagatgtggaaaatcattgctaaacagcaacagaatgcttacataaagcacaaagagcccatctatctgctttatctaagttcaagtctacataaattaatccaagggtataaaagaaacttgaaaatatgggagggagatgtcagtgaactttgagaagtcatgcagaaaaagcaggccagacgtggaatgagcaacggctgcttcaaatgtctaaatgctgcgggtaatggtgacaaggtgctttcagtactgtgggctttatgttcattacacagattacttcttggcatgtctacaggaatttgccatttacttctaataatgaaatcttacatgtgtagagctttctctccaccccttcttatgtagttgtagctgtcctggaacttgctatgtagaccacgctggcctcaaattcacaaagatccagctgcctctacctcttgagtgctgggattgaaagtgagcaccatcatgcccagttatgagcagagcatttttgttttgagtttagagtttataaagtatcttcacatatattcctatctctgactctcacaaagcctgatctataaaaaagggctaagtctttctacaaccagcacatccttcaacatagtcaatagggctcaaacagcttgactgaccatggtataacttactcccattaaaaaacaatcaggaaaaccgagatgaggcagatggctcagtgggtaaaatgcttgccatgcaagcacgccaacctgatttagaccccaaacactctcatgagaaaagcagtgcatggtgacatgtgcctgtaactccagcactaaagaggaaagacaggtgggttacatggcctgccagtctaaccaaaacagcacaccaggttcagtcagagaccctgccttaaaaaggtaaagaccaatagagaaaggtacctgaagtcaacctctggcctccacagtagaatatttactcaagtacacacacacacacacagagcacaaaaaataagtgaagttttctaactgctaactgagcatgagggaaggctaagctatgctgaaatcacatacaggatcacttcaaaacaatggagaggtcgtgagcgagcagcaaatgggtagcaatgtggaagaaaccactttggactgggtaaaagctaagtaaagatacctatggggcttaatgctagtgcatatacagccatttaagatgtatgtgttccagtgtatgcctggatgaatgtctgtgtgtcgtggacattcctggcaccctcagaggccagaagaaggtgtctaatactctagatctatagttgcagatggttatgagccatcaggaactgagcccagatctctacaagaacaacaaacacttctaactcctgagccatctctctagtcccttgcttttaattttatagatttttataataaactttaaataaataatgtacaaagttgacactttatagttttattgtactagcaatagacaaatataaaaacataatgttacctgaatttgtcttttccatagcactgggaattgaagccaagatcctgtgccggctgacaagtgaaatgctctactgataagctataatactattacaccttggaatatatgaatatatatatattgttttttcgagtcagggtttctctgtatagctctggctttcctggaactcactttgtagactaggctgccctcgaactcagaaatccgcctgcctctgcctcccaagtgctgggattaaaggcgtacgccaccaccgcccagcacaccttggattttttaaatactggtcttgaactcgctatattaaccccagaatagcctaaaagtcaggatttctctctctacctctgctggtctattattgcacacctgtgccactacaccttttgcctcagtattttttaagtcattaattttacttaagtctcataacatcctcttatagtaaaatactggcaagaagctaggcattgtgacatatctttaattttaacactcaggatgcagaggtggatttttgagttcaaggccagcctggtctatataacaagttccagctcagccaaactgtatactgagaccctgtctcaaaacacacacacacacacacacagttccagctcagccaaactgtatactgagaccctgtctcaaaacacacacacacacacacacaaacacacagttccagctcagccaaactgtatactgagaccctgtctcaaaacacacacacacacacacacacacacacacacacacagttccagctcagccaaactgtatactgagaccctgtctcaaaacacacacacacacacacacagttccagctcagccaaactgtatactaagaccctgtctcaaaacacacacacacacacacacacacacacacacagatgctaattattgacctccactgcaccaaaaatagacaaatagactgacagactgacagacagacaaaactttaggatggtgacataactaaatggctataaaatggctgaagaacacaagagaatggaggaggagatctggcaaatgcttagtacctactctcaagtactttttaaagtaaacaaacttactgttaagttgtagagggtaaattagaaacactaaatagaagactaaagaaggtaaaattccaactcttcttctctttttaaaaaccccctcttagtaaggtccatgtctcacacagtacccactaacactgttgcgttcacctagcaatcttccagatactttctttttttttttttaaaagatttatttatttattatatgtaagtacactgtagctgtcttcagacacaccagaagagagagtcagatctcgttatgggtggttgtgagccaccatgtggttgctgggatttgaactcaggaccttcggaagagcagtcgggtgctcttacctgttgagccatctctccagcccccagatactttcttatcaacagaaaaaaaaagtctatgtcctggctcagtttctctgtcccacatccaccaccacctaggtagtacctaaattattgttcctaatactcagataaacatgagtactgtgtacgtttagctttaaaccatagctaagggatacttaaactaaaattttattacttaatataacattcaattttaactgggtagcaaggcatagtgttttatgcctatagaacccagtactcacgaggctcaggcaggaggatcacaaggtgaaggccagcctggactacaaactgaatttgaagtcaacctgccaaaaccttttttcttttaaagtagacattatctacccctacttgttaactgaacagctatctaacactgtcctcagctttccttatctcaactctagttgatgaccattaacaaagataggacctcaacattcagttaaaagcctccatactgtccacactgctcaagtcctaacccgttccatctgcttccccaatccttcctccctccacaccaggccatgatttccctaactactttaagcaagctccctccatctctgtcacctcacacgtaagaatggagacaaggtttaactagcccatcctgatcctgaaatcttgtcctcctgcctcagctcccaaatgctagggttataggcaggtaccacagctcctggcttcatcttaatctttttggtgtttttttttaacaatgtgtgtgtgagtaactgtacattcaccctatgcacatatgtggaagcaccccatgagcatgtgtatgtcacaggaaaacctgggggagtcctttctccccatcatgtggatccagaagaccaagctcaggtggtgaggcttagcagcaagcatctttacccactaagcatctctagtggcagcttctggtctagatagtgccaaagccatggtaacagccatctacaccctaatcatttcattatttatacatctcactgaaatcacactctcacattaaacttacactgctggaatttaaatttgaatttttttggggggtggggagtaacactgagccttgtgcatactacaaaaatcctctaccactgagctataccctctagttcaagataaaaattcatgttcagtatagaaaaaatgaaatgtgtttgaaaattttttttagggctggagaggttcttaaccttagaggttaagagcactgactgctcttccagaggtcctgagttcaattcccagcaaccacatggtggctcacaaccatctgtaatgggattcaatgtcctcttttggtgtgtctgaagacaactgcagtatactcttataaataaaaaataaagaaatctggggctggagagatagctcagcagtaaagagtactgactgctcttccaaaggtcctgagttcaaatctcagaaaccacatggtggctcacaaccatctgtaacgagatctgacgccctcttctggtgtatctgaagacagctacagtgtacttacatataataaatatatccttgggccggagtgagcagggctggatggaacagaggtcctgagtttaattcccagcaacaacatgatggctcacaaccatctgcacagcaacagtgtactcatatacataaaataaatagatctttaaaaaaataatctataaataataaaaaattttttaaaaaattttttaaactacatgtaatcccttaaaacttctaaaggtaatccagccaggcgtggtggcccacgcctttaatcccagcacttgggaggcagaggcaggcagatttctgagttccaggacagcctggtctacagagtgagttccaggacagccagggatacacagagaaaccctgtctcgaaaaaacaaaaaaaaaaaaaaaaaaaaaaaagtaatcctaaaaaatattaacattgtaaattttaaaaaatgaattacaaaacaatgtagggccactagtagtacatacctttaattctagcactcaggagacagaggcaggaggatctctgtgactctgagaccagtctactctagaccagactagcaagggctacatagtaaaaccctgtctctaaaaaaattaattaattaattaattaaaataaaataaaaaaaacaattagtcaacaatgcttctaagttgtggtactgcaaataactcatttcccccggtaccgccctgtacttcccatatccttagctatgaattactactttgcttttaatctaaggagtcagataagtatctgttaaagttatagcagaaacataacatataatttcagagtccaaactacagctctatgactaatttattagtgatgaggatactttttcaatcagaaggctagctcaaaatagggacaaaaattaatacattcaaagaattatacagcatttgagctgtggtagaaatgagaactctggtcttcaatgatttttgctaccaacagttgaccaaaataaaagtgataagccaggcatacgtttcgaatatacagaatgagttccggggtagccaaggttacacagagaaaccatcttaaaaaaaacataaataaataaataaataaatcctattttctctccccatttcctgatcattcacttacaagagtccaaaacaagaaacacaaatgttcctctttccctactcccttatgaattatgaaaagagaaagatctgcctgacacataaaaactattttctagccccaacgtagtagagaagtaaaatagaataaaaataatactctaaaaatcaagacaatgagctggggagcagcccagtttacaaagcactggcctggcatgactagagaagcagtgtcacaccacataaaaccaggggtacctgccgcacgggttataaccccagcactctggtggtagagatacaaggatcagaagttcaacgttatcctcaactatgtaacaattacaaatgaatattagagaattgctaaacaaaaaaatagaaactgaaaaaagcagagaatcagagataaaagcaaagccaccccagaactcaccagaaaccactttagtactaccaaattttgaagagctgctccaagtatatcaaattctaagtgaaatgtactatacaaaccagatgtgatgttgcacatctgtgaccctcccccaacacttgggacatagaagcaggaaaatcacaagttctaggtcatcaacctaagaccatatcttaaaaatgagaagaaaatcaacttattgatacacacctataacctcagcctcaagaagctgaagcaagaggtcaaggttgagaccatcctaggctatcatagacctacctcaaaactcaacagaagagggtgggggtaaggcagctcagcaggtaaagcacacaccatgcaagcctggcaacctaagttcagacacacaaaggtggaagcaaggaaatgcacccgcaaatctgtccgctgtactccacacatgcactgtggcacgtgctcatccacacaaacaagaataaatattctcactgtgcagcacacatctgagagagaagcagcttcaaggtatccctcatcttatatcttatatgcagaaatgatcattaccaaacttgaaaggagagatacaatactatataaattgatacattcttgtgactaaaacttcctaccatgtacaagattcacacttaggacactaaatgagcccaagatgtgactaagacaggtgttagtcccattttacagatgaaagaatagaaaactgatacagaggtaaagtggccgaggtcacactgctacacacagtgaaggtaaacccaaggtgtaaagaatcatttccttatgaggacaatctaagaaaatctgtcaacaagcagaaaagcatcacttgaaaatgttatgagacataatcactgaaaagatcactatctcagtatacaattatgattaaaaattagccattctttttatttagaattgtactgtcattgcctaaattaacatcataccttttacactagatatacaaccttacttggttgttgggcagaggggagggtgaagtaagggaactatttcctctcagaaaattctctaaaatttaataggataagacatccaaagctgcaagccatgagtaagggcaggcaccagcttgctggctgtagtagcaaacctcaaccaaattggaggctctggactatggtctgtgcgctatagaaagatacacttaaacttcagttagcatccgaagtcattgctactgcaagggaatcaatacaatctatgggggtgggggaatgtaacacttaagtcttcattaaaaataggtgcaattgcaaattagcttggggctatctgtctcaacagttcttttgataatataaccaatggctcaaaagtcacttttacatacactcaaaccatgcatatcttaggtatataacttttttttttccttgagacagggttcctctatatgaccctggctatcccagaactcaccatatagaccaggctagtcttgaactcacagagatccatctgtctcaacctatggagtgctgggattagaggtatgggccaccacaaccaacttacatgtaacattttaagtggtcaaatatatccagtgtactgcatacactctaagacacttcagtggggtgcactaaaagccagctcttcagcacacctctgactactgtcaactacagactataccataacaatacaggatttacaggttgctgaaaccacccaacaattcacattcactacaacttttctattctcaaggacaagctttgtctgatctttccgttccctaacaaaatggggtattctacgagaaggtggatgaaacaacccagcgcttttataaacaagtcaatccctgcaaatagcttaagatgctcatattctacttcagtattgatcctaagccttttaacagtttaagctgaccacaatcctcccccttccacttcttttatagaacattctcctccttaaacttccatttaaaacaagagccttcctatacctctcattccttgtcttatacataaacacaaaactcccaatgaaaaataagcatgacatatacaggaaaaaccttttttcaattgaaacaccatatcgttaagaagcatgctgttataattcagtaatatggcttgtacagaaagaaggtcacaacaccaacctgaacactacagtgacaacacatgcccattgcagtctgagtaagttaaagaataagatgtaaaaacaaggcatgataatggcttactaggtatcatagcactaagctttcaagttaagaacagaattcttcatgttaagcaccttttttcaaaagcagactgaagaaaataatcctgggatgtcaaggtagctcagtggcttactgccaagagtgcagacctgagttcaatccctggaactcacacgacagaagaagagaaccaactgctgtcctgacctctgcatgttgtagcacacaaacacacacacactaatagtagtagtagtagtaatagtaatgatgataataataataattatgataacgataataataataattttgagccaagtaaaaattgtgtaaaaaaccaaactggaatatttaaaataaagtacaactggctcaatgccggcctaactcacacagccttgctttacttctcaaacttgaagaccatattatatgtatgccacaaactaggtgataaaacagaaaaaagtggatcaattactggaatccaaaaattacaaaagatgttaccagtaccctaaatatttgttaataaatgctaaaaaataacgtataatattctaaccaacaagcataccagggaatagagactaactagtcactctccttagtgaaaatgcaataaacaataagatgtaaggaaaatgcataataagcttatatttggttaccattatagactttcaaagtgctcacattctctattcagatgactatgctagtaagatatagattcaagccagcatggaggcaaaggcaggtgaatctatacattcaaggccagcctagtctacctggtaagttccaggtccaagacagccagggccacaaagagagaccctgtctcaaaaaaaaaaaaaagaaaaaaaaaaaaaagacagcagagtggtggtggtggcacacacctataatcccatcatgtagaggcaaaggcaggccagcctggcctacagagcaagttccaggataaccggagctacacagagaaatcctgttagcatattaagatcatccaatatttaaactttaaagaactttaaaggcttttctgctggattccctttcaataaatgaggacaaataggatctttgtgagacccaccagctggcatatgaagagaaacattgactaacagcaaaactcaggctcctatttagaatctccagttcagtgacaggcaaacctgttagaaaaagaaagagcgcatctggccaggtgcagcccaccactgttactctagcactctggaagcttgggtggtagaagccagcttctgctactcagtgagttcaaagtcagcccaggctacgaagtaaaaccatctcaaagaaggaagaggaaggggaaagggaaggaagaggaaggggataagctctgctcaagctgattatcatactgacacagaaggatctgaatttgtacatatgagaaagagctgtgtcttgggaacttgagggagaggtacattacagtggttattacaactgtgaaaagaccactgtgtttctccaaaagaaatccttttcaaaaacgcagcagtctaggagggatgaagcagagccagttgtcacagctatatagagaggagtgagcagacagtagatagataggcagtgtctggcaaggaagggaagggaagcagagttcacaggagaaagccaaccaaggacacagttccttcccaaagaaaacctaagtttaaaagtaaaaataaaataaaataaaatctaaataaagaggaagactgggatgccaaatgagaaacagcaagaagaaattactctaaaagaggaattccaaaagaataaacactatgccttcaacataacagattatattttttattttttttcaatgttcttaatgcctaataaagattgcagaccaggagttagggaggatagatcctttttattaacccagagtaggtttgaatttttacaaatctttgtggccaattagcatgggatttataatattgaagatacatgctcatcattttatactgtgaactctctaccacgttgtattcaaagaatagtctgattagtattcaatgtatgaggataacaacatgctattataaatttaataattaggttttcttcaatcaggcctggtggtatatgcctttaatcccagtcctggggggaggagacggctgaagcagatgaatctctgtgagttcaagaccaggctgctctccaggctgagttccagaagatccagagctacaaagtgagaccttatcggagaaaataactggattttattatgtaaaaagttgtcgaagtattttttacttccataattggttcacttgcctaaatatggaaaataatttattacacttattgatattactttggggcactcgagtggctcagtgcagcttgtagcagtcacagaacaaatataagggaatcaagtctccccttccaccaagtgggtcctgaggatccaaacccaggtcatcaggcttggaacaagtgctttcacctgctgggcagctcactgaatgaagctacagctttagagctggagagacagccaagtggctaagaatacatatgctcttcccaaggacctgagtcactgaacccgttaggtggctcacacactcacatacatactcataactaaaaaaaaattttcaagatagggcttctccgtataaccaccgtggctgtcccagacctcactttgtagaccaggctggcctgaaactcaaagattgtctgcctctgagtgctgagactaaaggcaggcaccagaacactcaggactacatagtgaaaccttgcctcaaaagcaaaacagaacagtaaactcttctaactacacttcatgggttattaaaacaaagtctatgagatgcttagaaatagcattctctaatgatctagcatttgacacatgtcacaggaaggctctctgcgtctgctatgccatttagtctctctgtttttcactaaaaacaaagggggcagggggggggggggactcttcaacagttagctaaacttgagtgggagaggggctggagaaatggctcaatggttaagactgcttgtggctctttcagagtcccagagtttgcttccagtacccaagtgggacactcatacccacctataacctcaggtccaacagatccagtaccttcttctgacctctgagggtactacacacacacaaataataaaaaatattttagatgaacctaatttgaactgaccatttatcacttctataataaattaacaaaaatttctgaaggtaaaccttgaataccttgttttgcatctcaaaatcaatgtcttgactgctctggaactccaaatacaaatctggttggcctcaaattcagagagcccatgtgggacggaaggcatgtgccactattgacagccagaatttataatttaccaaggatgaaaaaagtctactgtgtactgacatttgtatatgagaatcttagttatttcaactgttttaaagttttcagttgggctggggagatagttcagcgggtaagagcaccaactgctcttctgaaggtcccgagttcaaattccagcaaccacatggtggctcacaactatccacgatgagatctgacatcctcttctggtgcatctgaaaacagctaaggtgtacttatgtataatgataaataaatctttgggctggagcagcgagcagaggtcctaaattcaattcccaacaactacatgaaggttcacaaccatctacacagctacagtgtactcatatacataaaataaataaataaatattgaaagtttttagttttcttgttgtctatagttgtttcactggcctcaaggagcggccagctgcttcttactacagttctttcttttttcttttttctttttttttggtttttcgaagacagggtttctctgtgtagccctggctgtcctggaactcactttgtagaccaggctggcctcgaactcagaaatccacctgctgggattaaaggtgtgtgccaccaagcccgcctcttactgcatttcttgaaagcttgtaagaaaacattgtaccgaataatttattttatgtatctttctcttaattacaatataagagatggcaaaaatggcagtttaaaaactaatgtccttaacttttaataaatggaaatgagtctgatactacaacatatataaacaatatatggtattaaaccattcatcattctaattttaaaattcagagcattttcttttccttatatgataaatatggtctagagaccaaaggtaagagctgaaggaaaaagccagacataggagtagcaaatgcatgcaatcccagcacttagagggcagtggcagaagagtcagcagatcaaggctaccatcagctggatagcaaattccacaacagcctgagctacaaagcaaagaaaaaagaaaatttgaatttaacttttaaagcttagcaaaagttggggctgagagagggcttagcagttaaaagcacttgctgttcttccaagttttcttcccagcgcccatgtcgggcaacacatagctgcctttaactccagatccaagtgatctggcacttttcaggttgccacagtgtgtgacttcgtgagagtgtgtgtgtgtgtgtgtgtgtgtgtgtgtgtgtgtgagtgtgtgtgacagtatgaaagtgtgtgtgtgaggggtgtgagagagtatatgtgtgcatgtgtgcacataaataaaaatatagcctttttttagaaatcaaggtaaatggtaaagtgagtggttcccagccctcccctaagatgctgctctctgtgagttcagtcctggtttgtctccagcagattcccaagccccctgatgctcaaccctttagtacagctcatcatgttgtggtgacccccaaccataaaattatttcattactacttcataattttgctactgctatgaatcataatggaaatatcttgtgttttacaatcatcttaggtggcacctgtaaaagggtctgtcaatcccaaaagggtctcgacccacaggctgagagccactggtctaggcacattttaaatctgtttttaaatgtatttaattttatgtgtatgagtgttttgtttgcatttatgtgcaccacatgcttgcctggtgccacaattcagaaaagagcattagatcccttgggactggagttacagacaattgtgaactacactgtgaacactgtgtgaatgctggaaatcaaacccaggtcctctgcccgagcaacaagtgcttttaactgctaaacccacctctttagccccttaaatcccttttttttttaagttctacacagcaattcttttctatcaagtttagaatctaacattctacttaatgttctactgaaatctaatgctctataactggaccaatttacacagtaatatttacttcttcaggcgggttacaacaacagtttgttttgatgccttttggtctggaaaccaaatgaatgaagtctctgatagctacaaaattttatctatgtaggtttgttttttttggggggggggtgttgagacagaatctcccttagtaaccttgacatcctggcatgtagtctgtagaccaggctggcctccaacacacagagatctacctgcctctgacctcctgtgtgctgggacaaaagtcatataaccaccacattcagctctgtgtaggtttcccagtgtcctctgggtagacttcctctgtcggataggtcaaaagattgagtcctataaaaaaatgtctgctggtcaaattaaagaagaaacccttcccctacctgtcagctcccataatcagttttgtgattaaacccaataaacaaaagagattggttcaattctaaacaattctctcattagaggacaccccctggcagaactgcaacaaaaagcaaccatcctttaaaccagccccagctatctgtagatagcatcaaattaaactagttctcatggacaaaaggctatgtgtgggttgtctactcatcagccttagaattttatgtgtggaaaactcagcgaataaaaagcaaccttcctaaactacaaaacttttccctccatcccaagtagtctcaatgagggttcaaagagtcaaaaacaagtcaaacaacaacaaaccatggtcacaattattggccctaggaccacatcctagctgtctgtctctgctgtctagtctgtagctagattttccctttgctttcacccttctccccttactcttggagtctcacttaggaaagccaagattcattctggggctgctggcaagcagggactggagaggggggtgtgatcatcaagcaaggaagggggaggggagtcatttcagaactacggtttcccctgcaaacgcaaaaggcaaccttgtgtcatccggctatcaaggatgctggtgtgaacatcatccaggcaagctgacgccccgagcagaaaagtaagaaaacctgtgctttccctactcctgcccccaaggggcagctacagaaaatgggggtggggcaggatattatcttgctcctactggggatgcatacacagactgggggttccttcggttatccccagttacgaggatgggggggagggggttaagggaagagggaacccctatctacctccttctaaaaggggagagttaagagagaaccattaaatccagatggagtggccctgaaagcgcccccaggtcactcatccccgcaccaagagcaagcggaagggctgggataaaggggatggagggctggtcacgggcaaggccccacccccccggtttaggagggaaggagagccccggctcacagccgaatccccgggcagtcccctagcgtcgcccccccaccccagcccttcctcggtctgcggagcccccggcagcccgagaggcagccgctccttcctcccctcacccaccgcgtccccacccccacccgctcccacctcctgcccgccgcggcccgttacctgctcgtcgaagcggctgaccacggcctggacccattccaccggcctgtgtgcggccatgtcctcccggcgacccgggggcggtggagggccggcgtccggggcccgcctgagggcgggcgggcggccggcgcggaggtgagggcagcggcgagccgagcggctgaggagtgcgggcagctagcgttcccacgggggtggggacgggggcccgcgcggcccgccgggagggggacaggggaagggggcgttggcgaggagactgggggaggggtggggaggggagcccggggaggggagggcgcctgtgggtggctctccccactagcgccgtctcccctcagccatcacagtccgagacgccgccatgacaccccaccggaagtgggatcctttccacggctcggggagagggagagcgagcgagcttgagattgagagcgcggctgggaaaggggagggggaagcgagagggaaggggcctgctgcgcatgcgcccgcggccggccggtttcattaatgaaaaagcgagtcctcctggaggtgacgtcacctaactcctccgggcccggaggcgcgcgtccctcgctgccgcgggtctccccacctaaactggcgcggggctctggccagagaatctgagccgactccggtgcgtaggctgtcattgccaccgccgcctcgaacagcccttcccccgctggcctccgggcttggatcgctcccggggttagaagttagggtgtcctgaggctaggctttctctccgaccgctgatctctgtcgctgatctgtcccggaggctggagtcagtctctctccgctttcttcacttaaaaatgtaaggcacacaccgccacgcagtcgatggggcttctgaaggctgctgaaaacgggtaaaaagaaggccaagagagattccgtgatttttttctttttaatgtcgcttaaattccaaagcaaggcccagtggtgatccaagttggagactagaattccccaatccgaaattcctcaactaaactgacggacaaccaagttaataaaactttttgcacggatgataattcagattgaagactagttcaccatactgtaaagacctttaaaaggcctaacatttatgcatttcagcctttcgaacaaacctttccagtaggactcagtagcctgacctatctgatgaacagagcactggaggttccaggatacatgcccaagggctgataagtaccaaaatggtttgactctaagaacaaatcgagaaggatggctctccagaaacaagggccttcccaatgcccagaaccagagtttgaaggacttgtgtggaattggctgtgcacacttacaaaagaggataaacccaaaagatagtttgctcggggctagcctgttctacttggggatttccaggccaagcagagctacagggtgaagctctctactcatcggatggggagggaaaggcgctctgacactggactttgaaatgagttttcttcaatgcacttgaattaagtcagtgttaaaatgtgtttagaagcaggatgtggagatgctcgctttcattagaggcaagcaaatcctcctgagtcaaccactgctccatagtgtggccttgtctcaaaaacaaaagtgtggacgcgcactcagacaacagcctgcagccatcaaccattagccacataggaagataccaactgggtgataagatgaaacaaaaccacaattttcatttcaccacagaaaatccacagagctagtagcccacggacaaagtggtatagctgtaaaagaagtctcaagtctaggtaggttagtgatcttccaagatgcaaattaagttaatgtttcattccactgaaacaaaaggacagagattggctgtttctacgatcccttcttgaaagctgcaacatggatactggtttctttagatgacgtcagcggtgatgggagtgctgaagagaaatgagagaagattaaagggcctttggtgctttctgcatccaggaccctggaaaaagtccttactcacagcacatcgccccaaatagcatcccaacgtgtctacttcactgctaaacagctagaaccactacctccctttccctttctcacaccggctctgaaacccctgattagctcctctttgccctggcattccatctttatctttgaaacttagatgtggctgagccctgcccccccccacacacacacacaccatcaccattccattactaaatagcctctgtctcattcctccccttgactggctccttcctggttgtctctctaaccttcactgctggcttcttgctctcctttctttgctcaggctccagccactggagcattaattcatctgactgtgcgcctgtgtacaaagtcctattttttcccccttcaccccaagcctctcattgccaatggaggttctagccttcacccagcctcctctctaatgaactcagtcagttcttgtaaaccaatattaagtatccatcagcccattccacaccgtaaactttgctaagccatgcatagtggtgtgacagggagtctaaaccaagtcatcatggaaaggaagacctggttaactaaggagtgtccctgcccatgcccacccatgtttaaagggcagatatcactcagctccggacaattcctgccatgcagggatgttgacctcatgttgctagaacttccagttacttaagagaagctagaaatccaaacttatgtatagatgtctctaatttttacactgtgacagccaatcacatttctcaattttgtgcagccaaagtaagttagctgtctgagtttagcttgtagaaactgagtggactagctgtagtctcgttggcaaaaggcatacacttctgagtaaagattggcttatatcctaacttcctttcttctgcgctgtaaatggtattagagattatgtgtttatgagattatgaattagagattatgtacagtttgaatgtatatcgccctcattcatcccccctcttcattagataaaaactgtcaattgttcttcaagtcttttattttatttgtttgtataactgttttgcttgtgtgtatctaagcaccgtgtatgtgcagtgcctgagagggccagaagagggcaccagatcccctggaacaggaggtacagacaattataagccacactatgggtgctgggaatcaaacccagatcctctgaggagcggccagtgctcttaaccactgagccatctccccaacccctcaaggatcatgtccaaagtctcaaggtattaattctaccctctccccacctctacagcagctccccatccctctatccctacataccaaagaatacaggctcttttgaactaagacacttgtttcctagccgctgggagggttaatggccagtgccagtagccctcagctgaagcctgctccagaattgccctctgctgaggagagcttctgcatgacacatgacagcacttccaggagagccttttcagactagatgttaagttcaggacagatccactctgaaggctttcttggctccagagctcccctgatcaggtcagctcccaagaaaatgactggctggagctttatctgtgactacattttattctgcttctatttctcctcaatactactccctctgtactgcacaatgttgattcccaagaacaccaagtgccatgaagggagcctgatatagtggagctgaattagcctatgagtagctggcagtgaggacctcacagccttgtgggccttgacatgcacagacacacatgcatacacataaattaaagcctttttaagaagaaggttggaatataatacaaatagaagagtgtaccagtaggttcaatctagcaggctttcttcttctttttttaatgtaagggaattggtaatttaaggacaggaatagggcatatacctgtaacctttgtaattggaagatgaaggtaagacagtggcaagttcaagaccaacctgagttagtgagaccctgtctcaggacagcaacacatgaggatgaacttatgtaactgtggatgcagtaaatctataccatggagaaagacaatgaaagtctgagaacgattaattaccaaagactaaggataaaagtcaaagctgagtacagactacggcttaattataagagcagtggaactccaaagtgattctcaggtctggcaagtctgctgaaccaaggtctggactagcagttggggaaagtactaggccatgtgtggcaggtcatctttctccacgcatttacaaccctcagaaatccatatcaccttgaggactcaaaagctgcattaagggcaatttattgcctcatcatctctcacccataagtatatctaccttgcaagaccaaacaagccctcagaatctaccaaccccttttcacctgcctaccagactaataactaaggtcaagccacaaaataaccccaccaaggaaatgttagaaccactaatggaggaaaggcaatgtgtatattgaagatagagccagccgtttgtttgtgtgtgtgtatgtgcatgtgtgtccctgtgtgtgtgtgcacgcgcgcatgcgtagaagctaggagagcatgggatcaggtccccagattgctttgggaaaggagggaggaagagaaaacataatgctaagcaaagcagagtttattgatgtaagaacatccctgtactgtgggatctacatcctggccaggcctccaggaaatgatgctaatgggttactaggatggttctaggaaacttagagaaagcaatggcctggactcacgaaatagaaaaacaacggaataagagacatagtcacagggaagcagccacatgtactgccagcactcagatgctcaggcaggaggattgtgagttgctggcagcctgaatacataagcaagtatgaaaacagctgaagctaactacaagactcagaagaaagaaagaaagaaagaaagaaagaaagaaagaaggaaaggggaaaaaaaagactcagaagagcgggatgctacagtaggcataaaatgtacccacctctccagctggtggtgttctgccttctttcacaagctggcaagaggggttctctgtaggccagggctgctgatagacagtatttgagttaggagcagtaggcatcacagtattccagattaagtagtgttgttttagatgtcaagattagagtgagccagactcccagagagctatgcacatagttaatagaacactggtagaaatataagtgggcaaccaatcagttccactacataatttttaaaacccacagatagaggaggaagagactgagagaaactcccttctggtaaacaatcgcttgccccatttcttgatccaagtcaatttccacactgtttaagaagactgtattcctagcgagtcaatgaaaccaagtgcccactggtcctcctggctgtagaagtgaacatatttagttgctgatagagtcaccaactctacagcaacagttttggcctgtgggacaaaagctgtcatagtgggaaaggtcgggtggaggcccctgaacctgttcctgatcatcccaaccaaaaaagcgtacattttcaaaactaacccgctgctgggtgggtgctacaagcctgttagcctagttatcaggagatgggggcaggaggatcgagaattcagggtcatccttaattacatagggaatttggagccaagctgtggaataggaaactgtctcaaaacaaaacaaacaacatggctatcttgaggaaatcacagaaatgagagagaagcacagagcagtagagtccccaacgcaccacgctgacctagcaactaattctactgggaatccgactgccagacagggcgtgcagttttggtcatttgctttttatcctccttcctgctaagaacccaacatctccaagtaaagctaaaagaagcctgggccctcatccttcaagtggtgatactgaccctggacctggagttcaggttacataaaacaaggaccccctccatcctgctaagcatgtgcatccagactcaaggcaatcaaagccctccctaactataccaggaagtgctacgacttgtaaaggctcagaggcttaagtaactgctaacggaggatctcgggactggaaggagaaatgacttatttggttgttcggggttgttttgtttggggtggtaggaattgaactcagagacacatgtgcttagcatccgcaccacccaccaagtcatctcttgcccaaggttgccagttttgttgtctagaaccaaagctgcacagctgagggcaagggtctatttggactgtttagcataagggcttacgtgattcccgttagcactgtttaatgagacgctgtaagagccctggcttaggtcaggcatggtactagggaagctgaaacaggaggactgtcagatgtctgaggtcaacctgggctacattatgaattgcaggccagatgtggttacagaataagaccttgtcaaaacaaaaacaaagcaaacaaaaacctccaacaacccccaggaccactgggaggggtacaaagagaaatgtaaagagaatcctggtcatcgactcctgttatctaggcctgaaagaatttctctctttttgcctttcccccttgtctaaactcgctctgcccactccagtccttcctcccctgaccctttaagtacatactcgtcttgccctcggctcagtcttgctaagtttctaactctgcagatagcaaatcacaggcatgccataatacttttgtcttcattgattaatcagaggggagcagctggaaacaactacttataagctaattgttatcaatgcataggtaacaaaagctattacccggactcagcctgtgtagtgttctgatctaggtgttaaaagagctgagagaaacgtctttcctccaggtatgctagtggttgggggaaggtgttttctcctcagtcttcagtgatatggagtataaatgttcctttcagaggaccctaattctgtcattcatttcttccctccgtgaatgcctttgcagctacgtgggatgttctgtagctggatcttgttttaagtcaagaggcggggcctcgttatctttctggagcaggtctcagacactggactcaaatgactttcctgcctcagccttccatgtagcttgcccagctttatagctgtgcctcgaatgtctcccaaaattccacacggtaaaggaggtaggaggtcttcaggttattaggggcctgggctaggaaactccgcgactccagctccttcccagctctgcttccaggttgacaggagcagctttgctctgccacgtgcgcggcgtgctgacttaaatcattcaggtaagaaatgatttaagcatgtgcaccactccccgggagctattgtctcatcctggctaacctctctccttagaaacagcccctggtcggctgttgagtcacagacggagacaatggtcagaggaagaggaggcagccagctcttcatcatggttgccccttctccggtggcctcatagttcccaggcttagaaggcacagcatggcagtgctgtccagtctgccacctctcacagtgaaaggaagaggggaaaggacaaggggtgccatgaatcctcagccacagactgctgagcctgagcccgtgacagtccccacttacccagagaaaagacggaacttggctgaccagatatgctgtgagtcctgctagagttgcccagcctggagggagaaagggcagaacagaacagattctttcttgtggttcccagaaacatcagaaatttccccaaaagtcttacaggttctcaagtgggacgctgaaggccagactgcagaagaaacctctagccttgccctgttaaaacccaactctctgcttatttccctcaggactctgagaaccaagttctctcaggagtttcacctctcctgctctctagctctgcagccttcccagctgtgccacgatgcccagcagactgtgtcaaatgctccatctgcacagttcgggtggttctgcagaagggcaagacccagggcaagatccacctcttctgatcacctctggtcaagtcttcaagcctgcgagccacattcatgagccacaaccgaggccctctgcagagatgggcacagtggtcacagtcctgtgacccatttgcagaccacctaaaattcggaaagccatgtgcccttgcattagaaggaactggctgtggagtgggggagaggcaggaatgtttgggtagcaatatatgaaacatggcaaagaagcagacagggtggatagagtttcaagctggtccagcagagtagggaggagattgccagggatggagccattgtgggcaaagccctggaggtctgactaaaagcctggagctcactgctcctaggccgtgtataaaagatgactgttacccaagtccgaaaccacagttccgtcctagcaggggtctcagagaagtcaacatttttatccatcttcacgagtggaagacaaaggtttatctgtggcttcaaacacatgcatcttcttatcatgtcaagttcttggtctcagcatctgcagttcatctaaacagagtgggagcgtgtgggaaggatattggggttacagcctaggtggagagtctggatttatagatggtcatgagctgctatgtgggtgctgagaactgaactcagatcctctcaggcactgagccacctccccagccccagccccacagcaagtttgaagctagcaggcatactatggccggccctgtctcaaagggactggggaggggagacaggtgttgacatggtgttacagacaaaagcaagcatcctggtctacatagtgagagcccttacagaaggcaaacacaaaagagacaacactctcttctccacatctaagacttaaggcttgacctacccatgcctgaatgcctccaccacctgtggaagtgtttgctactctggacccttccaagtcctcatcacctgccttctccagacaagtgaccggaggctgtgtgtttcaagctttatctacagcttcaggacatcccatgtctccagcctcacctccttcagcacctgctttcagacacacatacccacacacagacacatcattaaaaatcaaagtaagtcttgacgttagaaagaattaaaaaaaaaaattctaccacatagctatgtggtggatagtgaatcagatagctttcatatgtctttgttcataataatacataaatattaagtgtgtctgcaggttgccagtgaagaggctcctcctgggaggactcacgtccttctgcagcacttgccacatgaaagtttccccttccgtcatctggctgagatatcctcttggcagaaggaagccatacttgtggaaaaacactagtgttcatgtaacataacaccagatcacctaaaacaagcagcttccacacaaagcaggccagcatctctgcatgtgttccactgacctgtccctccagggattctcctcaggaaaagggggctttggccagtaattttggcaagcgactccgtctggtttgtaggcaactggagagcatatcagcttctagaaggttctcataaatagaatcattaaaacaatgtactagtagaaaaaaatactgtggaatgagagctctggcctagcactctcgtaacactggtgaacactagagccaccatgtatttatttactttatgtgagtgttttgcctgcatgtatgtatatgcaccatgtgcattgcctgggtacccttggaggacaaaagaggacattagtgtccctgggaatgaagtttcaggtggttgtgagctgccatgttagtattgggaactgatcctaagtcctctgcaagaacagccagtgatcttaatcaggaacgaggccaacctggtctacaaagtgagttccaggacaacagagaaaccctgtctcaaaaaaaaacaaacaaacaaaaaaaaaaaaacaaaaaaaaacaaaagcaaaaaaagctttgtatttaattatttcttttttatttcatgtgtattggagttctgcctgcatgtgcatctatgtaaggatagtgtatcctttggacctggagtgtgagctaccgtgagagctgggacttgaacctggatcctctagaagaaaagctattgcttgtaacctctgagccttctccccagcccctatttctttctttctttcttttttttcttttcttttctttctttctttctttcttttttttttttttttttttttttttttttttttttttttgtgctgaatgtggtggtacacaccattaattccaccactccagaggatgaggcagaggcaggaagatctttaaaagttcaagactaacctggtctacatagtaggatccaggctagccagggctacagtgtgaatctgtcttaaaatcttttcgttgtattcttccataagttaacgtatcttgatcgtatatatctgcatcatcttcctacttcctcgccaaccccctccccctcctcctctctctaacccactaagtccaattagttctgtggggcagctgtttctcaggtaaaagggtcatctttggcccaaacttcactcccgtgtcatcgtcccaaatgctcagagcaagctcacggtcctaggctatttctaagcacagtggagctcccccaggtctgatagctgcactttagaactaaaacccaagagaagtttaaaggagggggagcctgaaaaactcaggtcagacctcgagtcctcgtgggcaggaagtacagactcaataacagaaccaagataagtttcctgaagagatccgtctctgcatttcattattgcctccatttaacttaccagtctcaagggcatggaactttgtctgcagagtgagttccaagatggccagggaactgaggagatagcttggtgagtaaaaggcttacaatccaagtgtgaggatcccccacatctacataaaaccctggagctagagggatggctcagtgattaagagcactgactgctcttccagaggtcctaagtccaattcccagcaaccacatggtggctcataccatctgtaatgggatctgataccctcttctggtgtgtggatgtatgtgtaaaaactcctatatatatatatatatatatatatatatatacaacacacaagaaaataaattaataaaaaaaaaaaaactgagccaggcgtggtggcacacgcctttaatcccagcacttggcaggcagaggcaggcagatttctgagtttgaggccagcctggtctacagagtgagtttcaggacagccagggctatacagagaaaccctgtctcgaaaaaacaaaaaacaaaacaaaacaaaacaaacaaacaaacaaaaaaaacaccctggcacagggctaatgagctggctgggcaggaaaggcacacatggttgaaagggaaataactcatgaagttggtcctctactctccaggagcacacagcctgcaggtcagtgctcacccgcatacatcaataggtaggtaagcatctctgttggattttgcactgctgtgatgaaacaccatgacaacagcaaggtggggaggggaggggagggtttatttctcttaccacatcatccagggaagtcaggccaggaacccagggcaaggaccagaaggcaggagctggaggaagccgaggccatgggaagtgctgcttagtgacttgttcctcaggacttgctcaactgctttcttacagcaccccaaaccaccaacccaggggtggtactgcccacagtgagctgggccttcccacatcaattatcactcgagaaaatgtaccacaggcttgcccacaggccaattcagcgagggcatcttctcagttgaggtttctgattccaaaatgactgacttgcttatgtcaagttgacataaaaattagccagtacaacaagtaaatgcaataataataataacagccgggtgtggtggcacacgcctttaatcccagcactcaagaggcagaggcaggcagatttctgagttcgaggccagcctggtctaca

SEQ ID NO: 89 - DNA, 27300 bp, Homo sapiens
acactccttaaggtaaaatttaataataccaaaagtaccctagaaaactgatgaaatggtaacaaaatttgagattatactttgatagaataatttttgtccacattaaagtttgacatctacggagctagacaagggagtaatacaaagaaactccccaagcagatgagtagatatttgaactatcttgctgtcaaaataactataaaatttcaagatgttgaatgggggataggtagacaattctttaaaggtctgattatttaggcaatgactcctcttgtggtttggaatatgacatgttgacaatcaaaacttagttctactacttactagccatgtgatcttcagcaatttacttaacctttctgggcttcggtttcctcatctataaaaatagggaatatattacctttctcttgtaatatgaatgccaaaatgcctggaatgtatcttgccagaaggaagggtccagccaagactattcctttatctaagagtgttccccaagctttggtctcaaaaggcccaggctaatgcatttcttactattggtctgaaattctatgttctcctaagacatagtttgtaagactttaatgaataacttcaattaagcacaaggtaacctcttaaaaacatatgctgtaattctctccttgcatcctcaaaagagtacatcttcatggatcattttaaaaagtcttaggtaagaaaaaataaccatttaataatggcagttatatcctggaaagggctcaaaattgggatgatagaatgtctaactctgacatgtgccgctgctctggaagcaattggtgggagttccagaatttccatgtacagtgaggatatggcgatggaaaacaatcttgtgtgccatttaggcagatgggaagcagggctataaaacttcacttacacaacctactaaaaattaattttccatatcagagattagagagagtttgtgaagactgttgaggtagaggtgaagccctcccagtgctccacacttttgtgctgtccctggaaacaatttcagccagaaaacactgggacaacatcttcaaagtgctgggggtagaaaacccagaaacattgtgaacctataattctatacctaatgaaaatatctttgcaaaatgaggatgaaataaagacaggcaaagctgaaagaattaatcaacatcacaccagtactataagaaatgttgaaaagaaattctttgtaagaaaataatactagatggaaatatgaacctacacaaaggagtgaagagcaccagaaatagtaactatgtgtgaaatataaaagaattttttttactatttacatctctttaaaagattactgactgtgtaagacaaaaataataaacatttattgtggatatatttagaagtaaaatataagacaatagcacaaaaaccagaagagaaaataataaaagtgtgcagttgtaaggatcttctattatacatgaggtggtatagtataatttgaaagtagactgtgatgctaaattaaatctcaaagcaaccactaaaacaacacatgaaaatgttttgctaatatgcaaaaaaggagatataatgaaattgtagaaaacactcaataccccaaaaaaaggcataaaaagaggaaaaggaagacatagttgaagtctcaaatagaacacaaacagcaagatagtatatttaaactcaacatatcaataaccatattaaatgaaactggtctaaataatcagaaaaagacttcagaacatggaatattagcagagataaaaaagagatcatttcataatgataaaatattgaattcaagaggacataacaatcctaagtgtttatgaacctagtaacagatcttcaaaatacatgaagcaaaagctgatagaactataaggagaatagtgaaactcacaattatagatgaagatttcaacatgtctctctcaataagtagacagaataacaagaagggcatggaagacttgaataacactatggaacaagttgaccgaattgacatttatacacactccactcaacaacagcagagcaagcattcctttcaaatgtgcatatacatccaccaagacagatcattttctgggccattaaacaagcctcaataaatttgaaaggattcctgtcataccaagtaccttgatcacaacagaatcaaattagcaaccaatagcagcaagatctctagaaaaccaccatttagaaattaaagaacataagtctctataactcaagagtcaaagaaggcatcaaaaggggaatttgaacatgttttcactgacttgaaaatgaaactgaaaacataacctataaaaatgtgtgggatgcagctaaagtagtgcttagagggaaattctgagtagtaaatgcctgtttagaaaagaagaaaggtctctgtgtggactgaattgtggcttctggaaagataagtccacatcctaatcactagaacctttgaatgttaccttatttggaaaaagagtctttgcagatataattgagaatcttgagatgagatcaccctggattatctgagtggaacttcagtgtcatcacagcatctttataagagacaaagagaaacacatacaaagaaggccatgtggaaatggagacagattggagaaatgtgtcacaagccaatgaatgccaaaagcctccagaagctggaagaagcaaggaacagaatctccccagagcctctggagagagtacaatctgcggacaccttgatttcagacttctagctcccataactgtgagagaatacattcctgatctttaagcctctgagtttgtggtaatttgttacaacagccataggaagctagtgtagcctcaaatcaatgacctcagcttatatgttaagaaactagaaaaagaagagcaaattaaacacaatgttagtagaataaaagaaacagaaatgagaccagaaatcattgaaatgaaaaacagaaaaacaatatagaaaatcaagctgggcacagtaattcacacgtgtaatcccagtgctttaggaggctgaggtgggaggattgcttgaggctagaagtttgaaaccagcctgaacaacatagtgagaccctgtctctacaaaaaaaaaaaattttaaactggactgtgcatggttgtgtgcacctgtagtcccaccattcaggaggctggggaaggaggatctcttgagcccagtagttcaaggctgcagggacttatgatctggtcactgtactccagtctgggtgacaaagcaagactgcatctcaaaaaacaaaacaaaacaaaacaaaaaaacacacaacaactccctctcactctctctctcagttatactttaataaagttgtacaaaatgaaaaaagtgagaagtttagagtagctaaaaagtaggttatgagggggtaggcagggaggcaggaagaaattagtttggagagataggttggactatgtcctgtggacaggattgtggactagactgggagagcctagggtaggaataagaactagacaattaggtattagatgatggatggcctcggttgaggcagtgaatggagagaactggtgaggaagaagtggggctggatttgggaaacatctaagatgtggaatggaaatgactttatgaccagttggatgagggagaggaaaaggttgatatcgaggtatttggcttctgagcaggcattgaattgtgttcccctaaaattcagatgttgaagtcctaaccccccctcccccagtgttactctatctggagataggatctttagaaggtatcttagtccatttgtgctgatataacagagtagctgaaactgagtagtttaaaaacgacagaaatttatttctcacagttctggaggctcggaagtccaaggtcaagacgctggtacctggtaagggccttgtagggaggaacactgtgtcctcacatgggagaagagcaagactgcaagctagccaaatgtttcgtgaagcctcttttataagatccttaatctcattaaggaaggaggatccctcatgacctaatcacatcttaaaggctgcacctcttaatactatcgcattggcaacactggaattttggatggcacacatgcaaaccctagcagaaggttattaaggttaaaagaagtcataagggtggggctctaatctattaggactgtggcttatatagaaaaagatctctctttgctatgcaaagacatatggagaaggcgtctctctgcaagccagttaagagtgccctcaccagcaaataaatcctgctaggctttgatattggacgttgcagcctccagaactgtaagaaaaccaattttcattgtgtaagccacccggtctgtggtgttttgttatggcagacagaactgactagcacaggagcttggtgaaggagtggggtggcaggaattgggagatgttcatgccattcacctagatcaagaacacaggacaagaagcaaattgggacagtgtaagttcagatttggatatgttgtttggcagaaattcacataaggaggtaaacaactgaaaatatagattggaagctctgaagagaggttggctagaggtatggatttaggagccatcagcaacaggtggcagctgaagccacggggatgggtatacagtgcaggatgggaattcaaccctagtctctgagaagaaatgtccagagatggaggaagagaaccatgatagagtggtgactctgcagccaatgagagaattttagaaaggggtgattaacattatcaaatgcctcagagcactgggcacatttctaggaacatgtctaagtgtttttgagatggctgttaaaatcaaggagctggacgggcacgatggctcatgcccgtaattccagcactttgggagaccgagcagggaggattgcttgagcctaggagtttgaggtggcagtgagctatgattacaccgctatactctggcctgggcaacagagagagaccctgtcttggggggaaaaaacaaaacaacaaaaaacagaaaataaggagcttacggtctgcctaaaaagaacacaaacacatggcaattaggaaatcactcaattaagaaattgcttatcaatgtaacagaaaagtgtaatagagattcatccatttattctgcacacatatattgagctcccactatgtgtcaggcatttagttgtcagaagaggcaattggatttttaaagagaaggatatgacttagttgtggggctggaaagaatgatttttctggctaagtgaaaaagaatagcagagtaacatgggcatattggctgggatgggtttgggagggtggagaggatctggttttgaccagagtccaaagaagggggaataatttgggggaaagcctgcctgagtgagttggtaccgtagattggagagctggaaggcacccatcgagtgtagctagtcccagaagttttcctactccaatattttctaaaggttatgctcctactgctgcaacacaaggcagaacccccttgtgtcaggctgtcaagctaatagggccactgcctcctccagaaaggacatgcagaaagtgcaagctactccattggtcaccaaatatgcctccaaatgccctctgacttggacaggacattcgcataacaaaattccgaagcaaagcataattaaaagagggttttaggtacaagagcagcttccaagccctgatctacacctgggctctttcaaatagcaggtgcaaggagactgggtgattcaaagagtcaatcataacttatattggctttgggtggaccgatagacagcctgacgtatggtcgggcggacagttagaatgagcgaatgcgtggatgatgtactaccagtctccgaccaccaccagttttccctagccggaaactagtagcaaagcttccccgagaccgctctaaagctgcagttctccagacggccgccggaagagggcgctgcggatcgcctcggtctgcaaccttcagaccccaagtcctaggcagcgagggagaattcagcctccctcaagtcccagaaaacattgggcctcggagattccccctccacccttccctcacacccaccccaatggcctggggtcgatactgcggccaccggaaactgcctgggacaagtgttggggatgtgggggagacgggctgtggtgggaggttggagaggaggaaaggagcggaggagggaaccccagcgctgctggcaagcccgcgggaaactcgaacacccaaggcccacgggctcccactgttgggactgagatttgttggggaacagagggcagaaagagctataggtttcgactacctaaagctgaatgaggctgcacaggtcctggggcgaaaacagccgcgccgccacaaggatgcttcgggaatctgtcctttaattatcaggagcagctgcgaaacttaccttagcgcagcacgaaccctagagcgcccccgagggtgtccctgccccttccgacgggggcgtctggcggattcgcggcgtagcacggcagcgcgggcctcacagggtcggctgaccgcttcaggcccgtgctcctacctcccgtctccgtcttggtttcctcgcaattcaaagggagctgctgagctcccgctgttctctgctttgtaacccgctccctcaggttccctcctaccccaggccccttcccgccagagggcgcccctggagtcggtggagaaggtaggggctctaaatacaaaaattcaagacgagttgaatcttggcttgaactgcgtgacaggaaaataggcaagtttggagaccacaggtgttaacttctagtggggcttgacccgacagaggagcagattcttcaacaccaaaggcctaagggccggactctcttcgcggactctggccctcatagacgcgccctcgcctcccataccctccgtagagcatgcctgtgagggaaagggagaagcagaagccgcgctcggatgacttggcgccccaccccccagcctgcccacaggccacgaattgagaaaagctttcccaaaaggaaagtcctctcaaaggccctagacggtcaaatcgggaaagggagcagtagagggatccttcctcccgctgcgtctgtgaaagccgcctgtctgcacgccccgggctcccgcggtccctcccgaggatttcggttctggtgcctgagaaagcagcgcagagggggccctgcgagacccctccagagaaatcatcccccggaggcattcctcggatcttggggttgcggagcagcgccccccagcgcccagttacactcctgccttccgctccctgcgcctggttgcctcgatggcactcgcgagcccagctcagcccggcttagaagcctgtgcctagctgtgggagactgcgggagcaactgaggggcccaagtgtttcttgttgaaggtcagaggcctagagtcacagtttctctaaatccaaaatacagaatcagaaggaataactccttctattagcgacttttgtgatctacaaactcaggcacatgatctcatcctgaattgtttggatccctagcacaaaccaagccagtacacagggcaggttgtgaccattttttacagctcaggaaacaggtgctcggaggctgtgtttcctcagcgtttctcgaggcactggggggttcaaagatagataaaacaggggctcaccctcaaggagggaagccagaaaacacacactggtttactctggctgtgatgggagtgactccagggtgtggcgggagcccacaagagcggtactgcacagctggaaaaaggcaaagccagggttcaaacctaggacggacttccactcaaggactcctctcacgaccttggaatgctgagagatcaagaaatggtgcaaaaacccacacacgaatctccattacaaccctctctatctcactggatcctagagtaacatctgtcagaaagtaactacatattatttgggtgatttattgtgaatgtgtaagttccgtgtgagtaggagctgcatctagattaagtttgaattttcaggccttgcgtagtccctggcacagagccctagctgaataaatactgtcgagtgaatcaaaaattgcgataaaacttggagcaaaataacactaccaggagacagagtggctcagcgccctaaacaggtgtggaggaccacaaagggagttagaaaaagcagttggggggtggggcggtgagacaggtggttcctcctcacagttccacctggtccaagctacagaccccaaattagccttcttttgtatgagccctctgttcttgtctcgcaaagtgacactggagggagagaaaggagtttccctgcggccacgctggtgtaagcaaaggctgatggcgattccgcgcatctagggccgagcctgggcctgcgccccctcggattcctggcggagccgcagccagcgaagcagagcgtggtcggaatagaggcagcgaccgtgtgaggtcgcgccagggaaagctccgcgaggggccagcgttgggccctgccctgccctgaccgctccccactgtgcccactccacccgggagcaagctagttgcgggataaaggaatacgcgcagacttcgcaaagtgcaatcggggttcttcgtattcatggaaaaaaaaatcactggtttagcccgggtctgccctatttaggatgagtccaggaggcggcggaaagaaaggacgctcttcggtcagagggaggtgtttcgggccatgggagggactctggaggcctttgcttggataagcttggagatacagatgtccttctcttccctacaaggtgcgttagtctccgggcttattttcggcagtgcagtggtactggggaagaaggcagagccgcgtgttgagaaggggctagggtagtagaggcgctggagcctgggcggcagggcgctgcaaaggcccaggcgaggtggatagagagcttgctggtgcgcgcgagaagcacgcctgcaggcagaggttgaagcgccgtcccagttgtgtcccagagtgaagcgggagtctttgcccgccccagccacttcgagctccactccagttcagctcccagagtcgccacttgctgcgcggttgttggggagggggttcctggtccagaacgagacgtggggggctgggggtttcctcgagaactgcaggcctggttgcccccggactgtcagagccggaggccggggagctgccagccacgtgcgcctgtggcctgctgagaggttgaaaagctgccaagggacgaaggccgagaagacaggacctaggggctgtggaagattcacccaactcttccttttactcaggtcttgggacctaagagggggtggggatagtcatgataataactaccgcaatctccagtgctggcactgagctgaaaaacattcaaagctttcaaagcattttgatgtgcttcatcttacttgaatctcacaaaaaccttgtgaagattgatctccatttctaaatggcgttgagactggaagagatgtacaacattctacacttggtgttccttaaacttacaaacaactatgaaataatggcgagtgagagaaagaagctgggtgactgggaaacccaccccgccttcgcaattagaccccattcgggactcaggcccggccaggtcgcgcctgcagacaaggtctgtattcagcgttgccagttctcctctgtggttcgcttaagcccggcgtcgcctcccctccttgcttagccaccacagtgatcaatgctcagttcgtcggggcctgagagcgccccccagagaagcccctgggaaggaagggcaaggagccgggcttcgctctggtctttcgcaacaccagcggcgagcgcgtctccctgcgcaaacgtagggtggcctccccagctctgccgtggggaccgcacaaaaacgcgggcgcaggtgggagggcggagggtgtcctgagctttctttaccctggtaaagaaggtaggcggtgagaaaagcgaatgttattatagaagttggctttgtattgagggagtaagagctctcttcaaggagagggctgaaatctttaaaaataaataaaactttctctactgtaattgctattaataaaaaaagggagcccggatgaattaagtagctcaaaactgcctgttcgtcatgatcaggagctccttctctacaaggaggggaaagaaaatgtgaaaacaaaaactaaattcaagaagctccttgaccagcgcgggtgtcttggaggcacctgccggggccggccggggagcgctccgccctcccagcccctggcgcgcagaggagactaaaacagctaaggagaaagcaaaacaaaaacaatgataaaaacgtttaaaatccaaggacaaaaaccggagtcggtctcaaaatccgcgccgttcagtgctccactcggtagtcgactcggctgcaggccccggcctggccggagcaacgcgggggacacccccgattccgctggggagcgcagcccacagctccccctcgccaggcgcccaaggaccctcaaggcgcggggcccacacttgaagcctgggaacgcgcagacaggaaaccctcttcctcctaagcagtttcttgctcgtcggatgagaggcgcccaattgaagcagaatgatcctcatctactaatatccagcgtggccacaaagcgactggccatttacgccaccactttaaacaaagatatttggttattcccgggaagcaagagcacttttgcatggctgagctgcgggcggaggcgagcctcggcccagcctcccgcccgctgagctgcccgcacctcggcattcgccccctcctggccagcgctccagccgccggggttcaggctcagttccgcccggcaacagacagacgggcactcacgccgctccctgctcgcgcgctccctgaagcatcagaggggaaaacagcgtggctctgggctcgggtgctggggctgtgatgtcctcggaaagtcagctccagccccagatccccgcgtgtctgggagatgggcgagggtcagggacaccaggtttgttcgaggtggggcaacttcagtgacggaccctcccgtgagaccccttcccatcctcccagctctgggggccagtgctgtgtttgctcggccgggggtggggggggggggggaagaccttgggggaggcgtgttagcgggggtggcccactgaaaaacccctgagctgcgggggcgggttgtggctcggggatccgggacagcctccgggaggcagtcgatcccctactcagcgccccctccgcccgctcggattctctccggtagggggaaagggggcggggagcagaggtgtccctctgacggcggcagaagagaggcagacagactgacagacacgtagaccaacagtgcggccccagggttcgtccccagactcgctcgctcatttgttggcgactggggctcagcgcagcgaagcccgatgtggtccggaggcagtgggaaggcgcggggctgggaggccgcggcgggagggaggagcagccccggcaggctcaggtgaaacccccaccctgtccctcagccccctcctcctaaagacctgtccgtgcccggggaaccccgaccgaattggaaagtggttccactttgtaactccgcaagttggttgcaaagcagcattcaccttccttcctctcaaccatctctcctcctctgttactcccccaccccacctcctgccctccccgctctcggttccctcctccttcccctcccctccacctcctccccgcgctccgctggtaccccacaaaaaatgggggtgggggtgtccaagggaggggggaaatgctttgggtctcgtctctgcctctctctctctctctttgagacctaaaaatcctgacaagtgaaacttaaaggtgtttaccttgtcatcagcatgtaagctaattatctcgggcaagatgtaggcttctattgtcttgttgctttagcgcttacgccccgcctctggtggctgcctaaaacctggcgccgggctaaaacaaacgcgaggcagcccccgagcctccactcaagccaattaaggaggactcggtccactccgttacgtgtacatccaacaagatcggcgttaaggtaacaccagaatatttggcaaagggagaaaaaaaaagcagcgaggcttcgccttccccctctcccttttttttcctcctcttccttcctcctccagccgccgccgaatcatgtcgatgagtccaaagcacacgactccgttctcagtgtctgacatcttgagtcccctggaggaaagctacaagaaagtgggcatggagggcggcggcctcggggctccgctggcggcgtacaggcagggccaggcggcaccgccaacagcggccatgcagcagcacgccgtggggcaccacggcgccgtcaccgccgcctaccacatgacggcggcgggggtgccccagctctcgcactccgccgtggggggctactgcaacggcaacctgggcaacatgagcgagctgccgccgtaccaggacaccatgaggaacagcgcctctggccccggatggtacggcgccaacccagacccgcgcttccccgccagtaagtgaggccgccccactgcggggccgcgggctgagctcaggaggtgcggcgagagccgtccagaaggcgcggcgccggcaggctgcgcgctgggcatcagggagggcggcccggcagcggcgccagggacttgggtgcgggagctggggatgcttccccctgctcggctgggggtccaagaacaggcacttggtagcgctggggtcctgcggtcagatgcgggtactcggcgtctcctaggcgcggtggactggcagctctgctcggcgcagaagacctcggggagccaagggaagcgaccccgagctcaaggagcaggggcgagcagagcgcggagaggctagaccgggccaggagggaggctgccctgttgggaggcactcgagcgcccggcccggccctctctccagcggagtctgggcaggtgggaggactcgcagttccagaggggactctaagggtccgagcaggtgccctcactggggcctgacaggagagaagccaagaggcaaagcgtctgggggctccagcttttggaagtcaacaccccctctcctaacctctccaaactggggtctaccgtaggaccccagctcccggcctgagcccagttcgccgcctgtggccagctaatcctaatgctctgacccgggctgggcacgaaaggagcagaagcggcctttcccccactgcgtcttttggttcgaaagagggaactgagactgagggagggcagccagggttggggctgtgagcgctccagtacagccccctcgacggtacggcctggggcaggcgctggcagttccccgcggatgggcctcttgggccccagcgctaggctgcctgggtcaggagggcgccgtcggttggggcgggccgggcgggccaatggcgcggaaaacaggggtggcctggctcggcctggccccggccgacgctgtgcgtttgtcgcttacagtctcccgcttcatgggcccggcgagcggcatgaacatgagcggcatgggcggcctgggctcgctgggggacgtgagcaagaacatggccccgctgccaagcgcgccgcgcaggaagcgccgggtgctcttctcgcaggcgcaggtgtacgagctggagcgacgcttcaagcaacagaagtacctgtcggcgccggagcgcgagcacctggccagcatgatccacctgacgcccacgcaggtcaagatctggttccagaaccaccgctacaaaatgaagcgccaggccaaggacaaggcggcgcagcagcaactgcagcaggacagcggcggcggcgggggcggcgggggcaccgggtgcccgcagcagcaacaggctcagcagcagtcgccgcgacgcgtggcggtgccggtcctggtgaaagacggcaaaccgtgccaggcgggtgcccccgcgccgggcgccgccagcctacaaggccacgcgcagcagcaggcgcagcaccaggcgcaggccgcgcaggcggcggcagcggccatctccgtgggcagcggtggcgccggccttggcgcacacccgggccaccagccaggcagcgcaggccagtctccggacctggcgcaccacgccgccagccccgcggcgctgcagggccaggtatccagcctgtcccacctgaactcctcgggctcggactacggcaccatgtcctgctccaccttgctatacggtcggacctggtgagaggacgccgggccggccctagcccagcgctctgcctcaccgcttccctcctgcccgccacacagaccaccatccaccgctgctccacgcgcttcgacttttcttaacaacctggccgcgtttagaccaaggaacaaaaaaaccacaaaggccaaactgctggacgtctttctttttttccccccctaaaatttgtgggtttttttttttaaaaaaagaaaatgaaaaacaaccaagcgcatccaatctcaaggaatctttaagcagagaagggcataaaacagctttggggtgtctttttttggtgattcaaatgggttttccacgctagggcggggcacagattggagagggctctgtgctgacatggctctggactctaaagaccaaacttcactctgggcacactctgccagcaaagaggactcgcttgtaaataccaggatttttttttttttttgaagggaggacgggagctggggagaggaaagagtcttcaacataacccacttgtcactgacacaaaggaagtgccccctccccggcaccctctggccgcctaggctcagcggcgaccgccctccgcgaaaatagtttgtttaatgtgaacttgtagctgtaaaacgctgtcaaaagttggactaaatgcctagtttttagtaatctgtacattttgttgtaaaaagaaaaaccactcccagtccccagcccttcacattttttatgggcattgacaaatctgtgtatattatttggcagtttggtatttgcggcgtcagtctttttctgttgtaacttatgtagatatttggcttaaatatagttcctaagaagcttctaataaattatacaaattaaaaagattctttttctgattaaaaccctcctttttgttttgttttgatttggctttaaatggctttgaggggcgggggcttgggaggatcttgtctttggtctgatgagattcaaattgtttgggtttgagctcaaaggattctgaaccggttaaggaggtaaggaggccaggcccagagtccttgccccacaggaagagggagttttgttctgcctcagaaattgtgtggaaacaaatcttgagcagtcctgagactgcagtggaggaccgaaataccaaactacttccaccaagagggagagggagagaggaagagaaagagaccaaataattcattttctgagtcagacttctgttgataggagtctcagaactgtctactgtggtctcacaaagctgagccaaagttttaaaacagtgagagaggacacccattttaaatcagtctgagtgagttatggttttcagtgaatggatcacctctgtagatttgaacatcaaacctttatttctaatcagtggctgagctccttcacagaattcgatgggaggctgttttcgaaagtaaggaagtcattcaggggttttgtttctgtcctaaaacagggacccctctaggggaccagcagcagacgccttcagcccctgctgcttttggctcctttggcctccaacggggtaacactgggtgacaggcctgaggacatcccaggaaggactttgggagctgagatttcactctttgttgtactgggttttatctctgggatcctaaatttttgtagtaatgaatctttctcctgtttacagttcttcacctcccagccactacctcccacgccaagcaaaaaaaataaataaataataaatcatttttgattcctttcttccaacctctaatttcctggtttcctcagcgctcagtgtttgtgttgggagacccattagggatgagagagaggggagaaggaatggttttgaacacagaaaaattgtagtcccctggatgggctgtagcccttccgggtcacccttgccaaatctccggtcgaaaggcagctgagccagctgcgggcagacgcccctcccagcactttcctctaggcctggaagtattggattatgggcaattgattcttatttggcatgtactcacttctcgcccaggttttcaactttctttttcttcctctcttcccctctctcatttcgttattcgtctgcatctcttcccaatccctctctcccgctcccccaccaagagcttgtgaggaaagcagactggccggagtcctcgctccgggcccagcagtcctctttgttaacttcctggagcctcctctggcgtggtgccttaagactgtgggctaggccgggctttctccctcagaaacctgggcctcactgctgagacacagtttccaacagccagagggactcgaagattcccaagaggatggttgggtctagtgagagtgcttgttggaaggcggggaagggagattttaacaggtctcacgttttggaaaacaaacaaatttgaccacttgcgttggaatggtcagctgtggttccgggaccgggagtgtaggtggctaaggcacccagctcaggccggccgggcaggggacatggatactgcagctgctgtttggctctaggtccggatcccacggaattggagcttcgcttaacctgccccagcctagcccaagcccgggcggggacctggctggcggtgcccggctgtggttctggcggctgccccgcaccccattctagctgggaggaagcctttgggagtcacaattttagtaggctgtggcaccctcggccttatcatctttgcattggatggagtttccatcaaatacattcttctcctcgccgtctacagtcggcatagtttgaagtctgtttacttgtcccggggaaaggtgaactcaatcgggtttgcggaccgagacaaacaggacctcagcctctttcttgccatcaattacgctggctccatccgctcccgctcccggctgggggaattgtcgcagctgcgggaagagacctagaacgcaatctgaagcgtttcattagggaaataggtgcgcgctgggagcagtgcaagagggttccgcaacctggggacaccctccgcccctacagcaccgtcggcttctggaaagccgacagtcctcctttctgggaatctcctgcatcaactcgtgcccaatttctggcctcccctctcggagaaatcagcattctgaggatgcccctggcgctgaggtgcttggaagcttccgaggtttgggagcaagtacggttcaccccgagatcaccgcgaagctttgcctccgccaaagtaccctacccatccctaggccccaacggctgagaggagtgggggagattttgcacactgcaccccccttcctcctctccccacccccacttcgccatgtaaacactaggactttctcgagagccttggagagccgctctagtggcttcgggccctgaaaccccaggctgggcttttttgatgtttagcatcccaaagctgctccccaccctggccccagcctgggaactgggagctgtgggcaggagaggaaggaaagcagctctctcagctagcgagggggtcagggactgggccaagctcagaagcggggagaagagcgagacagagatgctctgagcaggggagacagggatcccgggctgctgccgctaccaacaagggtacacactgcggtcctcaaggccaggaggggggtgggggcagggaatgcctcagccaacagggcagcggctcggccctgctgctggcccggtgggaagtagcctggggccccgcgactgaaatccgagccaggcctgggcagtctccgctagaaacgctctgggcgcgcactcctggagacgcggaggcccgggcgctccagaccagtgtccttgtaggaggcttcttcacgaagcttagagtttggcctttcatagggaaagacttgctcgggagcaagtctaagggattttaagggattttaaatcttcctgggccagggctagggagctctagtgacagtgtcttggtctggaatccaactctccaattttgaggccgcagggaggaattctgagactttagaggccgcacagccttcagcgcgctcaccgcgtccaggcgtcagtgaggggctatctcgaggcgcgagtgcacaaaaggtagcgcgagtctcttctcaggcgatccagataagaggaaatgagagccgggttttctgacttccaactcattagggaccaggtaaggtcaatgctttctctattatgtctttatcttaaaagcgggtcaatttaagataagggaaaaaaaatccaggatctgtgtgaaccgtgctgataaagactgaccccttttctgaactaaaagcaagccaggcagacattcattttctataaacaagagagttgtgagaagctgccttgaattctgatcatatgtctccagacatcgctctcccttccctgctccccaccccccaattattagcgcgaggaagcagagtagacgattttatttgtggagaactagaaagcccattgggagatgagaatctgagatgatatgattcttaggcatgggttactggcttgtttagttcaactaggactttctttttgaatggaaagaaagtgacagacacgggtattgggagggaggaggctgaatgttttctctgctcggctagatcctggttaggagacgctggacaccatgttcctctggctctccctgccttctggctgacgcgttcctccttgtgcagctgtgtttctgagacttcaggccaccctctgtggggcccaatttggtagcttacctcaacttggagcatagaaagttttctggtgccccttcggccagttgtttctagaaggagtatcttattttcagtcaccctctctggaaagtttgtccacccaagctgagggatttggatatggatgggagtagatgaaagtaagttttattgaagggggtctgcatatgcccttatcctcacctcatgtagttgtgtttctgaactttctttaatgaatctcaaaggaacggagaaagagcaggttcagcaacttggcagcacagcttttgcctcagctgaagccatagctgaagtggctggctgcatttctctctgatagtgacctaatgcccaacttggtgggcatcgaggcatgatcctgggctcctgcgcctctcctcgtttgctaatgtttcccgtttgacctctgcttcgtaagcatttattacccttgttattatgagttgtagcaaagttttggaaagggtgagatttaaattcattttcctgttttatctatttttgttatttgcaggacccttcaacataaattgatcactgttagtgctctgcctgaaatataaataaaacataacataaatgtggcaggcaaaggacttgttaaagaaaactcttgcctcccacctaaaatccacatctgattctgcctactttgtaagtgattgcacacagatttctatgtatatatgtatgtgtgtatagaggtatatatacatatgtgtctctcttatacacatgtatatatacatatgtatctctcttatacacatgtatatatacatatgtatctctcttatacacatgtatatatacatatgtatctctcttatacacatgtatatatacatatgtatctctcttatacacatgtatatatacatatgtatctctcttatacacatgtatatatacatatgtatctcttatacacatgtatatatacatatgtatctatcttacacacatatatctattttataagatattcaaaaactgtaatatagaattctcagagattttacagaacctgttagatgcaagaacattgaataaattcactacctcaattaaggtgtctcatgaaaaagtttccttgaaaaattcaaatagaccaaaaccctttagttttacccactttaagtcagaatatttatttattgtcatgtgaaactctggataactaattatgttttaggaaattttaaaatttattcctaaataatttgaacttggtgtctgagacacagctgtggataagactttttgagacattctataacaacaacaaaaaaattgtcccttgccgaacttctattatccatctataaaaatcactggtataaatactaccgccctggggcaacaacagcaacgaacaaatgaaaactgtttctgctccgcatttgttgcaaacgtcctcttgatttcacactttaagccttcacatagtagtggaaataagaatgcaggtctgagtgttgtctgacaacaaggaaaaagacaaattttttttcttctcccttttcccctctatttcacacatttctggggaatccggtctttgattgttagatcttgctgctagtaacagcagactgttggtggagtgtcaaacattctatttctagagtattggtgattgttgatcattcatttatataaaatcagagctatcaggccaccaagtatctttggatatccttcccctgtccctgtgctctggatccagtctatggaaaatgacccacaacaggttagcgtctgccttgcctagcattctccctcctaatgctgctgctctaaaagtccaaagctctaggaaaacaaggctttatttggcccgcgtgctactgatttacctgatctcagcagcacacacggggctgagtgcgcgcgcgcagaagtaaacctgtgaattaccataatgacactaagaggaccgagagctagttcctctgagctgactgcacgctctgccgcaacccaggagacccagtcaatgtctaaggaactggatatgcctatgtgtaaagcgaacctcgcaaagttatggtcccaacagacgcttccagagcattaggtctctaaacagacttgcagcgacagacttctagaggagactcaagccgcagaggattaaatctctctctctgcctggccacttgatggtgcctcaaggtctgcaaggcctggggtgggactaagggcctggggggctgggcagtggcagcttcttccttcccttctgattctacttcagaaagaattgcaactgtcaaaccaccgtggtgcacacagcacacattcctacctcaagccacagcagacagaaattgtagctagttcgttactgccctgtgacctggcagtattaactgaaatgtcgattactactccctggcagcactgttccctgacaggactcctgagcctcgacctgggtgcagtaaactttggaagtgctgcattgtatcatacctacaactcacgcaatagataaaactcagacatctctctacacatctacatagtccattggcttcgtactgaaatcaaacagaaaaagtttttggaaatatttaacaaaaagccaacccactcatggccatcatttagcactgggtaggggtaaagagaaagagaaaccctttgaggtatgtggtagcatacaaacatgttcacagtaaccttcctgtattaaccattttctaacaattacaatgccacatcaacacagttagttgttgaaaattctcaacatggctaaatacttagattgcattggtggtgtgcctgtgaaagctatttgggggttgtgtatgtggttctgctcattggaaagacagaagagagaaagggggccggaaaggatactgggagaaaacagaaacaactattcctggtgaaagtgtgtgggcttctgagggcggttgtggcagctgagaagtgctggttatatatagctgggtcacagtgatggggaggtggggatggtggtggatgactgtgtcatgtgcctgtggtgtttagggggtgatcctagtggggagggcctgggagacggctgggtggtggtgtgtgtaccctgtctgagctttgggccggtaacacaatggcaacgtaattatctggctgaaacacgctcaaatggcaaaaagttgcaaaatagatcgacctcccagagaagagacagagctggttacagaggtctgcacccatcatccttttttcaatacattttaaacaagaggatctagcgagtgattctgattcaatacacataatcagtttgcaagtcttatttccatttgaaaacagggccatttgcaatcataagagccggacacgctgaaagatacggagcgcattccgagcagatgatgggtgacagaatctgtaggcaagcactaaatattttcttccagcttcagaccttgtgcatcagtcttctgtcccgaaccattttaaatggaatgttcctgttgaatatataatttaattgcttagaaaatggagactccatggttgggaggaaaaaaccggcaagaaaggtgacagagaaactatgttgattgtgcttctcctcagtactggttaacagtcatttaacgaagagtctacccattgggtagaagacttgatggaaaaaatgaattggtttttaaaggaacaaccgccagaaggggttgccggggctaacattctcaggctggagctgcaaagccctggctgggtgtggccgggactggcggggagtctgcggggccttcagggaagcccagggacaactccgcggcctcccaacgacgccgccaaagacctgggggcccctcgcggcccggctgttccgaattggttgccaaatgtctaaactagaagtgtggacacttgaaatctcgagctgtcttagggtctctcgctacgaaagtttggtttctaggaccaagagaagcagctgtcccaggcccttcgtttcctgtccgcagcctcatcctccccgcaccccccagctctcagtctccccagtcccagtccttaccccgtccacccgcggcctctctcccaacacccagccggcagcctcgctctcggcccccgcccgccccgcgtctccgcgtacccaggtccccgcgccccgccccgccccgcccctgcccaggttctccctcccgttcccgcgctgggaacagcctcggccgcgcgccccctgaggacgcggcccccaacccctcctggagaccacaccggcaagtctggtgtgcggaagagcagaaacttcctcggaatttcgatcccagaatatacaaatattagttcactaggtcacgacgatgatgcaaactctaacttgcagggatttttaaaaaagatcttaacgcacaatctttctttgtacaaataaacgaaaccaaacaaagccagcgaactactgctgtttccctcgtgaattttcttaaggaaaagagagattccttctctccccagatatcaacatctaacgaattttctaggagactgaaactcaacctaataatagtatgtgcttaatgctgattccatttttgtttcaaaggggggtaatttattagcttcctcaaagtggtgcctcgtaggcaggtgttgtattttttgatatccttgtaaagagtttttgcgtctgggaagatctcagaagaaccaataaataaggtgtgtgtatgttggggggtggaggtgggattctgtacagctcatggccctgcttgttcaatttcatgcaaaactcattctaaaagccccagggttctctttaataggggccaaatggcaggaaccccaaagatctaaatatttcactcttcctccctgtacctccctcactgcgccttccacccccagctataaattctagattcccctccccgccccccccccacccatcctgcggataattgagtggctcagaggcactaatctgccctggggtgaggtggggctggcagtggaggtaaggcctcccacaggctccctggttccgcaaaatgggaggacagaactcctacaactggcaggaggtgaagaggacgctgggacccacaggacctagtctgccaggggaaagggaaacaggctcccctgactaaggacacagcctcagaccaggcttggctgggtggacaggaatgtggtgcccaagagcagcagagatccagggtaggaagttgcagccatctgaaaaccccatagagatatattgcccacatgactatttctagaagtggtggttgatcccttcacaccttcccggatccaggatatacagcggctcgctagcccaagtcttcaggtgcaatcccagtcagggagaagaaacttcaccctgccctcctcagggagacccctcctgcctccccagtgtaggtatgtgagaccctcattaggaccccaagatcatgtgcaggaacatcaagcatcttattcttgtatttacaacctggtgtgactttattatctacttttcttctgtttcttcatccttccccattttccatttctttattccaatgccgatgttttctttgctttcttgtccaactccagtcatggctgcaatcctactttataggcaattcggtattgtttatcctaatgtcagtactaaaaggaaaagtagagaaagtggataggctaagtaataaagaatgaaagccagtaaggtccatatgggagaccagttggggagtaagaagaccagagaagagccaaggtcagcctatcaaaggactagggagaaaaacgatagaagcaaagagaagccgcagcctggagaaaatcaattaatgtcagtagatggggaggagggagtacagccgggacccaaggcatatgcctcccctggaggggcatagagagggataagggggaagcagatgtgtgtatggcagtctgtctctgagctgaggggcaaaaactagcaaagcttgccttcccttcttccgggctttaagaagggggactgtcctgccagagcaaattgaaagactgtggagcccaggggtcaggactgggagttcgccagccgaactccagcctgctcctccatcctggatcgctccgggttctgtaccccgtggaggaacatattcaagggaacctgggggcagagggcaaggccaaggggaggggaaatagcttctagaaacttctgtggagacaggcaaaactctttttctgcacacgtgtcccattcctcctccctgtagtttggagagggcattttagaaaaagagtcccttggttccttggttttccccgaacctgaggttggacagcgccccctttattctccgcgagcgcagcctggacaaaggcgtcacttggagggcgccccagctgcctgggaactccgagcggagcccatcccgcttccctaacccgagtcgtttcccaggatggaaggcggatcccggctccccgcgatcaggctaggccgcgggttctggctgggctgcaccccccaggtccccgcccccagcccccaccctctgcccctctggccgggctccgcagggctctcgcagtttcggagcccggggaccccggcgcaggaggaggcctgggcttgcccgggggctcagtgtggagagaaggagaggggagtcccccaccctccaggctgcttggggacttcgaggggcttggaatccgggtcctcccttttatgaggttcacacacactgtgagatattttagctgcagcacaacccttttaatacccagcatgacatcgactgtgtgagcgaggcccttatttggttggtgaacgccggggtgcacatcaagacgcttccctgcctgggaggcacagacccctctccaggggccccgaggcgggcaagcgaggtagctgagagggaccgcggcccagcatcggctcgtctgggtgggagggcggccgcccagacttcccgcggtcggcaccccctgctcggccccagcccagaggccgccagcatttgagtccccgcccagccgcggctccgccgtcggggctttcccccgaaaggcccaggcgccacctcgcgaagtcagcttggctggctcctgagcccggctctgccaccccaaagcaaggggccgtacccgcgtccttcctcggcgacccgcgcgctcccctccctctccgttaatattctccgataatttccgaggcaaagatttctatcttttgggcgaatttgtttcatctctcttgaattcagaaatggagccttcaaaagtcttaatgtgtgtttattttttctagcattcaaatgaatgcgaagccacggattgaatcccgtcactctttgggggttagcttctcccgatatttcacacggaaaacaaaactgggtccctcttatttgtacttgtccttaacctttgcagcaactgctgtagatgcggctctgtccattctctaatagattttaccaggggctggtgacagagaactgatttcttttctattagggtttagcacatctttgttgaaggcctgtagaatgaccagggattagatttgcatctcttagacgccctgtgtggtctttgtgcgaagcttgtaactgttaaaaatgacttgttaggaagcgtgtgggctctcatcgctctccttttgacagaatgattgtgaaattcagattggccctgtaggatttagcccacagattccacctgaaccctaagcaattagaccctaatctccctgcaatcatatttgagttaggatttgttgcactttgtttacttcaattaaaagcagtggaataatttttttccagcttttaaagtgaaatctccaggcataaaaccttaggacttcttagaaatgcttttggtagtgatgaggatttcttttccgtgtggtttcctccaagtcctcatgaccatccccttccttctcccatttaagtgactcgttttttcccctgttgctcgccaatgcccaaagcgtcttcacaggggctgaattcgcggcgcaagggaagaactgtgtggagatgacgcccagctggaggggcgcccaagctcaggccgtcgcccaggtccccgatggggatcctatgtcccgccgccgcgcggagctttcccaacacggcccgctggctg

SEQ ID NO: 90 - DNA, 27300 bp, Homo sapiens
cagccagcgggccgtgttgggaaagctccgcgcggcggcgggacataggatccccatcggggacctgggcgacggcctgagcttgggcgcccctccagctgggcgtcatctccacacagttcttcccttgcgccgcgaattcagcccctgtgaagacgctttgggcattggcgagcaacaggggaaaaaacgagtcacttaaatgggagaaggaaggggatggtcatgaggacttggaggaaaccacacggaaaagaaatcctcatcactaccaaaagcatttctaagaagtcctaaggttttatgcctggagatttcactttaaaagctggaaaaaaattattccactgcttttaattgaagtaaacaaagtgcaacaaatcctaactcaaatatgattgcagggagattagggtctaattgcttagggttcaggtggaatctgtgggctaaatcctacagggccaatctgaatttcacaatcattctgtcaaaaggagagcgatgagagcccacacgcttcctaacaagtcatttttaacagttacaagcttcgcacaaagaccacacagggcgtctaagagatgcaaatctaatccctggtcattctacaggccttcaacaaagatgtgctaaaccctaatagaaaagaaatcagttctctgtcaccagcccctggtaaaatctattagagaatggacagagccgcatctacagcagttgctgcaaaggttaaggacaagtacaaataagagggacccagttttgttttccgtgtgaaatatcgggagaagctaacccccaaagagtgacgggattcaatccgtggcttcgcattcatttgaatgctagaaaaaataaacacacattaagacttttgaaggctccatttctgaattcaagagagatgaaacaaattcgcccaaaagatagaaatctttgcctcggaaattatcggagaatattaacggagagggaggggagcgcgcgggtcgccgaggaaggacgcgggtacggccccttgctttggggtggcagagccgggctcaggagccagccaagctgacttcgcgaggtggcgcctgggcctttcgggggaaagccccgacggcggagccgcggctgggcggggactcaaatgctggcggcctctgggctggggccgagcagggggtgccgaccgcgggaagtctgggcggccgccctcccacccagacgagccgatgctgggccgcggtccctctcagctacctcgcttgcccgcctcggggcccctggagaggggtctgtgcctcccaggcagggaagcgtcttgatgtgcaccccggcgttcaccaaccaaataagggcctcgctcacacagtcgatgtcatgctgggtattaaaagggttgtgctgcagctaaaatatctcacagtgtgtgtgaacctcataaaagggaggacccggattccaagcccctcgaagtccccaagcagcctggagggtgggggactcccctctccttctctccacactgagcccccgggcaagcccaggcctcctcctgcgccggggtccccgggctccgaaactgcgagagccctgcggagcccggccagaggggcagagggtgggggctgggggcggggacctggggggtgcagcccagccagaacccgcggcctagcctgatcgcggggagccgggatccgccttccatcctgggaaacgactcgggttagggaagcgggatgggctccgctcggagttcccaggcagctggggcgccctccaagtgacgcctttgtccaggctgcgctcgcggagaataaagggggcgctgtccaacctcaggttcggggaaaaccaaggaaccaagggactctttttctaaaatgccctctccaaactacagggaggaggaatgggacacgtgtgcagaaaaagagttttgcctgtctccacagaagtttctagaagctatttcccctccccttggccttgccctctgcccccaggttcccttgaatatgttcctccacggggtacagaacccggagcgatccaggatggaggagcaggctggagttcggctggcgaactcccagtcctgacccctgggctccacagtctttcaatttgctctggcaggacagtcccccttcttaaagcccggaagaagggaaggcaagctttgctagtttttgcccctcagctcagagacagactgccatacacacatctgcttcccccttatccctctctatgcccctccaggggaggcatatgccttgggtcccggctgtactccctcctccccatctactgacattaattgattttctccaggctgcggcttctctttgcttctatcgtttttctccctagtcctttgataggctgaccttggctcttctctggtcttcttactccccaactggtctcccatatggaccttactggctttcattctttattacttagcctatccactttctctacttttccttttagtactgacattaggataaacaataccgaattgcctataaagtaggattgcagccatgactggagttggacaagaaagcaaagaaaacatcggcattggaataaagaaatggaaaatggggaaggatgaagaaacagaagaaaagtagataataaagtcacaccaggttgtaaatacaagaataagatgcttgatgttcctgcacatgatcttggggtcctaatgagggtctcacatacctacactggggaggcaggaggggtctccctgaggagggcagggtgaagtttcttctccctgactgggattgcacctgaagacttgggctagcgagccgctgtatatcctggatccgggaaggtgtgaagggatcaaccaccacttctagaaatagtcatgtgggcaatatatctctatggggttttcagatggctgcaacttcctaccctggatctctgctgctcttgggcaccacattcctgtccacccagccaagcctggtctgaggctgtgtccttagtcaggggagcctgtttccctttcccctggcagactaggtcctgtgggtcccagcgtcctcttcacctcctgccagttgtaggagttctgtcctcccattttgcggaaccagggagcctgtgggaggccttacctccactgccagccccacctcaccccagggcagattagtgcctctgagccactcaattatccgcaggatgggtggggggggggcggggaggggaatctagaatttatagctgggggtggaaggcgcagtgagggaggtacagggaggaagagtgaaatatttagatctttggggttcctgccatttggcccctattaaagagaaccctggggcttttagaatgagttttgcatgaaattgaacaagcagggccatgagctgtacagaatcccacctccaccccccaacatacacacaccttatttattggttcttctgagatcttcccagacgcaaaaactctttacaaggatatcaaaaaatacaacacctgcctacgaggcaccactttgaggaagctaataaattacccccctttgaaacaaaaatggaatcagcattaagcacatactattattaggttgagtttcagtctcctagaaaattcgttagatgttgatatctggggagagaaggaatctctcttttccttaagaaaattcacgagggaaacagcagtagttcgctggctttgtttggtttcgtttatttgtacaaagaaagattgtgcgttaagatcttttttaaaaatccctgcaagttagagtttgcatcatcgtcgtgacctagtgaactaatatttgtatattctgggatcgaaattccgaggaagtttctgctcttccgcacaccagacttgccggtgtggtctccaggaggggttgggggccgcgtcctcagggggcgcgcggccgaggctgttcccagcgcgggaacgggagggagaacctgggcaggggcggggcggggcggggcgcggggacctgggtacgcggagacgcggggcgggcgggggccgagagcgaggctgccggctgggtgttgggagagaggccgcgggtggacggggtaaggactgggactggggagactgagagctggggggtgcggggaggatgaggctgcggacaggaaacgaagggcctgggacagctgcttctcttggtcctagaaaccaaactttcgtagcgagagaccctaagacagctcgagatttcaagtgtccacacttctagtttagacatttggcaaccaattcggaacagccgggccgcgaggggcccccaggtctttggcggcgtcgttgggaggccgcggagttgtccctgggcttccctgaaggccccgcagactccccgccagtcccggccacacccagccagggctttgcagctccagcctgagaatgttagccccggcaaccccttctggcggttgttcctttaaaaaccaattcattttttccatcaagtcttctacccaatgggtagactcttcgttaaatgactgttaaccagtactgaggagaagcacaatcaacatagtttctctgtcacctttcttgccggttttttcctcccaaccatggagtctccattttctaagcaattaaattatatattcaacaggaacattccatttaaaatggttcgggacagaagactgatgcacaaggtctgaagctggaagaaaatatttagtgcttgcctacagattctgtcacccatcatctgctcggaatgcgctccgtatctttcagcgtgtccggctcttatgattgcaaatggccctgttttcaaatggaaataagacttgcaaactgattatgtgtattgaatcagaatcactcgctagatcctcttgtttaaaatgtattgaaaaaaggatgatgggtgcagacctctgtaaccagctctgtctcttctctgggaggtcgatctattttgcaactttttgccatttgagcgtgtttcagccagataattacgttgccattgtgttaccggcccaaagctcagacagggtacacacaccaccacccagccgtctcccaggccctccccactaggatcaccccctaaacaccacaggcacatgacacagtcatccaccaccatccccacctccccatcactgtgacccagctatatataaccagcacttctcagctgccacaaccgccctcagaagcccacacactttcaccaggaatagttgtttctgttttctcccagtatcctttccggccccctttctctcttctgtctttccaatgagcagaaccacatacacaacccccaaatagctttcacaggcacaccaccaatgcaatctaagtatttagccatgttgagaattttcaacaactaactgtgttgatgtggcattgtaattgttagaaaatggttaatacaggaaggttactgtgaacatgtttgtatgctaccacatacctcaaagggtttctctttctctttacccctacccagtgctaaatgatggccatgagtgggttggctttttgttaaatatttccaaaaactttttctgtttgatttcagtacgaagccaatggactatgtagatgtgtagagagatgtctgagttttatctattgcgtgagttgtaggtatgatacaatgcagcacttccaaagtttactgcacccaggtcgaggctcaggagtcctgtcagggaacagtgctgccagggagtagtaatcgacatttcagttaatactgccaggtcacagggcagtaacgaactagctacaatttctgtctgctgtggcttgaggtaggaatgtgtgctgtgtgcaccacggtggtttgacagttgcaattctttctgaagtagaatcagaagggaaggaagaagctgccactgcccagccccccaggcccttagtcccaccccaggccttgcagaccttgaggcaccatcaagtggccaggcagagagagagatttaatcctctgcggcttgagtctcctctagaagtctgtcgctgcaagtctgtttagagacctaatgctctggaagcgtctgttgggaccataactttgcgaggttcgctttacacataggcatatccagttccttagacattgactgggtctcctgggttgcggcagagcgtgcagtcagctcagaggaactagctctcggtcctcttagtgtcattatggtaattcacaggtttacttctgcgcgcgcgcactcagccccgtgtgtgctgctgagatcaggtaaatcagtagcacgcgggccaaataaagccttgttttcctagagctttggacttttagagcagcagcattaggagggagaatgctaggcaaggcagacgctaacctgttgtgggtcattttccatagactggatccagagcacagggacaggggaaggatatccaaagatacttggtggcctgatagctctgattttatataaatgaatgatcaacaatcaccaatactctagaaatagaatgtttgacactccaccaacagtctgctgttactagcagcaagatctaacaatcaaagaccggattccccagaaatgtgtgaaatagaggggaaaagggagaagaaaaaaaatttgtctttttccttgttgtcagacaacactcagacctgcattcttatttccactactatgtgaaggcttaaagtgtgaaatcaagaggacgtttgcaacaaatgcggagcagaaacagttttcatttgttcgttgctgttgttgccccagggcggtagtatttataccagtgatttttatagatggataatagaagttcggcaagggacaatttttttgttgttgttatagaatgtctcaaaaagtcttatccacagctgtgtctcagacaccaagttcaaattatttaggaataaattttaaaatttcctaaaacataattagttatccagagtttcacatgacaataaataaatattctgacttaaagtgggtaaaactaaagggttttggtctatttgaatttttcaaggaaactttttcatgagacaccttaattgaggtagtgaatttattcaatgttcttgcatctaacaggttctgtaaaatctctgagaattctatattacagtttttgaatatcttataaaatagatatatgtgtgtaagatagatacatatgtatatatacatgtgtataagagatacatatgtatatatacatgtgtataagagagatacatatgtatatatacatgtgtataagagagatacatatgtatatatacatgtgtataagagagatacatatgtatatatacatgtgtataagagagatacatatgtatatatacatgtgtataagagagatacatatgtatatatacatgtgtataagagagacacatatgtatatatacctctatacacacatacatatatacatagaaatctgtgtgcaatcacttacaaagtaggcagaatcagatgtggattttaggtgggaggcaagagttttctttaacaagtcctttgcctgccacatttatgttatgttttatttatatttcaggcagagcactaacagtgatcaatttatgttgaagggtcctgcaaataacaaaaatagataaaacaggaaaatgaatttaaatctcaccctttccaaaactttgctacaactcataataacaagggtaataaatgcttacgaagcagaggtcaaacgggaaacattagcaaacgaggagaggcgcaggagcccaggatcatgcctcgatgcccaccaagttgggcattaggtcactatcagagagaaatgcagccagccacttcagctatggcttcagctgaggcaaaagctgtgctgccaagttgctgaacctgctctttctccgttcctttgagattcattaaagaaagttcagaaacacaactacatgaggtgaggataagggcatatgcagacccccttcaataaaacttactttcatctactcccatccatatccaaatccctcagcttgggtggacaaactttccagagagggtgactgaaaataagatactccttctagaaacaactggccgaaggggcaccagaaaactttctatgctccaagttgaggtaagctaccaaattgggccccacagagggtggcctgaagtctcagaaacacagctgcacaaggaggaacgcgtcagccagaaggcagggagagccagaggaacatggtgtccagcgtctcctaaccaggatctagccgagcagagaaaacattcagcctcctccctcccaatacccgtgtctgtcactttctttccattcaaaaagaaagtcctagttgaactaaacaagccagtaacccatgcctaagaatcatatcatctcagattctcatctcccaatgggctttctagttctccacaaataaaatcgtctactctgcttcctcgcgctaataattggggggtggggagcagggaagggagagcgatgtctggagacatatgatcagaattcaaggcagcttctcacaactctcttgtttatagaaaatgaatgtctgcctggcttgcttttagttcagaaaaggggtcagtctttatcagcacggttcacacagatcctggattttttttcccttatcttaaattgacccgcttttaagataaagacataatagagaaagcattgaccttacctggtccctaatgagttggaagtcagaaaacccggctctcatttcctcttatctggatcgcctgagaagagactcgcgctaccttttgtgcactcgcgcctcgagatagcccctcactgacgcctggacgcggtgagcgcgctgaaggctgtgcggcctctaaagtctcagaattcctccctgcggcctcaaaattggagagttggattccagaccaagacactgtcactagagctccctagccctggcccaggaagatttaaaatcccttaaaatcccttagacttgctcccgagcaagtctttccctatgaaaggccaaactctaagcttcgtgaagaagcctcctacaaggacactggtctggagcgcccgggcctccgcgtctccaggagtgcgcgcccagagcgtttctagcggagactgcccaggcctggctcggatttcagtcgcggggccccaggctacttcccaccgggccagcagcagggccgagccgctgccctgttggctgaggcattccctgcccccacccccctcctggccttgaggaccgcagtgtgtacccttgttggtagcggcagcagcccgggatccctgtctcccctgctcagagcatctctgtctcgctcttctccccgcttctgagcttggcccagtccctgaccccctcgctagctgagagagctgctttccttcctctcctgcccacagctcccagttcccaggctggggccagggtggggagcagctttgggatgctaaacatcaaaaaagcccagcctggggtttcagggcccgaagccactagagcggctctccaaggctctcgagaaagtcctagtgtttacatggcgaagtgggggtggggagaggaggaaggggggtgcagtgtgcaaaatctcccccactcctctcagccgttggggcctagggatgggtagggtactttggcggaggcaaagcttcgcggtgatctcggggtgaaccgtacttgctcccaaacctcggaagcttccaagcacctcagcgccaggggcatcctcagaatgctgatttctccgagaggggaggccagaaattgggcacgagttgatgcaggagattcccagaaaggaggactgtcggctttccagaagccgacggtgctgtaggggcggagggtgtccccaggttgcggaaccctcttgcactgctcccagcgcgcacctatttccctaatgaaacgcttcagattgcgttctaggtctcttcccgcagctgcgacaattcccccagccgggagcgggagcggatggagccagcgtaattgatggcaagaaagaggctgaggtcctgtttgtctcggtccgcaaacccgattgagttcacctttccccgggacaagtaaacagacttcaaactatgccgactgtagacggcgaggagaagaatgtatttgatggaaactccatccaatgcaaagatgataaggccgagggtgccacagcctactaaaattgtgactcccaaaggcttcctcccagctagaatggggtgcggggcagccgccagaaccacagccgggcaccgccagccaggtccccgcccgggcttgggctaggctggggcaggttaagcgaagctccaattccgtgggatccggacctagagccaaacagcagctgcagtatccatgtcccctgcccggccggcctgagctgggtgccttagccacctacactcccggtcccggaaccacagctgaccattccaacgcaagtggtcaaatttgtttgttttccaaaacgtgagacctgttaaaatctcccttccccgccttccaacaagcactctcactagacccaaccatcctcttgggaatcttcgagtccctctggctgttggaaactgtgtctcagcagtgaggcccaggtttctgagggagaaagcccggcctagcccacagtcttaaggcaccacgccagaggaggctccaggaagttaacaaagaggactgctgggcccggagcgaggactccggccagtctgctttcctcacaagctcttggtgggggagcgggagagagggattgggaagagatgcagacgaataacgaaatgagagaggggaagagaggaagaaaaagaaagttgaaaacctgggcgagaagtgagtacatgccaaataagaatcaattgcccataatccaatacttccaggcctagaggaaagtgctgggaggggcgtctgcccgcagctggctcagctgcctttcgaccggagatttggcaagggtgacccggaagggctacagcccatccaggggactacaatttttctgtgttcaaaaccattccttctcccctctctctcatccctaatgggtctcccaacacaaacactgagcgctgaggaaaccaggaaattagaggttggaagaaaggaatcaaaaatgatttattatttatttattttttttgcttggcgtgggaggtagtggctgggaggtgaagaactgtaaacaggagaaagattcattactacaaaaatttaggatcccagagataaaacccagtacaacaaagagtgaaatctcagctcccaaagtccttcctgggatgtcctcaggcctgtcacccagtgttaccccgttggaggccaaaggagccaaaagcagcaggggctgaaggcgtctgctgctggtcccctagaggggtccctgttttaggacagaaacaaaacccctgaatgacttccttactttcgaaaacagcctcccatcgaattctgtgaaggagctcagccactgattagaaataaaggtttgatgttcaaatctacagaggtgatccattcactgaaaaccataactcactcagactgatttaaaatgggtgtcctctctcactgttttaaaactttggctcagctttgtgagaccacagtagacagttctgagactcctatcaacagaagtctgactcagaaaatgaattatttggtctctttctcttcctctctccctctccctcttggtggaagtagtttggtatttcggtcctccactgcagtctcaggactgctcaagatttgtttccacacaatttctgaggcagaacaaaactccctcttcctgtggggcaaggactctgggcctggcctccttacctccttaaccggttcagaatcctttgagctcaaacccaaacaatttgaatctcatcagaccaaagacaagatcctcccaagcccccgcccctcaaagccatttaaagccaaatcaaaacaaaacaaaaaggagggttttaatcagaaaaagaatctttttaatttgtataatttattagaagcttcttaggaactatatttaagccaaatatctacataagttacaacagaaaaagactgacgccgcaaataccaaactgccaaataatatacacagatttgtcaatgcccataaaaaatgtgaagggctggggactgggagtggtttttctttttacaacaaaatgtacagattactaaaaactaggcatttagtccaacttttgacagcgttttacagctacaagttcacattaaacaaactattttcgcggagggcggtcgccgctgagcctaggcggccagagggtgccggggagggggcacttcctttgtgtcagtgacaagtgggttatgttgaagactctttcctctccccagctcccgtcctcccttcaaaaaaaaaaaaaaatcctggtatttacaagcgagtcctctttgctggcagagtgtgcccagagtgaagtttggtctttagagtccagagccatgtcagcacagagccctctccaatctgtgccccgccctagcgtggaaaacccatttgaatcaccaaaaaaagacaccccaaagctgttttatgcccttctctgcttaaagattccttgagattggatgcgcttggttgtttttcattttctttttttaaaaaaaaaaacccacaaattttagggggggaaaaaaagaaagacgtccagcagtttggcctttgtggtttttttgttccttggtctaaacgcggccaggttgttaagaaaagtcgaagcgcgtggagcagcggtggatggtggtctgtgtggcgggcaggagggaagcggtgaggcagagcgctgggctagggccggcccggcgtcctctcaccaggtccgaccgtatagcaaggtggagcaggacatggtgccgtagtccgagcccgaggagttcaggtgggacaggctggatacctggccctgcagcgccgcggggctggcggcgtggtgcgccaggtccggagactggcctgcgctgcctggctggtggcccgggtgtgcgccaaggccggcgccaccgctgcccacggagatggccgctgccgccgcctgcgcggcctgcgcctggtgctgcgcctgctgctgcgcgtggccttgtaggctggcggcgcccggcgcgggggcacccgcctggcacggtttgccgtctttcaccaggaccggcaccgccacgcgtcgcggcgactgctgctgagcctgttgctgctgcgggcacccggtgcccccgccgcccccgccgccgccgctgtcctgctgcagttgctgctgcgccgccttgtccttggcctggcgcttcattttgtagcggtggttctggaaccagatcttgacctgcgtgggcgtcaggtggatcatgctggccaggtgctcgcgctccggcgccgacaggtacttctgttgcttgaagcgtcgctccagctcgtacacctgcgcctgcgagaagagcacccggcgcttcctgcgcggcgcgcttggcagcggggccatgttcttgctcacgtcccccagcgagcccaggccgcccatgccgctcatgttcatgccgctcgccgggcccatgaagcgggagactgtaagcgacaaacgcacagcgtcggccggggccaggccgagccaggccacccctgttttccgcgccattggcccgcccggcccgccccaaccgacggcgccctcctgacccaggcagcctagcgctggggcccaagaggcccatccgcggggaactgccagcgcctgccccaggccgtaccgtcgagggggctgtactggagcgctcacagccccaaccctggctgccctccctcagtctcagttccctctttcgaaccaaaagacgcagtgggggaaaggccgcttctgctcctttcgtgcccagcccgggtcagagcattaggattagctggccacaggcggcgaactgggctcaggccgggagctggggtcctacggtagaccccagtttggagaggttaggagagggggtgttgacttccaaaagctggagcccccagacgctttgcctcttggcttctctcctgtcaggccccagtgagggcacctgctcggacccttagagtcccctctggaactgcgagtcctcccacctgcccagactccgctggagagagggccgggccgggcgctcgagtgcctcccaacagggcagcctccctcctggcccggtctagcctctccgcgctctgctcgcccctgctccttgagctcggggtcgcttcccttggctccccgaggtcttctgcgccgagcagagctgccagtccaccgcgcctaggagacgccgagtacccgcatctgaccgcaggaccccagcgctaccaagtgcctgttcttggacccccagccgagcagggggaagcatccccagctcccgcacccaagtccctggcgccgctgccgggccgccctccctgatgcccagcgcgcagcctgccggcgccgcgccttctggacggctctcgccgcacctcctgagctcagcccgcggccccgcagtggggcggcctcacttactggcggggaagcgcgggtctgggttggcgccgtaccatccggggccagaggcgctgttcctcatggtgtcctggtacggcggcagctcgctcatgttgcccaggttgccgttgcagtagccccccacggcggagtgcgagagctggggcacccccgccgccgtcatgtggtaggcggcggtgacggcgccgtggtgccccacggcgtgctgctgcatggccgctgttggcggtgccgcctggccctgcctgtacgccgccagcggagccccgaggccgccgccctccatgcccactttcttgtagctttcctccaggggactcaagatgtcagacactgagaacggagtcgtgtgctttggactcatcgacatgattcggcggcggctggaggaggaaggaagaggaggaaaaaaaagggagagggggaaggcgaagcctcgctgctttttttttctccctttgccaaatattctggtgttaccttaacgccgatcttgttggatgtacacgtaacggagtggaccgagtcctccttaattggcttgagtggaggctcgggggctgcctcgcgtttgttttagcccggcgccaggttttaggcagccaccagaggcggggcgtaagcgctaaagcaacaagacaatagaagcctacatcttgcccgagataattagcttacatgctgatgacaaggtaaacacctttaagtttcacttgtcaggatttttaggtctcaaagagagagagagagaggcagagacgagacccaaagcatttcccccctcccttggacacccccacccccattttttgtggggtaccagcggagcgcggggaggaggtggaggggaggggaaggaggagggaaccgagagcggggagggcaggaggtggggtgggggagtaacagaggaggagagatggttgagaggaaggaaggtgaatgctgctttgcaaccaacttgcggagttacaaagtggaaccactttccaattcggtcggggttccccgggcacggacaggtctttaggaggagggggctgagggacagggtgggggtttcacctgagcctgccggggctgctcctccctcccgccgcggcctcccagccccgcgccttcccactgcctccggaccacatcgggcttcgctgcgctgagccccagtcgccaacaaatgagcgagcgagtctggggacgaaccctggggccgcactgttggtctacgtgtctgtcagtctgtctgcctctcttctgccgccgtcagagggacacctctgctccccgccccctttccccctaccggagagaatccgagcgggcggagggggcgctgagtaggggatcgactgcctcccggaggctgtcccggatccccgagccacaacccgcccccgcagctcaggggtttttcagtgggccacccccgctaacacgcctcccccaaggtcttccccccccccccccacccccggccgagcaaacacagcactggcccccagagctgggaggatgggaaggggtctcacgggagggtccgtcactgaagttgccccacctcgaacaaacctggtgtccctgaccctcgcccatctcccagacacgcggggatctggggctggagctgactttccgaggacatcacagccccagcacccgagcccagagccacgctgttttcccctctgatgcttcagggagcgcgcgagcagggagcggcgtgagtgcccgtctgtctgttgccgggcggaactgagcctgaaccccggcggctggagcgctggccaggagggggcgaatgccgaggtgcgggcagctcagcgggcgggaggctgggccgaggctcgcctccgcccgcagctcagccatgcaaaagtgctcttgcttcccgggaataaccaaatatctttgtttaaagtggtggcgtaaatggccagtcgctttgtggccacgctggatattagtagatgaggatcattctgcttcaattgggcgcctctcatccgacgagcaagaaactgcttaggaggaagagggtttcctgtctgcgcgttcccaggcttcaagtgtgggccccgcgccttgagggtccttgggcgcctggcgagggggagctgtgggctgcgctccccagcggaatcgggggtgtcccccgcgttgctccggccaggccggggcctgcagccgagtcgactaccgagtggagcactgaacggcgcggattttgagaccgactccggtttttgtccttggattttaaacgtttttatcattgtttttgttttgctttctccttagctgttttagtctcctctgcgcgccaggggctgggagggcggagcgctccccggccggccccggcaggtgcctccaagacacccgcgctggtcaaggagcttcttgaatttagtttttgttttcacattttctttcccctccttgtagagaaggagctcctgatcatgacgaacaggcagttttgagctacttaattcatccgggctccctttttttattaatagcaattacagtagagaaagttttatttatttttaaagatttcagccctctccttgaagagagctcttactccctcaatacaaagccaacttctataataacattcgcttttctcaccgcctaccttctttaccagggtaaagaaagctcaggacaccctccgccctcccacctgcgcccgcgtttttgtgcggtccccacggcagagctggggaggccaccctacgtttgcgcagggagacgcgctcgccgctggtgttgcgaaagaccagagcgaagcccggctccttgcccttccttcccaggggcttctctggggggcgctctcaggccccgacgaactgagcattgatcactgtggtggctaagcaaggaggggaggcgacgccgggcttaagcgaaccacagaggagaactggcaacgctgaatacagaccttgtctgcaggcgcgacctggccgggcctgagtcccgaatggggtctaattgcgaaggcggggtgggtttcccagtcacccagcttctttctctcactcgccattatttcatagttgtttgtaagtttaaggaacaccaagtgtagaatgttgtacatctcttccagtctcaacgccatttagaaatggagatcaatcttcacaaggtttttgtgagattcaagtaagatgaagcacatcaaaatgctttgaaagctttgaatgtttttcagctcagtgccagcactggagattgcggtagttattatcatgactatccccaccccctcttaggtcccaagacctgagtaaaaggaagagttgggtgaatcttccacagcccctaggtcctgtcttctcggccttcgtcccttggcagcttttcaacctctcagcaggccacaggcgcacgtggctggcagctccccggcctccggctctgacagtccgggggcaaccaggcctgcagttctcgaggaaacccccagccccccacgtctcgttctggaccaggaaccccctccccaacaaccgcgcagcaagtggcgactctgggagctgaactggagtggagctcgaagtggctggggcgggcaaagactcccgcttcactctgggacacaactgggacggcgcttcaacctctgcctgcaggcgtgcttctcgcgcgcaccagcaagctctctatccacctcgcctgggcctttgcagcgccctgccgcccaggctccagcgcctctactaccctagccccttctcaacacgcggctctgccttcttccccagtaccactgcactgccgaaaataagcccggagactaacgcaccttgtagggaagagaaggacatctgtatctccaagcttatccaagcaaaggcctccagagtccctcccatggcccgaaacacctccctctgaccgaagagcgtcctttctttccgccgcctcctggactcatcctaaatagggcagacccgggctaaaccagtgatttttttttccatgaatacgaagaaccccgattgcactttgcgaagtctgcgcgtattcctttatcccgcaactagcttgctcccgggtggagtgggcacagtggggagcggtcagggcagggcagggcccaacgctggcccctcgcggagctttccctggcgcgacctcacacggtcgctgcctctattccgaccacgctctgcttcgctggctgcggctccgccaggaatccgagggggcgcaggcccaggctcggccctagatgcgcggaatcgccatcagcctttgcttacaccagcgtggccgcagggaaactcctttctctccctccagtgtcactttgcgagacaagaacagagggctcatacaaaagaaggctaatttggggtctgtagcttggaccaggtggaactgtgaggaggaaccacctgtctcaccgccccaccccccaactgctttttctaactccctttgtggtcctccacacctgtttagggcgctgagccactctgtctcctggtagtgttattttgctccaagttttatcgcaatttttgattcactcgacagtatttattcagctagggctctgtgccagggactacgcaaggcctgaaaattcaaacttaatctagatgcagctcctactcacacggaacttacacattcacaataaatcacccaaataatatgtagttactttctgacagatgttactctaggatccagtgagatagagagggttgtaatggagattcgtgtgtgggtttttgcaccatttcttgatctctcagcattccaaggtcgtgagaggagtccttgagtggaagtccgtcctaggtttgaaccctggctttgcctttttccagctgtgcagtaccgctcttgtgggctcccgccacaccctggagtcactcccatcacagccagagtaaaccagtgtgtgttttctggcttccctccttgagggtgagcccctgttttatctatctttgaaccccccagtgcctcgagaaacgctgaggaaacacagcctccgagcacctgtttcctgagctgtaaaaaatggtcacaacctgccctgtgtactggcttggtttgtgctagggatccaaacaattcaggatgagatcatgtgcctgagtttgtagatcacaaaagtcgctaatagaaggagttattccttctgattctgtattttggatttagagaaactgtgactctaggcctctgaccttcaacaagaaacacttgggcccctcagttgctcccgcagtctcccacagctaggcacaggcttctaagccgggctgagctgggctcgcgagtgccatcgaggcaaccaggcgcagggagcggaaggcaggagtgtaactgggcgctggggggcgctgctccgcaaccccaagatccgaggaatgcctccgggggatgatttctctggaggggtctcgcagggccccctctgcgctgctttctcaggcaccagaaccgaaatcctcgggagggaccgcgggagcccggggcgtgcagacaggcggctttcacagacgcagcgggaggaaggatccctctactgctccctttcccgatttgaccgtctagggcctttgagaggactttccttttgggaaagcttttctcaattcgtggcctgtgggcaggctggggggtggggcgccaagtcatccgagcgcggcttctgcttctccctttccctcacaggcatgctctacggagggtatgggaggcgagggcgcgtctatgagggccagagtccgcgaagagagtccggcccttaggcctttggtgttgaagaatctgctcctctgtcgggtcaagccccactagaagttaacacctgtggtctccaaacttgcctattttcctgtcacgcagttcaagccaagattcaactcgtcttgaatttttgtatttagagcccctaccttctccaccgactccaggggcgccctctggcgggaaggggcctggggtaggagggaacctgagggagcgggttacaaagcagagaacagcgggagctcagcagctccctttgaattgcgaggaaaccaagacggagacgggaggtaggagcacgggcctgaagcggtcagccgaccctgtgaggcccgcgctgccgtgctacgccgcgaatccgccagacgcccccgtcggaaggggcagggacaccctcgggggcgctctagggttcgtgctgcgctaaggtaagtttcgcagctgctcctgataattaaaggacagattcccgaagcatccttgtggcggcgcggctgttttcgccccaggacctgtgcagcctcattcagctttaggtagtcgaaacctatagctctttctgccctctgttccccaacaaatctcagtcccaacagtgggagcccgtgggccttgggtgttcgagtttcccgcgggcttgccagcagcgctggggttccctcctccgctcctttcctcctctccaacctcccaccacagcccgtctcccccacatccccaacacttgtcccaggcagtttccggtggccgcagtatcgaccccaggccattggggtgggtgtgagggaagggtggagggggaatctccgaggcccaatgttttctgggacttgagggaggctgaattctccctcgctgcctaggacttggggtctgaaggttgcagaccgaggcgatccgcagcgccctcttccggcggccgtctggagaactgcagctttagagcggtctcggggaagctttgctactagtttccggctagggaaaactggtggtggtcggagactggtagtacatcatccacgcattcgctcattctaactgtccgcccgaccatacgtcaggctgtctatcggtccacccaaagccaatataagttatgattgactctttgaatcacccagtctccttgcacctgctatttgaaagagcccaggtgtagatcagggcttggaagctgctcttgtacctaaaaccctcttttaattatgctttgcttcggaattttgttatgcgaatgtcctgtccaagtcagagggcatttggaggcatatttggtgaccaatggagtagcttgcactttctgcatgtcctttctggaggaggcagtggccctattagcttgacagcctgacacaagggggttctgccttgtgttgcagcagtaggagcataacctttagaaaatattggagtaggaaaacttctgggactagctacactcgatgggtgccttccagctctccaatctacggtaccaactcactcaggcaggctttcccccaaattattcccccttctttggactctggtcaaaaccagatcctctccaccctcccaaacccatcccagccaatatgcccatgttactctgctattctttttcacttagccagaaaaatcattctttccagccccacaactaagtcatatccttctctttaaaaatccaattgcctcttctgacaactaaatgcctgacacatagtgggagctcaatatatgtgtgcagaataaatggatgaatctctattacacttttctgttacattgataagcaatttcttaattgagtgatttcctaattgccatgtgtttgtgttctttttaggcagaccgtaagctccttattttctgttttttgttgttttgttttttccccccaagacagggtctctctctgttgcccaggccagagtatagcggtgtaatcatagctcactgccacctcaaactcctaggctcaagcaatcctccctgctcggtctcccaaagtgctggaattacgggcatgagccatcgtgcccgtccagctccttgattttaacagccatctcaaaaacacttagacatgttcctagaaatgtgcccagtgctctgaggcatttgataatgttaatcacccctttctaaaattctctcattggctgcagagtcaccactctatcatggttctcttcctccatctctggacatttcttctcagagactagggttgaattcccatcctgcactgtatacccatccccgtggcttcagctgccacctgttgctgatggctcctaaatccatacctctagccaacctctcttcagagcttccaatctatattttcagttgtttacctccttatgtgaatttctgccaaacaacatatccaaatctgaacttacactgtcccaatttgcttcttgtcctgtgttcttgatctaggtgaatggcatgaacatctcccaattcctgccaccccactccttcaccaagctcctgtgctagtcagttctgtctgccataacaaaacaccacagaccgggtggcttacacaatgaaaattggttttcttacagttctggaggctgcaacgtccaatatcaaagcctagcaggatttatttgctggtgagggcactcttaactggcttgcagagagacgccttctccatatgtctttgcatagcaaagagagatctttttctatataagccacagtcctaatagattagagccccacccttatgacttcttttaaccttaataaccttctgctagggtttgcatgtgtgccatccaaaattccagtgttgccaatgcgatagtattaagaggtgcagcctttaagatgtgattaggtcatgagggatcctccttccttaatgagattaaggatcttataaaagaggcttcacgaaacatttggctagcttgcagtcttgctcttctcccatgtgaggacacagtgttcctccctacaaggcccttaccaggtaccagcgtcttgaccttggacttccgagcctccagaactgtgagaaataaatttctgtcgtttttaaactactcagtttcagctactctgttatatcagcacaaatggactaagataccttctaaagatcctatctccagatagagtaacactgggggagggggggttaggacttcaacatctgaattttaggggaacacaattcaatgcctgctcagaagccaaatacctcgatatcaaccttttcctctccctcatccaactggtcataaagtcatttccattccacatcttagatgtttcccaaatccagccccacttcttcctcaccagttctctccattcactgcctcaaccgaggccatccatcatctaatacctaattgtctagttcttattcctaccctaggctctcccagtctagtccacaatcctgtccacaggacatagtccaacctatctctccaaactaatttcttcctgcctccctgcctaccccctcataacctactttttagctactctaaacttctcacttttttcattttgtacaactttattaaagtataactgagagagagagtgagagggagttgttgtgtgtttttttgttttgttttgttttgttttttgagatgcagtcttgctttgtcacccagactggagtacagtgaccagatcataagtccctgcagccttgaactactgggctcaagagatcctccttccccagcctcctgaatggtgggactacaggtgcacacaaccatgcacagtccagtttaaaattttttttttttgtagagacagggtctcactatgttgttcaggctggtttcaaacttctagcctcaagcaatcctcccacctcagcctcctaaagcactgggattacacgtgtgaattactgtgcccagcttgattttctatattgtttttctgtttttcatttcaatgatttctggtctcatttctgtttcttttattctactaacattgtgtttaatttgctcttctttttctagtttcttaacatataagctgaggtcattgatttgaggctacactagcttcctatggctgttgtaacaaattaccacaaactcagaggcttaaagatcaggaatgtattctctcacagttatgggagctagaagtctgaaatcaaggtgtccgcagattgtactctctccagaggctctggggagattctgttccttgcttcttccagcttctggaggcttttggcattcattggcttgtgacacatttctccaatctgtctccatttccacatggccttctttgtatgtgtttctctttgtctcttataaagatgctgtgatgacactgaagttccactcagataatccagggtgatctcatctcaagattctcaattatatctgcaaagactctttttccaaataaggtaacattcaaaggttctagtgattaggatgtggacttatctttccagaagccacaattcagtccacacagagacctttcttcttttctaaacaggcatttactactcagaatttccctctaagcactactttagctgcatcccacacatttttataggttatgttttcagtttcattttcaagtcagtgaaaacatgttcaaattccccttttgatgccttctttgactcttgagttatagagacttatgttctttaatttctaaatggtggttttctagagatcttgctgctattggttgctaatttgattctgttgtgatcaaggtacttggtatgacaggaatcctttcaaatttattgaggcttgtttaatggcccagaaaatgatctgtcttggtggatgtatatgcacatttgaaaggaatgcttgctctgctgttgttgagtggagtgtgtataaatgtcaattcggtcaacttgttccatagtgttattcaagtcttccatgcccttcttgttattctgtctacttattgagagagacatgttgaaatcttcatctataattgtgagtttcactattctccttatagttctatcagcttttgcttcatgtattttgaagatctgttactaggttcataaacacttaggattgttatgtcctcttgaattcaatattttatcattatgaaatgatctcttttttatctctgctaatattccatgttctgaagtctttttctgattatttagaccagtttcatttaatatggttattgatatgttgagtttaaatatactatcttgctgtttgtgttctatttgagacttcaactatgtcttccttttcctctttttatgcctttttttggggtattgagtgttttctacaatttcattatatctccttttttgcatattagcaaaacattttcatgtgttgttttagtggttgctttgagatttaatttagcatcacagtctactttcaaattatactataccacctcatgtataatagaagatccttacaactgcacacttttattattttctcttctggtttttgtgctattgtcttatattttacttctaaatatatccacaataaatgtttattatttttgtcttacacagtcagtaatcttttaaagagatgtaaatagtaaaaaaaattcttttatatttcacacatagttactatttctggtgctcttcactcctttgtgtaggttcatatttccatctagtattattttcttacaaagaatttcttttcaacatttcttatagtactggtgtgatgttgattaattctttcagctttgcctgtctttatttcatcctcattttgcaaagatattttcattaggtatagaattataggttcacaatgtttctgggttttctacccccagcactttgaagatgttgtcccagtgttttctggctgaaattgtttccagggacagcacaaaagtgtggagcactgggagggcttcacctctacctcaacagtcttcacaaactctctctaatctctgatatggaaaattaatttttagtaggttgtgtaagtgaagttttatagccctgcttcccatctgcctaaatggcacacaagattgttttccatcgccatatcctcactgtacatggaaattctggaactcccaccaattgcttccagagcagcggcacatgtcagagttagacattctatcatcccaattttgagccctttccaggatataactgccattattaaatggttattttttcttacctaagactttttaaaatgatccatgaagatgtactcttttgaggatgcaaggagagaattacagcatatgtttttaagaggttaccttgtgcttaattgaagttattcattaaagtcttacaaactatgtcttaggagaacatagaatttcagaccaatagtaagaaatgcattagcctgggccttttgagaccaaagcttggggaacactcttagataaaggaatagtcttggctggacccttccttctggcaagatacattccaggcattttggcattcatattacaagagaaaggtaatatattccctatttttatagatgaggaaaccgaagcccagaaaggttaagtaaattgctgaagatcacatggctagtaagtagtagaactaagttttgattgtcaacatgtcatattccaaaccacaagaggagtcattgcctaaataatcagacctttaaagaattgtctacctatcccccattcaacatcttgaaattttatagttattttgacagcaagatagttcaaatatctactcatctgcttggggagtttctttgtattactcccttgtctagctccgtagatgtcaaactttaatgtggacaaaaattattctatcaaagtataatctcaaattttgttaccatttcatcagttttctagggtacttttggtattattaaattttaccttaaggagtgt

SEQ ID NO: 91 - DNA, 28972 bp, Mus musculus
gacagagaggaccagcagcctcttctccatttgcattctcatctcctttctctttggggcaatagcgcagccacgtgtggaggacagtacagaggtgaccgagggcactcttgcagggctaacagatgacccagataacactgccttccttctcactgatctcagcattgtgcttgggaacccacagaaaaactctcaaaagtaattcttctaggagaaagaaaatagctctaacaagaaaataagggcttacaacaggaatggaaattcaggacatagtgactaagttatgtgatataaaagactcgagtgcttagaaatccttgagaggtaagtgtgggggctggtgagatggctcagtggttaagactggtttctggtcttaccaaggatcccagttcagttcccagagcccatgtccaatggctcacaaccacctgcatcaggaaaacgggttccctctcccagactgtgggagcttgagctcacatgcacacaccaccacacagacatatgcatatgcacacagtaaatatggagtggtatttttgtgtagatataaaaataaaacaaacctttagaaaagaaacacaaaaaggctaactgtggaaaataaaggtgataaatatgtgctgtagagtttatatttagaagtatgatatatgacatcaataatataaaaaaaaatggaagggagaagatggaggtgcgtggttgccaggttctagtacgacacggagaggtatagtacttggaggtagactatgacaaactcaatatcaaagcaaccacaaaaatagcaaagttagaatttgtgtttttgtttatttgtttcttatattattttgtttgtgtttgtgataaggttttactatgtagaccaggctggtcttaagcttacagattggcctgtctctcttcagagtgtggactttaaaggtgtgtgtcctaaactagactaagaatttttgcagaagctaaaagaaattgcaggaaactatcttttaaaaatatcttttttttttaaatagtgacaagacaagagaagctaggtggtgtctcagataaaatagagacagcaagatggcaggtttcaacccaacagtaccagtgctgaggatgtagctccgtggtagagcctttgcctagcacatccaaggccctaggtacacagcacctccccctacaaatgcacactaagcctaatcacataaacaaaactgctctaagcattccaatcacaggtatacaggcgaagactgccaaggagacaaaataaataagtaaaagcaaagttcagctatatgctactcgcaagaacccacaccaattatacagacgtggatggtctaaaaataaaaggaggaagaaatatattccagtctaaaagtaaaaaagaactctatattcatagttacaaagagaaaagacttctgaaagcggtaagccagaagagagaaaagcagcatcattccacagcaatagaacccagaattcaagaggccccggcaattctaaatgtttataagacccatgaaagaactacaaaatagacagagccggctctgttagaaccacaagaccagaggagaagctcacaattacagctgaggatttctacgtccctctcaataactcatgaaacaagtgggcagaattacagcaagtgtctgaaagtcttgaataacttgggaagcaagctgacccaaatgacagttatagaacactctgtaccacaacagcagtgtaaacgtgctatgcaaatgcatggacacgtctccccaagataggccatattctgggacattgaacaaatcccctgcaaatttgaaaagattctggtcagaccaaaaaaaaaaaaaaaaataagctctctgatcacaataaaatcaaattaatgattaatagtcacagcatctctggaaagtccacagatgtttaaaaattaaggagtctcaaatcacataaattatgtcaaaagacttcagagaaagcagatcccagcactcagtaggctaagaaagtaaaagcacaggtttaatgccagtatagactctacagctagatctggctaaaaaaataatgaagatgaatcccagggatttttagttttgtggcaacagtaagattagaagtctaaggtataaaggtatatttttgtttattgtttgagaaacatatgtatgcagtgtattttgatcaattacccctacacctttccctccaactcatcctatactcaatgatcgcagattaattcattcatgcatcattcactcattcatccatccattcatgtattcatttatttgttcaagtacttcttgaacaacactccccaagttctgaatatcaactttagtgcagaattacagaatggagcatgctagcctcttaaaacacgtttctcaagattaaagttcttcttaatttatttattaaaagtgataggaatggagagatggctcagaggttaagagcactgactgctcttccagaggtcctgagttcaatccccagcaaccacatggtgctcacaaccatctgtaatgggatcatctgtaatgctctcttttgctgtgtctgaagacagctacagtgtactcatatatataaaataaatatttttaaaaaaattatagagagaccccacatattaagatgtatgggatgcagctaaagttgtgctcagatgaaaagttgtaccactcactgatggtacagaagagaaaaaaaccttcaccagctgacatgatcccgtaacccagcacttgggaagagaggccaaggagcacaagtttgaagacaggtgtggctgcttagtgagattctgtcttgaggaagaaggctggggaaaaggctgggggttggggagatcttttagtgagctcacatgcgacctcaagaaagatcctaaccaatcagcagagcctatgtctgctaccttaagagtagttacaaaagggagttttgcaggtaaagaaagcatcttttgttgaggctgtcttcctacgttggtcctcaataccaccaaaagcatctttcgagagagagacacagaaaggcataggtgacattatgtaaaactggccacagattggagaaatgaagtcacaaaccaatgaagagcaaacgtgagaagggaccaccaaggaaacatcccagggcctgtgaagagtgtgcaacctgctgacacgttcacttcagacgctggctcccaggccggggagaagatgaactgtgttcttttaacacttcaagattgttctaacctgttacagcagccttagaaaactagtatcccttcaagtgagttgtcttaccttctgctcagaaatgaacaagaacattttggtatagctataaaagagaaatgtggcacctgagagatggcttaacagtgaagagaactggctgctcttccaagggacccaggttcaattgtcagcaaccacctggcagctcactcctatttgtaacaccagttccaaggtgtttgataccctcttctggtctctgtgaggaacagacacacatgaggtacatagacaagcatacaggcaaaacacacacatacatattaaattttaaatttaaaaagtaatagtactcaagaatcagaagaaaatcttctttaagcataaaaattgatatgcaaaaatattggtaatcattataataaatgaataaaagacaaaatagtttgatttcatttgtggaaaaatcctaaaaagttacacactgtactatacagtgtgtgtatattacaccacggtaattgcctagcgacagggatgagaacatagaagaagaggagatatatattataaagggacataaaaacctctgggcattggttattatgtttattttcttacttgtggacatattttcatagatgtacatgaaggtcaaaacttacttaattttatacctaaaaatataggcatcttaacacgcattcattatagtccgataaagctgaacaaagtgtgggcaggttaggtcatctacggaataggttaaggaaagataagatggagatgggggatttgtctgtgggcctaggtagcactatgattgtggaaaggactgtgctctaagctggagtaagctttatggctaaaacaagagctaaagatgtggcaaccagggatggatggtaatgagtatggtggtgaaagaagagaagcagttatgaagacctggggctggatttaagagacatccaagatgaagattgagctgctatgagctgagctgtgtactactaatgcatgtctgttgaagtcctaagctactgccattgtatttaaaagtaaggtctttagggtgagcattaatccacatgttactatgactgaatacctgacgatagttattataaaaacaacaaaaatgtgttcctcaaagttcaaggggagatataacctatgatcaagctgacagaatctgatggaggcctttccgttgcgccctctggaggagatgaatgcttggtgccaacaccatagagaaacataggggcaagctgccagatgacctatggcatctgtgttgtaagggactaaagcccactaagcaggaagaagccattttagccaaatacactcttgaagacatcatcttttaatcctctaatattgatgatatctggagtttagaagggatactttcaaagtgcagcaagatgaaataaaatcatgagcgcggaaccggaacctaacagaataaagccatggtcttataaaaaggtgtgtctctcagagctgtagcaatggctcacccactaagaacactggctgctctactagaccacctcgttctgtttccagcactctcaataatggtcaacaaccttctgtaactccagttccaggggatctgacaccctcttctgtccttcacaggcagtgcaggcatttggtacagagaccgactgtcatacagactaaacaccaatacacataaaataaagatgaataaacctcagaaatgtatctttcattattgtgcagaaggtgatcatctacaaaccagagagaatcctcaacagaaaagaaatcctgctggaccttcatcttgaaagtgaggaagatggaatagcaggtaagagcacttgctgctgttgctgaggacccaaattaggttcccagcacccacatgacaactcacaattaattgtatctgactccagttccatatatctttcttgaccattgcagggcacaaatgtagtgcacatacatacatacatacatacatacatacatacaagcaaaacactcacgcaaaactacacaaataaataaatactttaaaaaattgtggtgtaagacacccagtctgaccttttgttacagcaacccaagctgattattaggagagtttattggaggagtcagataatgggagcaaagaccgttaggatatactaatggtgttactaaattataagcacaagcaagcatcaatcagcaagacagccttcctaagttcaaactggaatgagtcaagcgtaatagacatacacaatagaagaagcagtttcaggctggagagatggctcagtggttaagagcactgactgctcttccagaggtcctgagttcaatccccagctaccacgtggtggctcacaaccatctgtaatggaatccaatgccatcttctggtgtgtctggagatagctacatacaatgtactcatatacagaaaataaatcttttagaagaagaagaagaagaagaagaagaagaagaagaagaagaagaagaagaagaagaagaagaagaagaagaagaagaagaagaagaagaagaagaagaagaagaaaccgtctggaaagtggaaggtaaatcagaagtttgattggaaatatgaatttcagaacttttcagaaatgattgctgggccatggggataaatatttaagacaggagtccaacaatggatcctgagaagaaatgacaggagacagaagaaggggagcagagtggtgactttgaaaggataaagtctctactgagtttcaaggtaagcccttagttgtaagccctgtacctgttgaaagcattgtatatagttacatactttcaatatacaatggcacaaagtaaacatttccttccagaagggaaaaatgcaggcataggaagagaagaccaaagcagaacaagactaaagaccagcaaggcaagcaacccatgctggatgtccagcatctagggggtgtactacaagcattgtttaagttccaataggctgggcagccccacccatattccctacgatttatagcacagatgctatagaggcttgggggcagctcttcttgttacctctagcttccttgatagatgtccatggcctctgcaatatagtctccattgcaacttcgacatcaccctcaactccacacctgagctccaggcagtcctctctgcatgctacctactctctagattcatccactttgttgtttcctgagcctagccagcctctgtagaccagaacccttgcattcaccatgcttgcacacccagcactgtatggatggtgttatggtctgctaccagattgagaagtaaccaagccccctttcccacggttgcaatggcctctgagtacctccacatgtggatgtggctcaccttagggaaaccctttcccagaaagctcttgtccagaacagcattccagaactctcttttgaaataaaagtttctctggtgacttcatatttttataccctggcgatttccgttgataggtctgacccccccaaaaaaagacctttcctattgtcccaatatgaaatatgtggcttctctttcattttttttgatcactcctgccatattctctactctgtccacctaaaatgtgcccttttcttaagcctgctcattttcacatatttctgagttatttattgcccctggttctcaatgttagcctgactaaaaagcaagcagaaaataactgtgctctggcctgaaggatatactgtcttagcccaatcgaagaatacacggtcaattagcccataggattagcctatggatgtgtctgtaggtggtgccacccctgggcaggtggtcttggttcttacttaggtgatgataattctagaaagcttctagcttcaagagttttggcagctattctattagagcgcccaatgtcaggccactcagcaagtacctctcgtttcttcaggctttggaaatgcagaaagtaaaagccacttcaccaccaaatgcatgtccacttgccctcagacttgaaaagcaaattcctgtaacacaattatacattaaagcctaattagatggagaatttaggtattgctgtggcttctccagtcctgatttacagaaggtaaagtgcctggttaattctaagtcaatcaggaactatattgcaaaagctttgagtacacctatgaaaagcctgacacgttgaactagtgtgtaatatgataagcagttgagaggatgggtggaaggttaaccactcccagtctctttcaacttaccagtctttctttccatgacccaattacttgcaaagcttccccaagaggctgtagagatacatttctattggtgaccagtagagggcgccgcggatcgcctcggtctgcatctggcaggcttccacacctagaaagcgaagaggaatccagactgtagggcaaaaatcaccaaagcgggcctgggacagtacggtggccgtcggaaacttttcgcgagggcaagtgttggatagaagggaagaggaaagaaaagagaaaggttgcagaggagaagaactggagaagggaactccgctgtagcgacttcacagaaaataaagcatactacaggcaacaaaatttgaaaaggctgaaagggggatcagtcagctaaagctgaatgagagatactggaaatgtagctcatttgcaaagcgctcacctggcatgcgcgaggtcccgagttccaaccgcagcacccaataacaataacaagcaatttataatataaaaagctaaatgaatgtgcccaggtcttgggacaaagcaaccgcgccttcctgaggacctttgttagcgttcagcacctctaaaacactctttagaatagtgctgactggctgatgttcacagtccccatctctcactccccatctctcacacctctcactctgagtgtgcccagcgctgtctgcgccctgctccaagttctcatctctgtctgtcacatctctgtccccctcatttcaaagtatgatttagtgcttgcttcccatttctttatcatccactctttagattcattcctgcctcaaaccccatccctatagggggcgtccccggaatttgggagcccataggggttttggttacaacttgggactgagacctgaaggaagagcaagggaagagaggactcctccaccacccaaggcctgggaagggggggggggcggcggggagggggaggactctctgggaggactctctgatggaatctcatttccacaagagcatcctcctgtcagggagatgctgtgatggtcctcccagccctgcactccggccgcacaaaccacgacttaaggagatatctcaaaggttttaagccaagaaaagaattggcagtaggctcttttccttgcaacactccaaagctgtcctgattctcagcctgcctagtgaggaccccagagaggctttcaaagcttgggaaagcatagaggggtcttggaaaacttttcagaaactagccatgtttggaaggcactccttggatctctgggttagagaatagtaaaccctctctccccactttctgttgctcttgtgccaggttgcctccaccccactcttttaaaaaattgtgtgtgtgtgtgtgtgtgtgagagagagagagagagagagagagagagagagagagagagagagagagagagagactgcttgtctaaatgcactaagtgtgtgcttggttcctgcagagacctgaaaaagggcattagattgtttggaaatgggatacagaaggttatgagacataaatcctgtactgggaatagaacccaggttctctgaaagtgttctttaccactgagacatctccccagccccatcaagtcctcccaagtacagcacagcaaagatgctatacctgcagtagctatcggaggattgggtgttgcttcttacagagccttagaggcttgatccccaagttgaagtctgaaatactgaattagaataattcattgtgctaatgtgcttaaagacggtcaaactcctgcacagcatctcatcaccgattatttaagtcactgacacagcaaagtaggaagttgtatgaggcaggcttctaccacatccccacatacagtgtgtatgcacacattcatgcacgtgtccatgtgcatgtatggtgtccatgtgcatgtatgaagggatttgctccaggggatggtgggagctcacataatcagaaagtggtaaagccaggtctcagacaccaagatttctgagctctactccagggcatctccacccccccccccaagtcccccagcactaacctagctaatccaggacacaaaacttcactgggacacgccccctttctcaatgcttgttacaaagtaattatacatcactgcagtgatctagtgctaatatggaagcttcaggtggagaccggccatagataggtcgttaatggctaaatactctgacctagcctaccaaatatcggatacagcatgggttccaagagtagttgctaagtgaatcatgaattgtaagataacattttgaactttgcagcattagaagaagcacatctagtgcccttggcagatgtgaagggtttcatgggagttggaagtaagcaagctgaggtgtaggtggcaagtggtagatctggtttggacatcctctctctagcgttctaccagtgagctttcaaagagacactggaggggaagaaggaagtgtccctctgctacactgctgcaaagactaatggttactctgctcttcttctggtgaagcctgagtctctgcagccctttgattcctaactagtgagattaaagaggacccttggggctgaaccagggaataaccttatgagggctgagctctgtcctgctagccacaaggccagtctactgacagcgcaggaggcaccagccatgaggggtggactaggtttttaagaattaatccacagctacaagaggggaaaaaaatatctctggtttaacccgagtgggtcctgttcaagatgagtcagagaggcagcatgctctctagtcagaaagactaacctggtgagaattctcaagatctttgcatggatgagttcagagataaataggtggctccccacccacccacccaacaccccccccaggcccccaaaggctcttgagaattctggcttactcttgtggatgtcagtgctcatgggaaataatccagaatggtggatgtttatgaaggggcagaagtatgggaagttcatttggttcaagtcacagagtgcaacagagcccctcacccccagttctagatgggagctgttggcattggtgccagcaggagaagtttgaagctcagtccagttcccctccccttcagggtaaagcatgggggttgccaggcatcactcccctcgaactctgactgaagctcagcccctcacctagtgctgtgcggctggggatgggggcccctagttacagtagggctaagatgcagcttgtgtacattctcccaaactggccacctgctggtgtttttgaaggtccgggctgcacggctcagagactgtagaagattgaacaaacctttcactccagactaacaggccccccgaagaagcaatggatttgatattaaccacagacacagaaatatcgaccttgttagtgagcttaattttcttccctcaaagctttgggcgtgttttgatgtgcctgattttgcttaaatctcaccaaaaaaccttctgaagaattacctccttctgtaagtggcactaaaaccgggagagacaaatgacactctacccttggtgttcctatgaccaccaacaattataaaataacggggttaaatggagacggaggaccagggacttcctaagacgatcccgttcccaatgctagcagatctgggtcgcgccttcagactaggtctgcattatgctttgcctgccctttctgccgttcacttgatctagcgtggcttcccctccctgcactctcgacactgtagaccaaagtgctgtagctcatcttgagagcgccccccagagaagtccctgggaaaggagagcgcagagctctgctttccacttgtccttagctacagagacacaacgcacctggccgcttaaagtcggggttccctgcttcaaagccacctcgggggcggttcgaaaatgcgggcccagatgggaggcccgctgatgcccagagccttccttcccttcacgatggaggtaggtggtgaggaaagctaatgttagtttagtcgtcggctttgtgttgagggagtagagagcactcttcaaggagagatcttaaaaagcaaataaaacaactttccatactataattgctattaatggaaaggagcctaccctgctgaattaagtagttcaaaactgcttgttcattatcgggagctccctcactacaaggaggggaaagaaaatgtgaaaacaaaaaccaaaatcaagaagcctccttgactggccgccgaagtgtctaggaggcacctgccgggccaggaagcactccgccctcccagcctctagcgctccaagaaagctcgaacagcagacaagcaaagccaaaacaaaaacaaacaataacgaaaacgcttaaattccaaggagaaaaaaaaaaaaacggaggtggtctccaaatctgtgccatgcagggcttggctgggtaacccacttagctgctgatcctgacctggtaacagcaatgaggctgacgcccccgggcccgctagggagcacagcccacagctcccccttgccaggcgcccaaggaccctcaaggcgcggggctcacacttgaagcctgggaacgctcagacaggaaacccacttcctcctaagcagtttcttcctagccggatgagaggcgcccaattgaagcagaatgatcctcatctactaatatccagcgtggccacaaagcgaccggccatttacgccgccactttagacaaagatatttggttattcccggggaagcaagtgcacttttgcatggctgagctccgggaggaggcgagcctcagcccagcctcccgcccgctgggctgcgggcgtcgagatattcgcctcctcccggacaacgagttccacccgggttcagactcagttccactctgcaacggatctgcgggcgctcacgcggctccccgcccgggctttcactgaagcatcggaagggaaaactgcggggatctgagctggggtgctgggactgggatgtcctcggaaagacagcatcagcttctgaagccgaagtatccaggccatgggcaagggtcaggggcaccaggtttgttcgagatggggcaacttccgtggtggactctcctgttaatcccccgcacccttagcctcgtagctcagagggccagcggtgtacttgcctgggccggcaaaaggggtggagaaagggagcggcggggtggggtgggctgggggggctggtccgctagggagccaggagcttggtggggggtggcgcggggatcggtgacagcctcccggaggcagtcgttcccttactcagctccccctccgcccgctgggattctctcgggtaaggggaaagggggcggggagcagaggtgtccctctgacggcggcggcagaagaagcagacagactgacagacacatagaccaacagtgcagccccagggttcatccccagactcgcacactcttttggtggtgactggggctcagcgcagcgaagcccgatgtggtccggaggcggtgggaaggcgcggggctgggaggccgcagcgggagggaggagcagccccggcaggctcaggtgaaatcccgctccctgctcctcagcccccttctcccccaaaggccagcccctgacctcggaaccccgaccaaattggaccgcggttccactttgtaactccccaagttggttgcaaagcagtattcaccttccgttctcctttccatccctccccttaggttattctctaccccacctctggccctcccgctctcggttccctcctccttcccccccccccgccttttcctcgcgcgccacaggcaccccacaaaaatgggggtgggggtgtccaagggagggggaaagtaatgctttggttctctctctctctctctctctctctctctctctctctctctctctctctccctctctccttctttctctctttgagacctaaaaatcttgacaagtgaagcttaaaggtgtttaccttgtcatcagcatgtaagctaattatctcgggcaagatgtaggcttctattgtcttgttgctttagcgcttatgccccgcctctggtggctgcctaaaacctggcgccgggctaaaacaaacgcgaggcagcccccgagcctccactcaagccaattaaggcggactcggtccactccgttacgtgtacatccaacaagatcggcgttaaggtaacaccagaatatttggcaaagggagaaaaaaaaagtagcgaggcttcgccttccccctctcccttttttttttcctcctcttccttcctcctccagccgacgccgaatcatgtcgatgagtccaaagcacacgactccgttctcagtgtctgacatcttgagtcccctggaggaaagctacaagaaagtgggcatggagggcggcggcctcggggctccgctcgcagcgtacagacagggccaggcggccccaccggccgcggccatgcagcagcacgccgtggggcaccacggcgccgtcaccgccgcctaccacatgacggcggcgggggtgccccagctctcgcactccgccgtggggggctactgcaacggcaacctgggcaacatgagcgagctgccgccttaccaggacaccatgcggaacagcgcttcgggccccggatggtacggcgccaacccagacccgcgcttccccgccagtaagtgaggccgccccgccgcggggccgcgggctaagcaccggaggcgcggtcggcgcggccggcgaggtgcggcgcccgccggtggcgctgggcatcggggtgggcagccgaacagccttgtgtaggagtggggtgagggcactggactttcttccccccgctgggcaagggtttcaaaggaggtacttagaagagctggggtcctgcggacaggtgctagcacccgaccaccgcaggcaccaaggacagacttgatgctcaagacttcagggagctaaggaaggcccacccgggactcggctagggaggctaggaactcgggccagaggagttagggaccaggaggggcgagtagagagagccgccctgctgggatgcatcccggtcgggctgcctcgatttctaaaagtctccctctgggtggcttgggagggcgcacagctctggaggaggctctacgtgggtcgggcgggtggctgtcctcacctagagcccgcaagagagaaagccagagaggccaagcgcctggaagctggggcgtttgtaagtgaaaactcccttttgttaagctcctgaacttggtctaccgtccgaccccagctctctgcacccttgggtctcccacctggcttgggcatgaaaggagtcaaagcaacccttttccctcactgcacattctgggtctaaagggacactgataccaatgaggagtagctagactttaaacccttaagtagttcgacggcacggcccgctagctgggcctcttttgggaaagagcactaggcggcggcctaggtgaggaggatgccgtcgaaagttggggcgggcaggccaagggcacagaaagcggggttgccccggccccggccccagccgaccgctgtgcgtttgtcgcttacagtctcccgcttcatgggcccggcgagcggcatgaatatgagtggcatgggcggcctgggctcgctgggggacgtgagcaagaacatggccccgctgcccagtgcgccccgccggaagcgccgggtgctcttctcccaggcgcaggtgtacgagctcgagcgacgtttcaagcaacagaagtacctgtcggcgccggagcgcgagcatctggccagcatgattcacctgacacccacgcaggtcaagatctggttccagaaccaccgctacaagatgaagcgccaggctaaggacaaggcggcgcagcaacaactgcagcaggacagcggcggcggcggaggcggcggtggcggtgcgggatgcccgcagcagcagcaagctcagcagcagtcgccgcgccgggtggccgtgccggtcctagtcaaagacggcaaaccctgccaggcgggcgcccctgccccgggagccgcaagcctgcaaagccacgcgcagcaacaagctcagcagcaggcgcaggcggcgcaagcggctgccgcggccatctcagtgggcagcggtggcgcgggtctaggagcacacccaggccaccagccgggcagcgcagggcagtccccggacctggcgcaccacgcagccagccccgcggggctgcagggccaggtctccagcctatcccatctgaactcctcgggctcggactatggcgccatgtcttgttctaccttgctttatggtcggacctggtgagacgtgagatgcgcttgagccccgcgcgacctcaacgcttcccctctgccttccgcaaagaccaccattcgcccgctgctccacgcgcttctactttttttaagaatctgtttatgtttagaccaaggaaaagtacacaaagaccaaactgctggacgacttcttcttcttcttcttcttcttcttcttcttcttcttcttcttcttcttcttcttcttcttcttcttcttcttcttcttcttcttctcctcctcctcctcctcctcctcctcctcctcctcttcctccttcttgtccccgctcgttcttttctttctccccctcctcttctgtttccttcttccttcatctttccccccttcctttctctttactatctaaaacttgcagactttttgttttttaacataaaaagaaaatagaaacagccaagcaaattcaaccctttacggattctttaaacagagaaggacagagaacaaatttggggtgtctttctggtagttcaaatgggttcccaagcttaggcatggcacagttttggagcctgttctatgcttccatggccctgaactctaaagacggaaaacttttctgtggatgcaccctgccagcaaagtgagcttgcttgtaaataccaggatttttcgtttgtttgtatgtttcagaagggaggacagacgctggagataggaaagtcttcagcataacccatttgtacctgacacaaaggaagtgtcccctcccaggcgccctctggccctacaggttcagtccaggctggcctttcagaaaattgttttaggtttgatgtgaacttgtagctgtaaaatgctgttaaaagttggactaaatgcctagtttttagtaacctgtacattatgttgtaaaaagaaccccagtcccagtccctagtccctcactttttcaaggggcattgacaaacctgtgtatattatttggcagtttggtatttgcagcaccaatcctttttttttttctgttgtaacttatgtagatatttggcttaaatatagttcctaagaagcttctaataaattatacgaattaaaaaagatggtttttttcctgattaaaacccttttctttttgtttggttttgatttggcttttaatgggttcgggaaggcggttggaattaaacctgatgggatccaaattcgtgggtttgagctcaggattctgacccaggtaaggaagtcaattccagagtttctatccaaaagaaaaaggaatttcgctcagttttgaacgttagtggaaccaaaacttaagcagtcctgagactatttcagagagagagtgaaaagtaaactagagggagaagtaaaggaagaaacagaaaaaaaggggggctatttttttaagagccaagctttcctggtttagtttttgctttatttttgtttgtgtttgtttggggggggagcctcaaaagctggttttacacatctgagacacccacttaaaataactccaaaggaaccatcagttttagtacatagattgcttttgtacatttgcatgccaaacctgtatttctaattctcacccaaactcctcacccttagattctgtttggttgctggtttccaaaagtaaagaatttctgggttttatttcaacactctaaacaaacaaacaaacaaacaaatgagattcctcctgctggggggatcaccagctccccctgacccccaagaactctccttcgtgtattgtctccatgtggacttggtggccagcttaggcatgcctctctctatcaagacattggggactgagctttctttatcccagtacattccatatctagaggcataaaccgtttcagcaattattctttctcctatccccaactttctactaatcctccaaaacaaaaccaaaataattttaaccgccctcatccccacctctgacttttatcagatacatatattgggggaaaccatcccagttgcggcgggagtcagagtagaagagtagttaaaggcagagacaaaaattatagctccttgggtgaactgttgttgatttgtatggtcgcccctggcaaagtgatacaggcaaggcagcctgtgggcagcagatgcaggtgcctgcaagggtctgttatggcgattgatgagcttttagtacaaggtcactcttcactgagatattcaactatcttttccctgctaacctcccatctctcctctttccatcatcttctatcacattctgttttcagtttttctccactgtatctatcccccagaatcttgggtttggtttggttttgttgttgggttttgttttgtttttgttttgtttttttaaacgcatggacttaaatctgacagtcttttcactgatgaccagggaatttctaccttgtcgtgccttagtaatgggagctggtttctcttcctgagaaaaccagtcctgccttttgggatatggcttctcatagcttgaaggtactctgatattctgaaaggacagttggttgactctcctgagagcctacagggtatgtgtggggttcctcttagcagacctcacattttggggggaaaaaatgaaaccaggaaagcataattatttctgttcgtacaaggagtgcaggctgttcttgctcaggagaggcaggtgttggcagctgctgttcaactcctaagtgagggttgagtttagccctaccagttccactggccagcacaagcccagacagggacagggcctagcctgctctagacacaagctgcccttgctctctgcattgtaaaagagtaacaatatgagggtaatgtagcactctgtcttatcttccttgggttagttggagttcctagcaaatacattcttccccagccggtttagcttgaagtctgtttacttgtccctgagataggtgaactcagagggccctggcaatgagacccaacaaactgggctttggtcctctcttgtcatcattcactctgattctcccagctcctacctagggaacgtgtgtcagctacagaagcaatcttaggatgttgactggggcgtgtctctttaggaaactaggagctgggtttaaggtgagctggattcaaggtttaagtccccacagtttggagacacctaccagcacacaatctgcaaactgatcggcatctagaagaggtcttctcttatttaaggctttcaaaaactcaggctcaggtcggttctgacctcccaggaaaagaaataaacattctggagatgccctggcactgagctggtggaagatgggcaagctttcccagtgagccgatagaacaaatgtcctagaaactgccccctgacaagtatcccacccaacccaggccgcgatggctcaggcagtggggggattttgcagacagcatcctcctctttgctcctctcccccaccccacccaaccctgccgtgtaaacacgaggactttctcgagagccctggagagccgctctagtggcttcggggcctgaaaccccaggcttggcttgtttgatgtttagcatcccaaagcggctccccacccccgccccagcctgggaaccccgagctctggggccgaagagaaggggaagcagttctctcagctggagggcggtggattggctgggcttagagaagtggcgaaagctacaggacagaggcgccctgagtgggagagaaagggatcccgggatggtgcggccatccactaggatagagctggggtcctaaaggccaagaggcagacgaggaaagaaatgtcacagtttgtgggaatacactggagatagggcctagccaggtggagatagcttggagcccgcgaaaacaaggtaagcggtgtctgggtccagttagcgagaccggcgttcacgtctgcggggctatcagggcctcgaggagacagcgctccgtgccactgcttagtgcttggcctttcgtagggatggacttgcttgagagtcttccaagagatttttaagtgatctggactgggagctccattggcgatgtttggatctggttttgattttgaaagcccaggaagattcgcagactttcgaggccgcacactcttcgggctgcccggaatctgggcagcgatgaggactgagaagctgtctcaagacctgagtctcttctcaggcgatcccagataagaggaaggagagagaggttttctgacttccaactcattagggaccaggtaaggtcaatgctttctctattatgtctttatcttaaaagccggccaatttaagatggggggtggggggagagggatacagaatctgtgtgaaccatgctgatataggctaaatggctactgcctgatgagctaaagtcaaccaggcaggtgttcagtttttataagcaaggagttgaagacgaatcggctagcatagtttctcctccttcgcatccctccccagttattagagcgaagccgggcgagcagacggttttattagttgggaagtcctttgggaaatgtgaatctgagataacatgatccttccgctatttagaagcttgtttcaaacgaaaagacatggcctaagggtattggaagggatggaggtggtgttttccttgctcagcttgttcccagatgcctggagccaccttcatcggtccttgctactttactggttgtgtgtgcttcactgtaccattgtgtctctggggcttcagctcaccttcagtggcacccagtttgggatcctgcctcaacaaaaagttttctggtgtctcttcaagtgggtggcttttggaaggtgtggcctctctgcagttaccctctcagcatcccaaggaattggtatgggtgaaagtaaagtatgtattttattgaagggctgagtcaagggcggcatgaaccctcacctccaccccacacatttgcatttctgaactttctttaatgatgatgtcttaaaggaatggaagaagagctaggtcagcgagacagcacaaggcttgccacatctgaaaccacagctgaagtggtggctgcatttcttcttgatagtgacctaatgccaacttggagagtatctaggtgcacccctggtctctgtcctcatttgataagttcccattttatttctgcttcctagacatttatcccctttattgttatggcttcttgcataattttggataacattttcctattttaatgtctttttggttgggggtaggagtttccaatgtaagtttattgctgctgtgtcgtgcctgaaagataaataaaaacagaaacaaaaacattgtcagtgttaggacttggtaaatgactcctttcccccgattggaaacatctgtttctacctactccgtatgtaggtataaatgtgatgtaggtataaatgtgaaaagtggatgtttttatttatgtgtgtatgattttacatgcctattcaaaagattttctaaaaatgaaactcaaatacagaactgaatgttacagaacatattagttagatagacgaaaattgaatgtatctattacctcaagacaccagatgaagcctagtttcccttaaagagaaacaaaaattccttattttggcccattttcagctgggatgtttatttcttgtcatgtgaaactctagaagactgctttgtgctcagagatgttaacatcattcattagcaaggtgcctgagacatatctgtgcacaagacatcttactggactggcaatgtctagtcatagatgagttggtaagaatacttccacttagcaaggaaaatcgaaacaagaaacatttctgcattctattgatatcaaagggtcactttgtgtgggtctaaacatagtcgtggaaataagagcgcctgtctgccttactgttggtgaagagtgaacaaggcaaaccctgcccatcatgtccttccgtgttctagaaaatcttgtctttgctagttagcactcagttatcaggagcagaggttgttgatggagtgtctcacttctaggacattgggtgattgctgttaaaatttatttccaaactgtgagaaattatcctgcatataatgggaagaaagccttgagtccccccacacacaacccccaccctgccacttactgtgcctgaaatgattctgtgagaaatcacccagaaataccaccttctttcaattcccacttctcaaagatgttgcttgaggtttccaaagtgctagagacacaggcttatttgatctgcatgctactgatttacctcatctcccacatacaccgcatacataccgtgaacactgggatgtaaacctgagaattgccttaacaatcctctgagctagccgcctgttatgccctaactcaagatacccagacaatatttactgagctgactatcctgtctaggccagaaagttgttagagcccccatagatctttcccggagaaccaggtttctaaataggcttgcagaggcaggctacttcagaggattaattgtctctccagacctggccactccttggtgcctcaaggtctgcaggcctgtgtaggggaagacaggaggtgggagggcagaagactggcagcttatttcatctcatgactttgctggggggaaaaatgcaaccctgagtcaaaagcatgcaggcatccctgcctctggctagccagccagaagttgtagctagttagcactagcatcacccagcatcattacttggccattcatttactgcttcctggctacaatgatgaggctaggaagggttcagtcagttttgaaaatgctgcactaaaccatacccacatttgatagaacgggtaaagcttggacaaccatagagtcagtgtatctgcttcatactgacatcaaatagaaggaaaaaaaatccattggaaatacttaacaacaagacgctcactcttccatagcctatcatgcagcatgagatggggataaagagaaaacatttgatatctgtggtgttatccaaccaccttaatactgaccttcctggaggaaacctttctagcaaggacaacgccacagcaacacaaaattaatttttaaaaaattttgccactcagattctatgggttgtgtgactctgaaagttgggagcctactgataatgtagttttttttttttttttgttttttttgtttgtttgtttgtttgggttttcttcttcttcttcctggaaaagccaggaaagagcagagagaactgggaaaaaagctaaggggagaggtgagaagatctgtgcctgggtaaagtgtgtgcttctgtccctagtcgtgacatctgagaggtgctagattcagtgagtggacccaagtgttgtggtgaagtggatcaaggctgggtagggggtgtgtggtttaagggttaatgatggtggagctggtctgggggtagctgggaggagctgcgggtatggtgtgtgagctctgggccataacacaatggtaacgtaattatcaggctgaaatgtgttcatgtgggaagccgcccccacattcgccgtcacaagatggcgctgacatcctgtgttctaagttggtaaacaaataatctgcgcatgagccaagggtatttacgactacttgtactctgtttttcccgtgaacgtcagctcggccatgggctgcagccaatcagggagtgatgcgccctaggcaatggttgttctctttaaaatagaaggggtttcgtttttctctctctcttgcttccctctcttgcttcttacactctggcccgataaagatataagcaataaagctttgccgtagaagattctggttgttgtgttcttcctggccggtcgtgagaacgcgtctaataacatgttcaaatggcaagaagttgcaaaacagataggtcttccagagaagagggtgtgctggttacagaggcctgcagccatcatccttttttttttttttttccaatccattttaaacaagaggatctagtgagtgattctgattcaatacacataatcagtttgcaagtcttatttccatttgaaaacagggccatttgcaatcataagagccggacacagagcgcattaagagcagatgatgggcgacagaatccgtaggcaaggactaaatatttttcttctagtctcagacctatgcatctttagttccagtgtatcacctgtgaggcttgtgggtttctagtcccggtgtaacatgaacgaaatattcctgttggatatatgacttaattgcttaaaaatcgggattctggaatcagaaagggggggggggaatggccagaaagattccatgttaattgtgttcctccttgctgcttaccactcggtaataccagtgtttttaaaatggtgttgcctcggactaaagttcacgaacttgaaccatgccgccctctactttgcgtaggataccaaccccagacttgaggcagaggtgcagagcctgggagaaaacctgaggggggacaactcggcgaccttgcaattccacagctcaagacacgggggccctctgcggtctgatggctccaaattggttgtcagggtttcattgaaaagtatgagatcttgaaatctcagagctgttttacgatgtttcattcagaaccaagacaagcggctggcaacagtctccggctttctgcccgctcccctctccttccaaatcctgcccaaggcttcacccgaagccgctgctgcagcacctaatccacagcctcacttcccccattcgattcccagttcaccatctgccccacccaagcgggtccaaccagctgtgagtctcgatttttgttgctccagtctgactccacgatgataccccttctaagcctttagaaaccacatacgcacccctggtgtgaacaagagtagaaactccgatgaattctgaaccccagaatatatacatattaattcattaggtcgggataccgatccaagagtttaactcggaaggattgcagcagcagcagcagcaaacaataacaacaaaactttaaaaaaacaaaaaaagccaggggggcggggcggaggtagaaggtcgggtggagagatagctcggcggttaacagcaccagctgttcctcctgaggacccaggttcgattcccagcacctacatggcagctccgtgcctgccacctagtttcatggaagccaactctcacacacatagttgcaggcgaaataccagtgcatataaaataaaaataaacaaatcattaaaactttacaaaagaaaaatccaacccaaaagttaccacagcagttttgatggggcagaaaaagacagttcagtgttttctcgggtgaaaataactaactttctagcagtctgaaactctagtaatagaatgtatctcttgtgtacctcattttagtttcaaatggaggaggataaatggtgaatctcagatcggtgtttcttaaacaagtgtagttttagaattctctgtaaagtgtgaaggactcaggagaaccaatagacagagtagtgatgggggagggtttcagttttgctcaattttctggaaaactattcaaaattcagaaatgaagacgatcccagtattctctttaacaggcaccaaagaccacacgaatctaaagaccccaccacccccatagctcttccaccacccccagagctctctatttttttcttcccagaacctatggatacaattgtctaggggcacagtccactttgggaggagggggtgagggagaagtgagacctgctcagcaggaagggttcagactctccacttctgcaacctgggaggacggagatcctacaactgggaggaggtgagtatgaagctggtatcagcagaacccagactagtcttttctattctgggacagagtggagagtgggtttggctgagtagtacataggaacatgataacatagagccacagagaaccagagcaggctccttggggcaggaagctgcagccatgcaagagattcacaagctcacagcaaacaacagcaactctagaagtggaggctgatttgtgcttatcccatttgggggccaaaggtatcaggattaggatttctaggccaagtctttagatgtaggtagaccttgcgggaggaaaacttggcctgccttcccccaggagtcccagggaccacctgcaggcacagatatctttattcttgtagttagatgtgactttattgtcactttttctccctgtcccctttactctccattccatcatttccctgcctgttttgcttgcttgcttctttatccaattgcagactcagagctgcagtcttattttgtaggcaattcagtgtcattttcttaatgccaccactaaaaggaaaagcagataaagtggatggggtaaactgtaaggaataaaagccaggaaggtctacctgggagggcactgggaagtaagaagaccaaagagtggccaaggtctgcctgtcaggggacatgcaagaaacatgacagggaaagcctagagaacaggctaatgaaatcccaataataccaggaacgggagagggaggaaagtcccacagaaggcaagtctaggctgtgcccgaataacaccaagtggaggtgggggcacatctgtctggaatagtctgagaggagaggagcaactctagaagatactgccggggcttgagaataagaaacatcttggcaggacaaagcaaagaaccctagtctcagccgcaagcccacccttctagtccatcttgctaatcccacttgacaacactgggctctgtctcccaaggaggtacaaattagtggtaacctgggagcaaaggatgtaattgtggggagagatgacagtaggttcttaaataaaaaacaaaaaaacaaaacaaaaaataaaaaaaaacccacatttttttaagaaagaaagaaagaaagaaaggaaggaagaaagaaaggaaggaaggaaggaaggaaggaaggaaggaaggaaggaagaaggaaggaaggaaagaaagaaagaaagaaagaaagaaagaaagaaagaaagaaagaaagaaagaaagaaagaaagaaagaaagaaagaaaaagaaagagagaaagaaaatggcttctggaaacttctgtggaaacaaacaaactttcttggaaacatatgtcccattacacccctcccaagtcgggaggcatgcttttgaagagacttgaacccttttattcctgcaagcatgacctggagggaactctcttatgaagggccacccagctgcctaggaacagggtgggaagatcccctgggtctgagacaggatcccacatcatagcccccactttggagttctacgtttcccaagatggaagaccttgatcctttggggcggtgttttggcagaggctgacccccaccccaaaacaaaacagttaaccaaacaataatgacaacaaaataacgggctagggccagctggctccgcggggcgcacatagttttttgagcccaaagactgttcgggcctactgggagggttctatgcagctacaaggaagtccccaccccacttcggcccccttagggggcatctctggagcgctggggcacccggaccctttctattttaagggtcacacacgctgtgaagtattttagctgcatcacaaccttttaaataccccagcatgacactgactgcctgaataaggacctcatttgggtggtgaccggccgaagtgctcatttgagacgcttgggcggctgtgaagcaccggctcgctctgcgccggcggggccagcagggtgaggtctccgggagggatggcggcggtgctggccgatctgggaaggagggaagtggtccaggctgcgggccgtgggcgcccttccgctcagctccagtggcctgaggtcgtgcgcgtccggagcacagactggggcggctcggccgtcgggcttttctgtggaattaccaggctctggggaacaactccaccgaccggagtgcatgtggctcacactgcctttcccgttcctagtctttgatacttttggaagcaaagatttccttccatcttttgggcgaatttgtttcatctctcctaaattcagaaacggagtcttcaaaagtcttaatgtgtgtgtggtgtgtgtgtgtgtttgtttgtttgtttgtttgtttgtttgtttgtttctagcgtttaaatgaatgcgaagccacggatcgaatcctgtcgctcacttggggttagcgtctcccgatatttcacacggaaaacaaaacttgggtctctcttatttgtagttgtccttaacctttacagcaactgctgtagatgctgctctgtccattctctaatagattttaccagggaccggtgacagagaactgatttcttttctattagggtttagcacatctttgttgaaggcctgtagaacgaccagggattagatttgcatctcttagacgccctgtgtggtctttgtgcgaagcttgtaactgttaaaaatgacttgttaggaagcgtgtgggctctcagcgctctccttttgacagaaggattgagaaattcagattggccctgtaggatttagcctgcagattccacctgaaccctaagcaattagaccttaatctcactgcaatcatatttgagttaggatttcttgcactttgtttacttcaattaaaagcagtggaataattttttttccagcgtctaaagtgaaatcttcaggaataatacctcaggacttcttagaaacggttttggtggcgatgggggattttcttgtgagctttctttctggccctcttgcccttcccctcccccatttaaattattcctctcctgttgctcgctatagttgcgatcatctttccaggggttgaactcaggtcgcgacggaccgcgtccagaggataccagcagagaggggcacccttgcccggagagcacgcgggggtgggtggggggagtcccaaccagggcgcctgctcccagctccacgtggagtttactcgctagtgcgcgccgaaggctgctgcctgcgtaagccccaggcagtggacacccacccggcaccgcgccggtcctcttacgatgg

SEQ ID NO: 92 - DNA, 28972 bp, Mus musculus
ccatcgtaagaggaccggcgcggtgccgggtgggtgtccactgcctggggcttacgcaggcagcagccttcggcgcgcactagcgagtaaactccacgtggagctgggagcaggcgccctggttgggactccccccacccacccccgcgtgctctccgggcaagggtgcccctctctgctggtatcctctggacgcggtccgtcgcgacctgagttcaacccctggaaagatgatcgcaactatagcgagcaacaggagaggaataatttaaatgggggaggggaagggcaagagggccagaaagaaagctcacaagaaaatcccccatcgccaccaaaaccgtttctaagaagtcctgaggtattattcctgaagatttcactttagacgctggaaaaaaaattattccactgcttttaattgaagtaaacaaagtgcaagaaatcctaactcaaatatgattgcagtgagattaaggtctaattgcttagggttcaggtggaatctgcaggctaaatcctacagggccaatctgaatttctcaatccttctgtcaaaaggagagcgctgagagcccacacgcttcctaacaagtcatttttaacagttacaagcttcgcacaaagaccacacagggcgtctaagagatgcaaatctaatccctggtcgttctacaggccttcaacaaagatgtgctaaaccctaatagaaaagaaatcagttctctgtcaccggtccctggtaaaatctattagagaatggacagagcagcatctacagcagttgctgtaaaggttaaggacaactacaaataagagagacccaagttttgttttccgtgtgaaatatcgggagacgctaaccccaagtgagcgacaggattcgatccgtggcttcgcattcatttaaacgctagaaacaaacaaacaaacaaacaaacaaacaaacaaacacacacacacaccacacacacattaagacttttgaagactccgtttctgaatttaggagagatgaaacaaattcgcccaaaagatggaaggaaatctttgcttccaaaagtatcaaagactaggaacgggaaaggcagtgtgagccacatgcactccggtcggtggagttgttccccagagcctggtaattccacagaaaagcccgacggccgagccgccccagtctgtgctccggacgcgcacgacctcaggccactggagctgagcggaagggcgcccacggcccgcagcctggaccacttccctccttcccagatcggccagcaccgccgccatccctcccggagacctcaccctgctggccccgccggcgcagagcgagccggtgcttcacagccgcccaagcgtctcaaatgagcacttcggccggtcaccacccaaatgaggtccttattcaggcagtcagtgtcatgctggggtatttaaaaggttgtgatgcagctaaaatacttcacagcgtgtgtgacccttaaaatagaaagggtccgggtgccccagcgctccagagatgccccctaagggggccgaagtggggtggggacttccttgtagctgcatagaaccctcccagtaggcccgaacagtctttgggctcaaaaaactatgtgcgccccgcggagccagctggccctagcccgttattttgttgtcattattgtttggttaactgttttgttttggggtgggggtcagcctctgccaaaacaccgccccaaaggatcaaggtcttccatcttgggaaacgtagaactccaaagtgggggctatgatgtgggatcctgtctcagacccaggggatcttcccaccctgttcctaggcagctgggtggcccttcataagagagttccctccaggtcatgcttgcaggaataaaagggttcaagtctcttcaaaagcatgcctcccgacttgggaggggtgtaatgggacatatgtttccaagaaagtttgtttgtttccacagaagtttccagaagccattttctttctctctttctttttctttctttctttctttctttctttctttctttctttctttctttctttctttctttctttctttctttctttctttccttccttccttcttccttccttccttccttccttccttccttccttccttcctttctttcttccttcctttctttctttctttctttcttaaaaaaatgtgggtttttttttattttttgttttgtttttttgttttttatttaagaacctactgtcatctctccccacaattacatcctttgctcccaggttaccactaatttgtacctccttgggagacagagcccagtgttgtcaagtgggattagcaagatggactagaagggtgggcttgcggctgagactagggttctttgctttgtcctgccaagatgtttcttattctcaagccccggcagtatcttctagagttgctcctctcctctcagactattccagacagatgtgcccccacctccacttggtgttattcgggcacagcctagacttgccttctgtgggactttcctccctctcccgttcctggtattattgggatttcattagcctgttctctaggctttccctgtcatgtttcttgcatgtcccctgacaggcagaccttggccactctttggtcttcttacttcccagtgccctcccaggtagaccttcctggcttttattccttacagtttaccccatccactttatctgcttttccttttagtggtggcattaagaaaatgacactgaattgcctacaaaataagactgcagctctgagtctgcaattggataaagaagcaagcaagcaaaacaggcagggaaatgatggaatggagagtaaaggggacagggagaaaaagtgacaataaagtcacatctaactacaagaataaagatatctgtgcctgcaggtggtccctgggactcctgggggaaggcaggccaagttttcctcccgcaaggtctacctacatctaaagacttggcctagaaatcctaatcctgatacctttggcccccaaatgggataagcacaaatcagcctccacttctagagttgctgttgtttgctgtgagcttgtgaatctcttgcatggctgcagcttcctgccccaaggagcctgctctggttctctgtggctctatgttatcatgttcctatgtactactcagccaaacccactctccactctgtcccagaatagaaaagactagtctgggttctgctgataccagcttcatactcacctcctcccagttgtaggatctccgtcctcccaggttgcagaagtggagagtctgaacccttcctgctgagcaggtctcacttctccctcaccccctcctcccaaagtggactgtgcccctagacaattgtatccataggttctgggaagaaaaaaatagagagctctgggggtggtggaagagctatgggggtggtggggtctttagattcgtgtggtctttggtgcctgttaaagagaatactgggatcgtcttcatttctgaattttgaatagttttccagaaaattgagcaaaactgaaaccctcccccatcactactctgtctattggttctcctgagtccttcacactttacagagaattctaaaactacacttgtttaagaaacaccgatctgagattcaccatttatcctcctccatttgaaactaaaatgaggtacacaagagatacattctattactagagtttcagactgctagaaagttagttattttcacccgagaaaacactgaactgtctttttctgccccatcaaaactgctgtggtaacttttgggttggatttttcttttgtaaagttttaatgatttgtttatttttattttatatgcactggtatttcgcctgcaactatgtgtgtgagagttggcttccatgaaactaggtggcaggcacggagctgccatgtaggtgctgggaatcgaacctgggtcctcaggaggaacagctggtgctgttaaccgccgagctatctctccacccgaccttctacctccgccccgcccccctggctttttttgtttttttaaagttttgttgttattgtttgctgctgctgctgctgcaatccttccgagttaaactcttggatcggtatcccgacctaatgaattaatatgtatatattctggggttcagaattcatcggagtttctactcttgttcacaccaggggtgcgtatgtggtttctaaaggcttagaaggggtatcatcgtggagtcagactggagcaacaaaaatcgagactcacagctggttggacccgcttgggtggggcagatggtgaactgggaatcgaatgggggaagtgaggctgtggattaggtgctgcagcagcggcttcgggtgaagccttgggcaggatttggaaggagaggggagcgggcagaaagccggagactgttgccagccgcttgtcttggttctgaatgaaacatcgtaaaacagctctgagatttcaagatctcatacttttcaatgaaaccctgacaaccaatttggagccatcagaccgcagagggcccccgtgtcttgagctgtggaattgcaaggtcgccgagttgtcccccctcaggttttctcccaggctctgcacctctgcctcaagtctggggttggtatcctacgcaaagtagagggcggcatggttcaagttcgtgaactttagtccgaggcaacaccattttaaaaacactggtattaccgagtggtaagcagcaaggaggaacacaattaacatggaatctttctggccattccccccccccctttctgattccagaatcccgatttttaagcaattaagtcatatatccaacaggaatatttcgttcatgttacaccgggactagaaacccacaagcctcacaggtgatacactggaactaaagatgcataggtctgagactagaagaaaaatatttagtccttgcctacggattctgtcgcccatcatctgctcttaatgcgctctgtgtccggctcttatgattgcaaatggccctgttttcaaatggaaataagacttgcaaactgattatgtgtattgaatcagaatcactcactagatcctcttgtttaaaatggattggaaaaaaaaaaaaaaaaggatgatggctgcaggcctctgtaaccagcacaccctcttctctggaagacctatctgttttgcaacttcttgccatttgaacatgttattagacgcgttctcacgaccggccaggaagaacacaacaaccagaatcttctacggcaaagctttattgcttatatctttatcgggccagagtgtaagaagcaagagagggaagcaagagagagagaaaaacgaaaccccttctattttaaagagaacaaccattgcctagggcgcatcactccctgattggctgcagcccatggccgagctgacgttcacgggaaaaacagagtacaagtagtcgtaaatacccttggctcatgcgcagattatttgtttaccaacttagaacacaggatgtcagcgccatcttgtgacggcgaatgtgggggcggcttcccacatgaacacatttcagcctgataattacgttaccattgtgttatggcccagagctcacacaccatacccgcagctcctcccagctacccccagaccagctccaccatcattaacccttaaaccacacaccccctacccagccttgatccacttcaccacaacacttgggtccactcactgaatctagcacctctcagatgtcacgactagggacagaagcacacactttacccaggcacagatcttctcacctctccccttagcttttttcccagttctctctgctctttcctggcttttccaggaagaagaagaagaaaacccaaacaaacaaacaaacaaaaaaaacaaaaaaaaaaaaaaaactacattatcagtaggctcccaactttcagagtcacacaacccatagaatctgagtggcaaaattttttaaaaattaattttgtgttgctgtggcgttgtccttgctagaaaggtttcctccaggaaggtcagtattaaggtggttggataacaccacagatatcaaatgttttctctttatccccatctcatgctgcatgataggctatggaagagtgagcgtcttgttgttaagtatttccaatggattttttttccttctatttgatgtcagtatgaagcagatacactgactctatggttgtccaagctttacccgttctatcaaatgtgggtatggtttagtgcagcattttcaaaactgactgaacccttcctagcctcatcattgtagccaggaagcagtaaatgaatggccaagtaatgatgctgggtgatgctagtgctaactagctacaacttctggctggctagccagaggcagggatgcctgcatgcttttgactcagggttgcatttttccccccagcaaagtcatgagatgaaataagctgccagtcttctgccctcccacctcctgtcttcccctacacaggcctgcagaccttgaggcaccaaggagtggccaggtctggagagacaattaatcctctgaagtagcctgcctctgcaagcctatttagaaacctggttctccgggaaagatctatgggggctctaacaactttctggcctagacaggatagtcagctcagtaaatattgtctgggtatcttgagttagggcataacaggcggctagctcagaggattgttaaggcaattctcaggtttacatcccagtgttcacggtatgtatgcggtgtatgtgggagatgaggtaaatcagtagcatgcagatcaaataagcctgtgtctctagcactttggaaacctcaagcaacatctttgagaagtgggaattgaaagaaggtggtatttctgggtgatttctcacagaatcatttcaggcacagtaagtggcagggtgggggttgtgtgtggggggactcaaggctttcttcccattatatgcaggataatttctcacagtttggaaataaattttaacagcaatcacccaatgtcctagaagtgagacactccatcaacaacctctgctcctgataactgagtgctaactagcaaagacaagattttctagaacacggaaggacatgatgggcagggtttgccttgttcactcttcaccaacagtaaggcagacaggcgctcttatttccacgactatgtttagacccacacaaagtgaccctttgatatcaatagaatgcagaaatgtttcttgtttcgattttccttgctaagtggaagtattcttaccaactcatctatgactagacattgccagtccagtaagatgtcttgtgcacagatatgtctcaggcaccttgctaatgaatgatgttaacatctctgagcacaaagcagtcttctagagtttcacatgacaagaaataaacatcccagctgaaaatgggccaaaataaggaatttttgtttctctttaagggaaactaggcttcatctggtgtcttgaggtaatagatacattcaattttcgtctatctaactaatatgttctgtaacattcagttctgtatttgagtttcatttttagaaaatcttttgaataggcatgtaaaatcatacacacataaataaaaacatccacttttcacatttatacctacatcacatttatacctacatacggagtaggtagaaacagatgtttccaatcgggggaaaggagtcatttaccaagtcctaacactgacaatgtttttgtttctgtttttatttatctttcaggcacgacacagcagcaataaacttacattggaaactcctacccccaaccaaaaagacattaaaataggaaaatgttatccaaaattatgcaagaagccataacaataaaggggataaatgtctaggaagcagaaataaaatgggaacttatcaaatgaggacagagaccaggggtgcacctagatactctccaagttggcattaggtcactatcaagaagaaatgcagccaccacttcagctgtggtttcagatgtggcaagccttgtgctgtctcgctgacctagctcttcttccattcctttaagacatcatcattaaagaaagttcagaaatgcaaatgtgtggggtggaggtgagggttcatgccgcccttgactcagcccttcaataaaatacatactttactttcacccataccaattccttgggatgctgagagggtaactgcagagaggccacaccttccaaaagccacccacttgaagagacaccagaaaactttttgttgaggcaggatcccaaactgggtgccactgaaggtgagctgaagccccagagacacaatggtacagtgaagcacacacaaccagtaaagtagcaaggaccgatgaaggtggctccaggcatctgggaacaagctgagcaaggaaaacaccacctccatcccttccaatacccttaggccatgtcttttcgtttgaaacaagcttctaaatagcggaaggatcatgttatctcagattcacatttcccaaaggacttcccaactaataaaaccgtctgctcgcccggcttcgctctaataactggggagggatgcgaaggaggagaaactatgctagccgattcgtcttcaactccttgcttataaaaactgaacacctgcctggttgactttagctcatcaggcagtagccatttagcctatatcagcatggttcacacagattctgtatccctctccccccaccccccatcttaaattggccggcttttaagataaagacataatagagaaagcattgaccttacctggtccctaatgagttggaagtcagaaaacctctctctccttcctcttatctgggatcgcctgagaagagactcaggtcttgagacagcttctcagtcctcatcgctgcccagattccgggcagcccgaagagtgtgcggcctcgaaagtctgcgaatcttcctgggctttcaaaatcaaaaccagatccaaacatcgccaatggagctcccagtccagatcacttaaaaatctcttggaagactctcaagcaagtccatccctacgaaaggccaagcactaagcagtggcacggagcgctgtctcctcgaggccctgatagccccgcagacgtgaacgccggtctcgctaactggacccagacaccgcttaccttgttttcgcgggctccaagctatctccacctggctaggccctatctccagtgtattcccacaaactgtgacatttctttcctcgtctgcctcttggcctttaggaccccagctctatcctagtggatggccgcaccatcccgggatccctttctctcccactcagggcgcctctgtcctgtagctttcgccacttctctaagcccagccaatccaccgccctccagctgagagaactgcttccccttctcttcggccccagagctcggggttcccaggctggggcgggggtggggagccgctttgggatgctaaacatcaaacaagccaagcctggggtttcaggccccgaagccactagagcggctctccagggctctcgagaaagtcctcgtgtttacacggcagggttgggtggggtgggggagaggagcaaagaggaggatgctgtctgcaaaatccccccactgcctgagccatcgcggcctgggttgggtgggatacttgtcagggggcagtttctaggacatttgttctatcggctcactgggaaagcttgcccatcttccaccagctcagtgccagggcatctccagaatgtttatttcttttcctgggaggtcagaaccgacctgagcctgagtttttgaaagccttaaataagagaagacctcttctagatgccgatcagtttgcagattgtgtgctggtaggtgtctccaaactgtggggacttaaaccttgaatccagctcaccttaaacccagctcctagtttcctaaagagacacgccccagtcaacatcctaagattgcttctgtagctgacacacgttccctaggtaggagctgggagaatcagagtgaatgatgacaagagaggaccaaagcccagtttgttgggtctcattgccagggccctctgagttcacctatctcagggacaagtaaacagacttcaagctaaaccggctggggaagaatgtatttgctaggaactccaactaacccaaggaagataagacagagtgctacattaccctcatattgttactcttttacaatgcagagagcaagggcagcttgtgtctagagcaggctaggccctgtccctgtctgggcttgtgctggccagtggaactggtagggctaaactcaaccctcacttaggagttgaacagcagctgccaacacctgcctctcctgagcaagaacagcctgcactccttgtacgaacagaaataattatgctttcctggtttcattttttccccccaaaatgtgaggtctgctaagaggaaccccacacataccctgtaggctctcaggagagtcaaccaactgtcctttcagaatatcagagtaccttcaagctatgagaagccatatcccaaaaggcaggactggttttctcaggaagagaaaccagctcccattactaaggcacgacaaggtagaaattccctggtcatcagtgaaaagactgtcagatttaagtccatgcgtttaaaaaaacaaaacaaaaacaaaacaaaacccaacaacaaaaccaaaccaaacccaagattctgggggatagatacagtggagaaaaactgaaaacagaatgtgatagaagatgatggaaagaggagagatgggaggttagcagggaaaagatagttgaatatctcagtgaagagtgaccttgtactaaaagctcatcaatcgccataacagacccttgcaggcacctgcatctgctgcccacaggctgccttgcctgtatcactttgccaggggcgaccatacaaatcaacaacagttcacccaaggagctataatttttgtctctgcctttaactactcttctactctgactcccgccgcaactgggatggtttcccccaatatatgtatctgataaaagtcagaggtggggatgagggcggttaaaattattttggttttgttttggaggattagtagaaagttggggataggagaaagaataattgctgaaacggtttatgcctctagatatggaatgtactgggataaagaaagctcagtccccaatgtcttgatagagagaggcatgcctaagctggccaccaagtccacatggagacaatacacgaaggagagttcttgggggtcagggggagctggtgatccccccagcaggaggaatctcatttgtttgtttgtttgtttgtttagagtgttgaaataaaacccagaaattctttacttttggaaaccagcaaccaaacagaatctaagggtgaggagtttgggtgagaattagaaatacaggtttggcatgcaaatgtacaaaagcaatctatgtactaaaactgatggttcctttggagttattttaagtgggtgtctcagatgtgtaaaaccagcttttgaggctccccccccaaacaaacacaaacaaaaataaagcaaaaactaaaccaggaaagcttggctcttaaaaaaatagcccccctttttttctgtttcttcctttacttctccctctagtttacttttcactctctctctgaaatagtctcaggactgcttaagttttggttccactaacgttcaaaactgagcgaaattcctttttcttttggatagaaactctggaattgacttccttacctgggtcagaatcctgagctcaaacccacgaatttggatcccatcaggtttaattccaaccgccttcccgaacccattaaaagccaaatcaaaaccaaacaaaaagaaaagggttttaatcaggaaaaaaaccatcttttttaattcgtataatttattagaagcttcttaggaactatatttaagccaaatatctacataagttacaacagaaaaaaaaaaaggattggtgctgcaaataccaaactgccaaataatatacacaggtttgtcaatgccccttgaaaaagtgagggactagggactgggactggggttctttttacaacataatgtacaggttactaaaaactaggcatttagtccaacttttaacagcattttacagctacaagttcacatcaaacctaaaacaattttctgaaaggccagcctggactgaacctgtagggccagagggcgcctgggaggggacacttcctttgtgtcaggtacaaatgggttatgctgaagactttcctatctccagcgtctgtcctcccttctgaaacatacaaacaaacgaaaaatcctggtatttacaagcaagctcactttgctggcagggtgcatccacagaaaagttttccgtctttagagttcagggccatggaagcatagaacaggctccaaaactgtgccatgcctaagcttgggaacccatttgaactaccagaaagacaccccaaatttgttctctgtccttctctgtttaaagaatccgtaaagggttgaatttgcttggctgtttctattttctttttatgttaaaaaacaaaaagtctgcaagttttagatagtaaagagaaaggaaggggggaaagatgaaggaagaaggaaacagaagaggagggggagaaagaaaagaacgagcggggacaagaaggaggaagaggaggaggaggaggaggaggaggaggaggaggagaagaagaagaagaagaagaagaagaagaagaagaagaagaagaagaagaagaagaagaagaagaagaagaagaagaagaagaagaagtcgtccagcagtttggtctttgtgtacttttccttggtctaaacataaacagattcttaaaaaaagtagaagcgcgtggagcagcgggcgaatggtggtctttgcggaaggcagaggggaagcgttgaggtcgcgcggggctcaagcgcatctcacgtctcaccaggtccgaccataaagcaaggtagaacaagacatggcgccatagtccgagcccgaggagttcagatgggataggctggagacctggccctgcagccccgcggggctggctgcgtggtgcgccaggtccggggactgccctgcgctgcccggctggtggcctgggtgtgctcctagacccgcgccaccgctgcccactgagatggccgcggcagccgcttgcgccgcctgcgcctgctgctgagcttgttgctgcgcgtggctttgcaggcttgcggctcccggggcaggggcgcccgcctggcagggtttgccgtctttgactaggaccggcacggccacccggcgcggcgactgctgctgagcttgctgctgctgcgggcatcccgcaccgccaccgccgcctccgccgccgccgctgtcctgctgcagttgttgctgcgccgccttgtccttagcctggcgcttcatcttgtagcggtggttctggaaccagatcttgacctgcgtgggtgtcaggtgaatcatgctggccagatgctcgcgctccggcgccgacaggtacttctgttgcttgaaacgtcgctcgagctcgtacacctgcgcctgggagaagagcacccggcgcttccggcggggcgcactgggcagcggggccatgttcttgctcacgtcccccagcgagcccaggccgcccatgccactcatattcatgccgctcgccgggcccatgaagcgggagactgtaagcgacaaacgcacagcggtcggctggggccggggccggggcaaccccgctttctgtgcccttggcctgcccgccccaactttcgacggcatcctcctcacctaggccgccgcctagtgctctttcccaaaagaggcccagctagcgggccgtgccgtcgaactacttaagggtttaaagtctagctactcctcattggtatcagtgtccctttagacccagaatgtgcagtgagggaaaagggttgctttgactcctttcatgcccaagccaggtgggagacccaagggtgcagagagctggggtcggacggtagaccaagttcaggagcttaacaaaagggagttttcacttacaaacgccccagcttccaggcgcttggcctctctggctttctctcttgcgggctctaggtgaggacagccacccgcccgacccacgtagagcctcctccagagctgtgcgccctcccaagccacccagagggagacttttagaaatcgaggcagcccgaccgggatgcatcccagcagggcggctctctctactcgcccctcctggtccctaactcctctggcccgagttcctagcctccctagccgagtcccgggtgggccttccttagctccctgaagtcttgagcatcaagtctgtccttggtgcctgcggtggtcgggtgctagcacctgtccgcaggaccccagctcttctaagtacctcctttgaaacccttgcccagcggggggaagaaagtccagtgccctcaccccactcctacacaaggctgttcggctgcccaccccgatgcccagcgccaccggcgggcgccgcacctcgccggccgcgccgaccgcgcctccggtgcttagcccgcggccccgcggcggggcggcctcacttactggcggggaagcgcgggtctgggttggcgccgtaccatccggggcccgaagcgctgttccgcatggtgtcctggtaaggcggcagctcgctcatgttgcccaggttgccgttgcagtagccccccacggcggagtgcgagagctggggcacccccgccgccgtcatgtggtaggcggcggtgacggcgccgtggtgccccacggcgtgctgctgcatggccgcggccggtggggccgcctggccctgtctgtacgctgcgagcggagccccgaggccgccgccctccatgcccactttcttgtagctttcctccaggggactcaagatgtcagacactgagaacggagtcgtgtgctttggactcatcgacatgattcggcgtcggctggaggaggaaggaagaggaggaaaaaaaaaagggagagggggaaggcgaagcctcgctactttttttttctccctttgccaaatattctggtgttaccttaacgccgatcttgttggatgtacacgtaacggagtggaccgagtccgccttaattggcttgagtggaggctcgggggctgcctcgcgtttgttttagcccggcgccaggttttaggcagccaccagaggcggggcataagcgctaaagcaacaagacaatagaagcctacatcttgcccgagataattagcttacatgctgatgacaaggtaaacacctttaagcttcacttgtcaagatttttaggtctcaaagagagaaagaaggagagagggagagagagagagagagagagagagagagagagagagagagagagagagaaccaaagcattactttccccctcccttggacacccccacccccatttttgtggggtgcctgtggcgcgcgaggaaaaggcgggggggggggaaggaggagggaaccgagagcgggagggccagaggtggggtagagaataacctaaggggagggatggaaaggagaacggaaggtgaatactgctttgcaaccaacttggggagttacaaagtggaaccgcggtccaatttggtcggggttccgaggtcaggggctggcctttgggggagaagggggctgaggagcagggagcgggatttcacctgagcctgccggggctgctcctccctcccgctgcggcctcccagccccgcgccttcccaccgcctccggaccacatcgggcttcgctgcgctgagccccagtcaccaccaaaagagtgtgcgagtctggggatgaaccctggggctgcactgttggtctatgtgtctgtcagtctgtctgcttcttctgccgccgccgtcagagggacacctctgctccccgccccctttccccttacccgagagaatcccagcgggcggagggggagctgagtaagggaacgactgcctccgggaggctgtcaccgatccccgcgccaccccccaccaagctcctggctccctagcggaccagcccccccagcccaccccaccccgccgctccctttctccaccccttttgccggcccaggcaagtacaccgctggccctctgagctacgaggctaagggtgcgggggattaacaggagagtccaccacggaagttgccccatctcgaacaaacctggtgcccctgacccttgcccatggcctggatacttcggcttcagaagctgatgctgtctttccgaggacatcccagtcccagcaccccagctcagatccccgcagttttcccttccgatgcttcagtgaaagcccgggcggggagccgcgtgagcgcccgcagatccgttgcagagtggaactgagtctgaacccgggtggaactcgttgtccgggaggaggcgaatatctcgacgcccgcagcccagcgggcgggaggctgggctgaggctcgcctcctcccggagctcagccatgcaaaagtgcacttgcttccccgggaataaccaaatatctttgtctaaagtggcggcgtaaatggccggtcgctttgtggccacgctggatattagtagatgaggatcattctgcttcaattgggcgcctctcatccggctaggaagaaactgcttaggaggaagtgggtttcctgtctgagcgttcccaggcttcaagtgtgagccccgcgccttgagggtccttgggcgcctggcaagggggagctgtgggctgtgctccctagcgggcccgggggcgtcagcctcattgctgttaccaggtcaggatcagcagctaagtgggttacccagccaagccctgcatggcacagatttggagaccacctccgtttttttttttttctccttggaatttaagcgttttcgttattgtttgtttttgttttggctttgcttgtctgctgttcgagctttcttggagcgctagaggctgggagggcggagtgcttcctggcccggcaggtgcctcctagacacttcggcggccagtcaaggaggcttcttgattttggtttttgttttcacattttctttcccctccttgtagtgagggagctcccgataatgaacaagcagttttgaactacttaattcagcagggtaggctcctttccattaatagcaattatagtatggaaagttgttttatttgctttttaagatctctccttgaagagtgctctctactccctcaacacaaagccgacgactaaactaacattagctttcctcaccacctacctccatcgtgaagggaaggaaggctctgggcatcagcgggcctcccatctgggcccgcattttcgaaccgcccccgaggtggctttgaagcagggaaccccgactttaagcggccaggtgcgttgtgtctctgtagctaaggacaagtggaaagcagagctctgcgctctcctttcccagggacttctctggggggcgctctcaagatgagctacagcactttggtctacagtgtcgagagtgcagggaggggaagccacgctagatcaagtgaacggcagaaagggcaggcaaagcataatgcagacctagtctgaaggcgcgacccagatctgctagcattgggaacgggatcgtcttaggaagtccctggtcctccgtctccatttaaccccgttattttataattgttggtggtcataggaacaccaagggtagagtgtcatttgtctctcccggttttagtgccacttacagaaggaggtaattcttcagaaggttttttggtgagatttaagcaaaatcaggcacatcaaaacacgcccaaagctttgagggaagaaaattaagctcactaacaaggtcgatatttctgtgtctgtggttaatatcaaatccattgcttcttcggggggcctgttagtctggagtgaaaggtttgttcaatcttctacagtctctgagccgtgcagcccggaccttcaaaaacaccagcaggtggccagtttgggagaatgtacacaagctgcatcttagccctactgtaactaggggcccccatccccagccgcacagcactaggtgaggggctgagcttcagtcagagttcgaggggagtgatgcctggcaacccccatgctttaccctgaaggggaggggaactggactgagcttcaaacttctcctgctggcaccaatgccaacagctcccatctagaactgggggtgaggggctctgttgcactctgtgacttgaaccaaatgaacttcccatacttctgccccttcataaacatccaccattctggattatttcccatgagcactgacatccacaagagtaagccagaattctcaagagcctttgggggcctggggggggtgttgggtgggtgggtggggagccacctatttatctctgaactcatccatgcaaagatcttgagaattctcaccaggttagtctttctgactagagagcatgctgcctctctgactcatcttgaacaggacccactcgggttaaaccagagatatttttttcccctcttgtagctgtggattaattcttaaaaacctagtccacccctcatggctggtgcctcctgcgctgtcagtagactggccttgtggctagcaggacagagctcagccctcataaggttattccctggttcagccccaagggtcctctttaatctcactagttaggaatcaaagggctgcagagactcaggcttcaccagaagaagagcagagtaaccattagtctttgcagcagtgtagcagagggacacttccttcttcccctccagtgtctctttgaaagctcactggtagaacgctagagagaggatgtccaaaccagatctaccacttgccacctacacctcagcttgcttacttccaactcccatgaaacccttcacatctgccaagggcactagatgtgcttcttctaatgctgcaaagttcaaaatgttatcttacaattcatgattcacttagcaactactcttggaacccatgctgtatccgatatttggtaggctaggtcagagtatttagccattaacgacctatctatggccggtctccacctgaagcttccatattagcactagatcactgcagtgatgtataattactttgtaacaagcattgagaaagggggcgtgtcccagtgaagttttgtgtcctggattagctaggttagtgctgggggacttgggggggggggtggagatgccctggagtagagctcagaaatcttggtgtctgagacctggctttaccactttctgattatgtgagctcccaccatcccctggagcaaatcccttcatacatgcacatggacaccatacatgcacatggacacgtgcatgaatgtgtgcatacacactgtatgtggggatgtggtagaagcctgcctcatacaacttcctactttgctgtgtcagtgacttaaataatcggtgatgagatgctgtgcaggagtttgaccgtctttaagcacattagcacaatgaattattctaattcagtatttcagacttcaacttggggatcaagcctctaaggctctgtaagaagcaacacccaatcctccgatagctactgcaggtatagcatctttgctgtgctgtacttgggaggacttgatggggctggggagatgtctcagtggtaaagaacactttcagagaacctgggttctattcccagtacaggatttatgtctcataaccttctgtatcccatttccaaacaatctaatgccctttttcaggtctctgcaggaaccaagcacacacttagtgcatttagacaagcagtctctctctctctctctctctctctctctctctctctctctctctctctctctctcacacacacacacacacacacaattttttaaaagagtggggtggaggcaacctggcacaagagcaacagaaagtggggagagagggtttactattctctaacccagagatccaaggagtgccttccaaacatggctagtttctgaaaagttttccaagacccctctatgctttcccaagctttgaaagcctctctggggtcctcactaggcaggctgagaatcaggacagctttggagtgttgcaaggaaaagagcctactgccaattcttttcttggcttaaaacctttgagatatctccttaagtcgtggtttgtgcggccggagtgcagggctgggaggaccatcacagcatctccctgacaggaggatgctcttgtggaaatgagattccatcagagagtcctcccagagagtcctccccctccccgccgcccccccccccttcccaggccttgggtggtggaggagtcctctcttcccttgctcttccttcaggtctcagtcccaagttgtaaccaaaacccctatgggctcccaaattccggggacgccccctatagggatggggtttgaggcaggaatgaatctaaagagtggatgataaagaaatgggaagcaagcactaaatcatactttgaaatgagggggacagagatgtgacagacagagatgagaacttggagcagggcgcagacagcgctgggcacactcagagtgagaggtgtgagagatggggagtgagagatggggactgtgaacatcagccagtcagcactattctaaagagtgttttagaggtgctgaacgctaacaaaggtcctcaggaaggcgcggttgctttgtcccaagacctgggcacattcatttagctttttatattataaattgcttgttattgttattgggtgctgcggttggaactcgggacctcgcgcatgccaggtgagcgctttgcaaatgagctacatttccagtatctctcattcagctttagctgactgatccccctttcagccttttcaaattttgttgcctgtagtatgctttattttctgtgaagtcgctacagcggagttcccttctccagttcttctcctctgcaacctttctcttttctttcctcttcccttctatccaacacttgccctcgcgaaaagtttccgacggccaccgtactgtcccaggcccgctttggtgatttttgccctacagtctggattcctcttcgctttctaggtgtggaagcctgccagatgcagaccgaggcgatccgcggcgccctctactggtcaccaatagaaatgtatctctacagcctcttggggaagctttgcaagtaattgggtcatggaaagaaagactggtaagttgaaagagactgggagtggttaaccttccacccatcctctcaactgcttatcatattacacactagttcaacgtgtcaggcttttcataggtgtactcaaagcttttgcaatatagttcctgattgacttagaattaaccaggcactttaccttctgtaaatcaggactggagaagccacagcaatacctaaattctccatctaattaggctttaatgtataattgtgttacaggaatttgcttttcaagtctgagggcaagtggacatgcatttggtggtgaagtggcttttactttctgcatttccaaagcctgaagaaacgagaggtacttgctgagtggcctgacattgggcgctctaatagaatagctgccaaaactcttgaagctagaagctttctagaattatcatcacctaagtaagaaccaagaccacctgcccaggggtggcaccacctacagacacatccataggctaatcctatgggctaattgaccgtgtattcttcgattgggctaagacagtatatccttcaggccagagcacagttattttctgcttgctttttagtcaggctaacattgagaaccaggggcaataaataactcagaaatatgtgaaaatgagcaggcttaagaaaagggcacattttaggtggacagagtagagaatatggcaggagtgatcaaaaaaaatgaaagagaagccacatatttcatattgggacaataggaaaggtctttttttgggggggtcagacctatcaacggaaatcgccagggtataaaaatatgaagtcaccagagaaacttttatttcaaaagagagttctggaatgctgttctggacaagagctttctgggaaagggtttccctaaggtgagccacatccacatgtggaggtactcagaggccattgcaaccgtgggaaagggggcttggttacttctcaatctggtagcagaccataacaccatccatacagtgctgggtgtgcaagcatggtgaatgcaagggttctggtctacagaggctggctaggctcaggaaacaacaaagtggatgaatctagagagtaggtagcatgcagagaggactgcctggagctcaggtgtggagttgagggtgatgtcgaagttgcaatggagactatattgcagaggccatggacatctatcaaggaagctagaggtaacaagaagagctgcccccaagcctctatagcatctgtgctataaatcgtagggaatatgggtggggctgcccagcctattggaacttaaacaatgcttgtagtacaccccctagatgctggacatccagcatgggttgcttgccttgctggtctttagtcttgttctgctttggtcttctcttcctatgcctgcatttttcccttctggaaggaaatgtttactttgtgccattgtatattgaaagtatgtaactatatacaatgctttcaacaggtacagggcttacaactaagggcttaccttgaaactcagtagagactttatcctttcaaagtcaccactctgctccccttcttctgtctcctgtcatttcttctcaggatccattgttggactcctgtcttaaatatttatccccatggcccagcaatcatttctgaaaagttctgaaattcatatttccaatcaaacttctgatttaccttccactttccagacggtttcttcttcttcttcttcttcttcttcttcttcttcttcttcttcttcttcttcttcttcttcttcttcttcttcttcttcttcttcttcttcttcttcttcttctaaaagatttattttctgtatatgagtacattgtatgtagctatctccagacacaccagaagatggcattggattccattacagatggttgtgagccaccacgtggtagctggggattgaactcaggacctctggaagagcagtcagtgctcttaaccactgagccatctctccagcctgaaactgcttcttctattgtgtatgtctattacgcttgactcattccagtttgaacttaggaaggctgtcttgctgattgatgcttgcttgtgcttataatttagtaacaccattagtatatcctaacggtctttgctcccattatctgactcctccaataaactctcctaataatcagcttgggttgctgtaacaaaaggtcagactgggtgtcttacaccacaattttttaaagtatttatttatttgtgtagttttgcgtgagtgttttgcttgtatgtatgtatgtatgtatgtatgtatgtatgtgcactacatttgtgccctgcaatggtcaagaaagatatatggaactggagtcagatacaattaattgtgagttgtcatgtgggtgctgggaacctaatttgggtcctcagcaacagcagcaagtgctcttacctgctattccatcttcctcactttcaagatgaaggtccagcaggatttcttttctgttgaggattctctctggtttgtagatgatcaccttctgcacaataatgaaagatacatttctgaggtttattcatctttattttatgtgtattggtgtttagtctgtatgacagtcggtctctgtaccaaatgcctgcactgcctgtgaaggacagaagagggtgtcagatcccctggaactggagttacagaaggttgttgaccattattgagagtgctggaaacagaacgaggtggtctagtagagcagccagtgttcttagtgggtgagccattgctacagctctgagagacacacctttttataagaccatggctttattctgttaggttccggttccgcgctcatgattttatttcatcttgctgcactttgaaagtatcccttctaaactccagatatcatcaatattagaggattaaaagatgatgtcttcaagagtgtatttggctaaaatggcttcttcctgcttagtgggctttagtcccttacaacacagatgccataggtcatctggcagcttgcccctatgtttctctatggtgttggcaccaagcattcatctcctccagagggcgcaacggaaaggcctccatcagattctgtcagcttgatcataggttatatctccccttgaactttgaggaacacatttttgttgtttttataataactatcgtcaggtattcagtcatagtaacatgtggattaatgctcaccctaaagaccttacttttaaatacaatggcagtagcttaggacttcaacagacatgcattagtagtacacagctcagctcatagcagctcaatcttcatcttggatgtctcttaaatccagccccaggtcttcataactgcttctcttctttcaccaccatactcattaccatccatccctggttgccacatctttagctcttgttttagccataaagcttactccagcttagagcacagtcctttccacaatcatagtgctacctaggcccacagacaaatcccccatctccatcttatctttccttaacctattccgtagatgacctaacctgcccacactttgttcagctttatcggactataatgaatgcgtgttaagatgcctatatttttaggtataaaattaagtaagttttgaccttcatgtacatctatgaaaatatgtccacaagtaagaaaataaacataataaccaatgcccagaggtttttatgtccctttataatatatatctcctcttcttctatgttctcatccctgtcgctaggcaattaccgtggtgtaatatacacacactgtatagtacagtgtgtaactttttaggatttttccacaaatgaaatcaaactattttgtcttttattcatttattataatgattaccaatatttttgcatatcaatttttatgcttaaagaagattttcttctgattcttgagtactattactttttaaatttaaaatttaatatgtatgtgtgtgttttgcctgtatgcttgtctatgtacctcatgtgtgtctgttcctcacagagaccagaagagggtatcaaacaccttggaactggtgttacaaataggagtgagctgccaggtggttgctgacaattgaacctgggtcccttggaagagcagccagttctcttcactgttaagccatctctcaggtgccacatttctcttttatagctataccaaaatgttcttgttcatttctgagcagaaggtaagacaactcacttgaagggatactagttttctaaggctgctgtaacaggttagaacaatcttgaagtgttaaaagaacacagttcatcttctccccggcctgggagccagcgtctgaagtgaacgtgtcagcaggttgcacactcttcacaggccctgggatgtttccttggtggtcccttctcacgtttgctcttcattggtttgtgacttcatttctccaatctgtggccagttttacataatgtcacctatgcctttctgtgtctctctctcgaaagatgcttttggtggtattgaggaccaacgtaggaagacagcctcaacaaaagatgctttctttacctgcaaaactcccttttgtaactactcttaaggtagcagacataggctctgctgattggttaggatctttcttgaggtcgcatgtgagctcactaaaagatctccccaacccccagccttttccccagccttcttcctcaagacagaatctcactaagcagccacacctgtcttcaaacttgtgctccttggcctctcttcccaagtgctgggttacgggatcatgtcagctggtgaaggtttttttctcttctgtaccatcagtgagtggtacaacttttcatctgagcacaactttagctgcatcccatacatcttaatatgtggggtctctctataatttttttaaaaatatttattttatatatatgagtacactgtagctgtcttcagacacagcaaaagagagcattacagatgatcccattacagatggttgtgagcaccatgtggttgctggggattgaactcaggacctctggaagagcagtcagtgctcttaacctctgagccatctctccattcctatcacttttaataaataaattaagaagaactttaatcttgagaaacgtgttttaagaggctagcatgctccattctgtaattctgcactaaagttgatattcagaacttggggagtgttgttcaagaagtacttgaacaaataaatgaatacatgaatggatggatgaatgagtgaatgatgcatgaatgaattaatctgcgatcattgagtataggatgagttggagggaaaggtgtaggggtaattgatcaaaatacactgcatacatatgtttctcaaacaataaacaaaaatatacctttataccttagacttctaatcttactgttgccacaaaactaaaaatccctgggattcatcttcattatttttttagccagatctagctgtagagtctatactggcattaaacctgtgcttttactttcttagcctactgagtgctgggatctgctttctctgaagtcttttgacataatttatgtgatttgagactccttaatttttaaacatctgtggactttccagagatgctgtgactattaatcattaatttgattttattgtgatcagagagcttatttttttttttttttttggtctgaccagaatcttttcaaatttgcaggggatttgttcaatgtcccagaatatggcctatcttggggagacgtgtccatgcatttgcatagcacgtttacactgctgttgtggtacagagtgttctataactgtcatttgggtcagcttgcttcccaagttattcaagactttcagacacttgctgtaattctgcccacttgtttcatgagttattgagagggacgtagaaatcctcagctgtaattgtgagcttctcctctggtcttgtggttctaacagagccggctctgtctattttgtagttctttcatgggtcttataaacatttagaattgccggggcctcttgaattctgggttctattgctgtggaatgatgctgcttttctctcttctggcttaccgctttcagaagtcttttctctttgtaactatgaatatagagttcttttttacttttagactggaatatatttcttcctccttttatttttagaccatccacgtctgtataattggtgtgggttcttgcgagtagcatatagctgaactttgcttttacttatttattttgtctccttggcagtcttcgcctgtatacctgtgattggaatgcttagagcagttttgtttatgtgattaggcttagtgtgcatttgtagggggaggtgctgtgtacctagggccttggatgtgctaggcaaaggctctaccacggagctacatcctcagcactggtactgttgggttgaaacctgccatcttgctgtctctattttatctgagacaccacctagcttctcttgtcttgtcactatttaaaaaaaaaagatatttttaaaagatagtttcctgcaatttcttttagcttctgcaaaaattcttagtctagtttaggacacacacctttaaagtccacactctgaagagagacaggccaatctgtaagcttaagaccagcctggtctacatagtaaaaccttatcacaaacacaaacaaaataatataagaaacaaataaacaaaaacacaaattctaactttgctatttttgtggttgctttgatattgagtttgtcatagtctacctccaagtactatacctctccgtgtcgtactagaacctggcaaccacgcacctccatcttctcccttccatttttttttatattattgatgtcatatatcatacttctaaatataaactctacagcacatatttatcacctttattttccacagttagcctttttgtgtttcttttctaaaggtttgttttatttttatatctacacaaaaataccactccatatttactgtgtgcatatgcatatgtctgtgtggtggtgtgtgcatgtgagctcaagctcccacagtctgggagagggaacccgttttcctgatgcaggtggttgtgagccattggacatgggctctgggaactgaactgggatccttggtaagaccagaaaccagtcttaaccactgagccatctcaccagcccccacacttacctctcaaggatttctaagcactcgagtcttttatatcacataacttagtcactatgtcctgaatttccattcctgttgtaagcccttattttcttgttagagctattttctttctcctagaagaattacttttgagagtttttctgtgggttcccaagcacaatgctgagatcagtgagaaggaaggcagtgttatctgggtcatctgttagccctgcaagagtgccctcggtcacctctgtactgtcctccacacgtggctgcgctattgccccaaagagaaaggagatgagaatgcaaatggagaagaggctgctggtcctctctgtc

SEQ ID NO: 93 - DNA, 27739 bp, Homo sapiens
tagaaatagtcatgtgggcaatatatctctatggggttttcagatggctgcaacttcctaccctggatctctgctgctcttgggcaccacattcctgtccacccagccaagcctggtctgaggctgtgtccttagtcaggggagcctgtttccctttcccctggcagactaggtcctgtgggtcccagcgtcctcttcacctcctgccagttgtaggagttctgtcctcccattttgcggaaccagggagcctgtgggaggccttacctccactgccagccccacctcaccccagggcagattagtgcctctgagccactcaattatccgcaggatgggtggggggggggcggggaggggaatctagaatttatagctgggggtggaaggcgcagtgagggaggtacagggaggaagagtgaaatatttagatctttggggttcctgccatttggcccctattaaagagaaccctggggcttttagaatgagttttgcatgaaattgaacaagcagggccatgagctgtacagaatcccacctccaccccccaacatacacacaccttatttattggttcttctgagatcttcccagacgcaaaaactctttacaaggatatcaaaaaatacaacacctgcctacgaggcaccactttgaggaagctaataaattacccccctttgaaacaaaaatggaatcagcattaagcacatactattattaggttgagtttcagtctcctagaaaattcgttagatgttgatatctggggagagaaggaatctctcttttccttaagaaaattcacgagggaaacagcagtagttcgctggctttgtttggtttcgtttatttgtacaaagaaagattgtgcgttaagatcttttttaaaaatccctgcaagttagagtttgcatcatcgtcgtgacctagtgaactaatatttgtatattctgggatcgaaattccgaggaagtttctgctcttccgcacaccagacttgccggtgtggtctccaggaggggttgggggccgcgtcctcagggggcgcgcggccgaggctgttcccagcgcgggaacgggagggagaacctgggcaggggcggggcggggcggggcgcggggacctgggtacgcggagacgcggggcgggcgggggccgagagcgaggctgccggctgggtgttgggagagaggccgcgggtggacggggtaaggactgggactggggagactgagagctggggggtgcggggaggatgaggctgcggacaggaaacgaagggcctgggacagctgcttctcttggtcctagaaaccaaactttcgtagcgagagaccctaagacagctcgagatttcaagtgtccacacttctagtttagacatttggcaaccaattcggaacagccgggccgcgaggggcccccaggtctttggcggcgtcgttgggaggccgcggagttgtccctgggcttccctgaaggccccgcagactccccgccagtcccggccacacccagccagggctttgcagctccagcctgagaatgttagccccggcaaccccttctggcggttgttcctttaaaaaccaattcattttttccatcaagtcttctacccaatgggtagactcttcgttaaatgactgttaaccagtactgaggagaagcacaatcaacatagtttctctgtcacctttcttgccggttttttcctcccaaccatggagtctccattttctaagcaattaaattatatattcaacaggaacattccatttaaaatggttcgggacagaagactgatgcacaaggtctgaagctggaagaaaatatttagtgcttgcctacagattctgtcacccatcatctgctcggaatgcgctccgtatctttcagcgtgtccggctcttatgattgcaaatggccctgttttcaaatggaaataagacttgcaaactgattatgtgtattgaatcagaatcactcgctagatcctcttgtttaaaatgtattgaaaaaaggatgatgggtgcagacctctgtaaccagctctgtctcttctctgggaggtcgatctattttgcaactttttgccatttgagcgtgtttcagccagataattacgttgccattgtgttaccggcccaaagctcagacagggtacacacaccaccacccagccgtctcccaggccctccccactaggatcaccccctaaacaccacaggcacatgacacagtcatccaccaccatccccacctccccatcactgtgacccagctatatataaccagcacttctcagctgccacaaccgccctcagaagcccacacactttcaccaggaatagttgtttctgttttctcccagtatcctttccggccccctttctctcttctgtctttccaatgagcagaaccacatacacaacccccaaatagctttcacaggcacaccaccaatgcaatctaagtatttagccatgttgagaattttcaacaactaactgtgttgatgtggcattgtaattgttagaaaatggttaatacaggaaggttactgtgaacatgtttgtatgctaccacatacctcaaagggtttctctttctctttacccctacccagtgctaaatgatggccatgagtgggttggctttttgttaaatatttccaaaaactttttctgtttgatttcagtacgaagccaatggactatgtagatgtgtagagagatgtctgagttttatctattgcgtgagttgtaggtatgatacaatgcagcacttccaaagtttactgcacccaggtcgaggctcaggagtcctgtcagggaacagtgctgccagggagtagtaatcgacatttcagttaatactgccaggtcacagggcagtaacgaactagctacaatttctgtctgctgtggcttgaggtaggaatgtgtgctgtgtgcaccacggtggtttgacagttgcaattctttctgaagtagaatcagaagggaaggaagaagctgccactgcccagccccccaggcccttagtcccaccccaggccttgcagaccttgaggcaccatcaagtggccaggcagagagagagatttaatcctctgcggcttgagtctcctctagaagtctgtcgctgcaagtctgtttagagacctaatgctctggaagcgtctgttgggaccataactttgcgaggttcgctttacacataggcatatccagttccttagacattgactgggtctcctgggttgcggcagagcgtgcagtcagctcagaggaactagctctcggtcctcttagtgtcattatggtaattcacaggtttacttctgcgcgcgcgcactcagccccgtgtgtgctgctgagatcaggtaaatcagtagcacgcgggccaaataaagccttgttttcctagagctttggacttttagagcagcagcattaggagggagaatgctaggcaaggcagacgctaacctgttgtgggtcattttccatagactggatccagagcacagggacaggggaaggatatccaaagatacttggtggcctgatagctctgattttatataaatgaatgatcaacaatcaccaatactctagaaatagaatgtttgacactccaccaacagtctgctgttactagcagcaagatctaacaatcaaagaccggattccccagaaatgtgtgaaatagaggggaaaagggagaagaaaaaaaatttgtctttttccttgttgtcagacaacactcagacctgcattcttatttccactactatgtgaaggcttaaagtgtgaaatcaagaggacgtttgcaacaaatgcggagcagaaacagttttcatttgttcgttgctgttgttgccccagggcggtagtatttataccagtgatttttatagatggataatagaagttcggcaagggacaatttttttgttgttgttatagaatgtctcaaaaagtcttatccacagctgtgtctcagacaccaagttcaaattatttaggaataaattttaaaatttcctaaaacataattagttatccagagtttcacatgacaataaataaatattctgacttaaagtgggtaaaactaaagggttttggtctatttgaatttttcaaggaaactttttcatgagacaccttaattgaggtagtgaatttattcaatgttcttgcatctaacaggttctgtaaaatctctgagaattctatattacagtttttgaatatcttataaaatagatatatgtgtgtaagatagatacatatgtatatatacatgtgtataagagatacatatgtatatatacatgtgtataagagagatacatatgtatatatacatgtgtataagagagatacatatgtatatatacatgtgtataagagagatacatatgtatatatacatgtgtataagagagatacatatgtatatatacatgtgtataagagagatacatatgtatatatacatgtgtataagagagacacatatgtatatatacctctatacacacatacatatatacatagaaatctgtgtgcaatcacttacaaagtaggcagaatcagatgtggattttaggtgggaggcaagagttttctttaacaagtcctttgcctgccacatttatgttatgttttatttatatttcaggcagagcactaacagtgatcaatttatgttgaagggtcctgcaaataacaaaaatagataaaacaggaaaatgaatttaaatctcaccctttccaaaactttgctacaactcataataacaagggtaataaatgcttacgaagcagaggtcaaacgggaaacattagcaaacgaggagaggcgcaggagcccaggatcatgcctcgatgcccaccaagttgggcattaggtcactatcagagagaaatgcagccagccacttcagctatggcttcagctgaggcaaaagctgtgctgccaagttgctgaacctgctctttctccgttcctttgagattcattaaagaaagttcagaaacacaactacatgaggtgaggataagggcatatgcagacccccttcaataaaacttactttcatctactcccatccatatccaaatccctcagcttgggtggacaaactttccagagagggtgactgaaaataagatactccttctagaaacaactggccgaaggggcaccagaaaactttctatgctccaagttgaggtaagctaccaaattgggccccacagagggtggcctgaagtctcagaaacacagctgcacaaggaggaacgcgtcagccagaaggcagggagagccagaggaacatggtgtccagcgtctcctaaccaggatctagccgagcagagaaaacattcagcctcctccctcccaatacccgtgtctgtcactttctttccattcaaaaagaaagtcctagttgaactaaacaagccagtaacccatgcctaagaatcatatcatctcagattctcatctcccaatgggctttctagttctccacaaataaaatcgtctactctgcttcctcgcgctaataattggggggtggggagcagggaagggagagcgatgtctggagacatatgatcagaattcaaggcagcttctcacaactctcttgtttatagaaaatgaatgtctgcctggcttgcttttagttcagaaaaggggtcagtctttatcagcacggttcacacagatcctggattttttttcccttatcttaaattgacccgcttttaagataaagacataatagagaaagcattgaccttacctggtccctaatgagttggaagtcagaaaacccggctctcatttcctcttatctggatcgcctgagaagagactcgcgctaccttttgtgcactcgcgcctcgagatagcccctcactgacgcctggacgcggtgagcgcgctgaaggctgtgcggcctctaaagtctcagaattcctccctgcggcctcaaaattggagagttggattccagaccaagacactgtcactagagctccctagccctggcccaggaagatttaaaatcccttaaaatcccttagacttgctcccgagcaagtctttccctatgaaaggccaaactctaagcttcgtgaagaagcctcctacaaggacactggtctggagcgcccgggcctccgcgtctccaggagtgcgcgcccagagcgtttctagcggagactgcccaggcctggctcggatttcagtcgcggggccccaggctacttcccaccgggccagcagcagggccgagccgctgccctgttggctgaggcattccctgcccccacccccctcctggccttgaggaccgcagtgtgtacccttgttggtagcggcagcagcccgggatccctgtctcccctgctcagagcatctctgtctcgctcttctccccgcttctgagcttggcccagtccctgaccccctcgctagctgagagagctgctttccttcctctcctgcccacagctcccagttcccaggctggggccagggtggggagcagctttgggatgctaaacatcaaaaaagcccagcctggggtttcagggcccgaagccactagagcggctctccaaggctctcgagaaagtcctagtgtttacatggcgaagtgggggtggggagaggaggaaggggggtgcagtgtgcaaaatctcccccactcctctcagccgttggggcctagggatgggtagggtactttggcggaggcaaagcttcgcggtgatctcggggtgaaccgtacttgctcccaaacctcggaagcttccaagcacctcagcgccaggggcatcctcagaatgctgatttctccgagaggggaggccagaaattgggcacgagttgatgcaggagattcccagaaaggaggactgtcggctttccagaagccgacggtgctgtaggggcggagggtgtccccaggttgcggaaccctcttgcactgctcccagcgcgcacctatttccctaatgaaacgcttcagattgcgttctaggtctcttcccgcagctgcgacaattcccccagccgggagcgggagcggatggagccagcgtaattgatggcaagaaagaggctgaggtcctgtttgtctcggtccgcaaacccgattgagttcacctttccccgggacaagtaaacagacttcaaactatgccgactgtagacggcgaggagaagaatgtatttgatggaaactccatccaatgcaaagatgataaggccgagggtgccacagcctactaaaattgtgactcccaaaggcttcctcccagctagaatggggtgcggggcagccgccagaaccacagccgggcaccgccagccaggtccccgcccgggcttgggctaggctggggcaggttaagcgaagctccaattccgtgggatccggacctagagccaaacagcagctgcagtatccatgtcccctgcccggccggcctgagctgggtgccttagccacctacactcccggtcccggaaccacagctgaccattccaacgcaagtggtcaaatttgtttgttttccaaaacgtgagacctgttaaaatctcccttccccgccttccaacaagcactctcactagacccaaccatcctcttgggaatcttcgagtccctctggctgttggaaactgtgtctcagcagtgaggcccaggtttctgagggagaaagcccggcctagcccacagtcttaaggcaccacgccagaggaggctccaggaagttaacaaagaggactgctgggcccggagcgaggactccggccagtctgctttcctcacaagctcttggtgggggagcgggagagagggattgggaagagatgcagacgaataacgaaatgagagaggggaagagaggaagaaaaagaaagttgaaaacctgggcgagaagtgagtacatgccaaataagaatcaattgcccataatccaatacttccaggcctagaggaaagtgctgggaggggcgtctgcccgcagctggctcagctgcctttcgaccggagatttggcaagggtgacccggaagggctacagcccatccaggggactacaatttttctgtgttcaaaaccattccttctcccctctctctcatccctaatgggtctcccaacacaaacactgagcgctgaggaaaccaggaaattagaggttggaagaaaggaatcaaaaatgatttattatttatttattttttttgcttggcgtgggaggtagtggctgggaggtgaagaactgtaaacaggagaaagattcattactacaaaaatttaggatcccagagataaaacccagtacaacaaagagtgaaatctcagctcccaaagtccttcctgggatgtcctcaggcctgtcacccagtgttaccccgttggaggccaaaggagccaaaagcagcaggggctgaaggcgtctgctgctggtcccctagaggggtccctgttttaggacagaaacaaaacccctgaatgacttccttactttcgaaaacagcctcccatcgaattctgtgaaggagctcagccactgattagaaataaaggtttgatgttcaaatctacagaggtgatccattcactgaaaaccataactcactcagactgatttaaaatgggtgtcctctctcactgttttaaaactttggctcagctttgtgagaccacagtagacagttctgagactcctatcaacagaagtctgactcagaaaatgaattatttggtctctttctcttcctctctccctctccctcttggtggaagtagtttggtatttcggtcctccactgcagtctcaggactgctcaagatttgtttccacacaatttctgaggcagaacaaaactccctcttcctgtggggcaaggactctgggcctggcctccttacctccttaaccggttcagaatcctttgagctcaaacccaaacaatttgaatctcatcagaccaaagacaagatcctcccaagcccccgcccctcaaagccatttaaagccaaatcaaaacaaaacaaaaaggagggttttaatcagaaaaagaatctttttaatttgtataatttattagaagcttcttaggaactatatttaagccaaatatctacataagttacaacagaaaaagactgacgccgcaaataccaaactgccaaataatatacacagatttgtcaatgcccataaaaaatgtgaagggctggggactgggagtggtttttctttttacaacaaaatgtacagattactaaaaactaggcatttagtccaacttttgacagcgttttacagctacaagttcacattaaacaaactattttcgcggagggcggtcgccgctgagcctaggcggccagagggtgccggggagggggcacttcctttgtgtcagtgacaagtgggttatgttgaagactctttcctctccccagctcccgtcctcccttcaaaaaaaaaaaaaaatcctggtatttacaagcgagtcctctttgctggcagagtgtgcccagagtgaagtttggtctttagagtccagagccatgtcagcacagagccctctccaatctgtgccccgccctagcgtggaaaacccatttgaatcaccaaaaaaagacaccccaaagctgttttatgcccttctctgcttaaagattccttgagattggatgcgcttggttgtttttcattttctttttttaaaaaaaaaaacccacaaattttagggggggaaaaaaagaaagacgtccagcagtttggcctttgtggtttttttgttccttggtctaaacgcggccaggttgttaagaaaagtcgaagcgcgtggagcagcggtggatggtggtctgtgtggcgggcaggagggaagcggtgaggcagagcgctgggctagggccggcccggcgtcctctcaccaggtccgaccgtatagcaaggtggagcaggacatggtgccgtagtccgagcccgaggagttcaggtgggacaggctggatacctggccctgcagcgccgcggggctggcggcgtggtgcgccaggtccggagactggcctgcgctgcctggctggtggcccgggtgtgcgccaaggccggcgccaccgctgcccacggagatggccgctgccgccgcctgcgcggcctgcgcctggtgctgcgcctgctgctgcgcgtggccttgtaggctggcggcgcccggcgcgggggcacccgcctggcacggtttgccgtctttcaccaggaccggcaccgccacgcgtcgcggcgactgctgctgagcctgttgctgctgcgggcacccggtgcccccgccgcccccgccgccgccgctgtcctgctgcagttgctgctgcgccgccttgtccttggcctggcgcttcattttgtagcggtggttctggaaccagatcttgacctgcgtgggcgtcaggtggatcatgctggccaggtgctcgcgctccggcgccgacaggtacttctgttgcttgaagcgtcgctccagctcgtacacctgcgcctgcgagaagagcacccggcgcttcctgcgcggcgcgcttggcagcggggccatgttcttgctcacgtcccccagcgagcccaggccgcccatgccgctcatgttcatgccgctcgccgggcccatgaagcgggagactgtaagcgacaaacgcacagcgtcggccggggccaggccgagccaggccacccctgttttccgcgccattggcccgcccggcccgccccaaccgacggcgccctcctgacccaggcagcctagcgctggggcccaagaggcccatccgcggggaactgccagcgcctgccccaggccgtaccgtcgagggggctgtactggagcgctcacagccccaaccctggctgccctccctcagtctcagttccctctttcgaaccaaaagacgcagtgggggaaaggccgcttctgctcctttcgtgcccagcccgggtcagagcattaggattagctggccacaggcggcgaactgggctcaggccgggagctggggtcctacggtagaccccagtttggagaggttaggagagggggtgttgacttccaaaagctggagcccccagacgctttgcctcttggcttctctcctgtcaggccccagtgagggcacctgctcggacccttagagtcccctctggaactgcgagtcctcccacctgcccagactccgctggagagagggccgggccgggcgctcgagtgcctcccaacagggcagcctccctcctggcccggtctagcctctccgcgctctgctcgcccctgctccttgagctcggggtcgcttcccttggctccccgaggtcttctgcgccgagcagagctgccagtccaccgcgcctaggagacgccgagtacccgcatctgaccgcaggaccccagcgctaccaagtgcctgttcttggacccccagccgagcagggggaagcatccccagctcccgcacccaagtccctggcgccgctgccgggccgccctccctgatgcccagcgcgcagcctgccggcgccgcgccttctggacggctctcgccgcacctcctgagctcagcccgcggccccgcagtggggcggcctcacttactggcggggaagcgcgggtctgggttggcgccgtaccatccggggccagaggcgctgttcctcatggtgtcctggtacggcggcagctcgctcatgttgcccaggttgccgttgcagtagccccccacggcggagtgcgagagctggggcacccccgccgccgtcatgtggtaggcggcggtgacggcgccgtggtgccccacggcgtgctgctgcatggccgctgttggcggtgccgcctggccctgcctgtacgccgccagcggagccccgaggccgccgccctccatgcccactttcttgtagctttcctccaggggactcaagatgtcagacactgagaacggagtcgtgtgctttggactcatcgacatgattcggcggcggctggaggaggaaggaagaggaggaaaaaaaagggagagggggaaggcgaagcctcgctgctttttttttctccctttgccaaatattctggtgttaccttaacgccgatcttgttggatgtacacgtaacggagtggaccgagtcctccttaattggcttgagtggaggctcgggggctgcctcgcgtttgttttagcccggcgccaggttttaggcagccaccagaggcggggcgtaagcgctaaagcaacaagacaatagaagcctacatcttgcccgagataattagcttacatgctgatgacaaggtaaacacctttaagtttcacttgtcaggatttttaggtctcaaagagagagagagagaggcagagacgagacccaaagcatttcccccctcccttggacacccccacccccattttttgtggggtaccagcggagcgcggggaggaggtggaggggaggggaaggaggagggaaccgagagcggggagggcaggaggtggggtgggggagtaacagaggaggagagatggttgagaggaaggaaggtgaatgctgctttgcaaccaacttgcggagttacaaagtggaaccactttccaattcggtcggggttccccgggcacggacaggtctttaggaggagggggctgagggacagggtgggggtttcacctgagcctgccggggctgctcctccctcccgccgcggcctcccagccccgcgccttcccactgcctccggaccacatcgggcttcgctgcgctgagccccagtcgccaacaaatgagcgagcgagtctggggacgaaccctggggccgcactgttggtctacgtgtctgtcagtctgtctgcctctcttctgccgccgtcagagggacacctctgctccccgccccctttccccctaccggagagaatccgagcgggcggagggggcgctgagtaggggatcgactgcctcccggaggctgtcccggatccccgagccacaacccgcccccgcagctcaggggtttttcagtgggccacccccgctaacacgcctcccccaaggtcttccccccccccccccacccccggccgagcaaacacagcactggcccccagagctgggaggatgggaaggggtctcacgggagggtccgtcactgaagttgccccacctcgaacaaacctggtgtccctgaccctcgcccatctcccagacacgcggggatctggggctggagctgactttccgaggacatcacagccccagcacccgagcccagagccacgctgttttcccctctgatgcttcagggagcgcgcgagcagggagcggcgtgagtgcccgtctgtctgttgccgggcggaactgagcctgaaccccggcggctggagcgctggccaggagggggcgaatgccgaggtgcgggcagctcagcgggcgggaggctgggccgaggctcgcctccgcccgcagctcagccatgcaaaagtgctcttgcttcccgggaataaccaaatatctttgtttaaagtggtggcgtaaatggccagtcgctttgtggccacgctggatattagtagatgaggatcattctgcttcaattgggcgcctctcatccgacgagcaagaaactgcttaggaggaagagggtttcctgtctgcgcgttcccaggcttcaagtgtgggccccgcgccttgagggtccttgggcgcctggcgagggggagctgtgggctgcgctccccagcggaatcgggggtgtcccccgcgttgctccggccaggccggggcctgcagccgagtcgactaccgagtggagcactgaacggcgcggattttgagaccgactccggtttttgtccttggattttaaacgtttttatcattgtttttgttttgctttctccttagctgttttagtctcctctgcgcgccaggggctgggagggcggagcgctccccggccggccccggcaggtgcctccaagacacccgcgctggtcaaggagcttcttgaatttagtttttgttttcacattttctttcccctccttgtagagaaggagctcctgatcatgacgaacaggcagttttgagctacttaattcatccgggctccctttttttattaatagcaattacagtagagaaagttttatttatttttaaagatttcagccctctccttgaagagagctcttactccctcaatacaaagccaacttctataataacattcgcttttctcaccgcctaccttctttaccagggtaaagaaagctcaggacaccctccgccctcccacctgcgcccgcgtttttgtgcggtccccacggcagagctggggaggccaccctacgtttgcgcagggagacgcgctcgccgctggtgttgcgaaagaccagagcgaagcccggctccttgcccttccttcccaggggcttctctggggggcgctctcaggccccgacgaactgagcattgatcactgtggtggctaagcaaggaggggaggcgacgccgggcttaagcgaaccacagaggagaactggcaacgctgaatacagaccttgtctgcaggcgcgacctggccgggcctgagtcccgaatggggtctaattgcgaaggcggggtgggtttcccagtcacccagcttctttctctcactcgccattatttcatagttgtttgtaagtttaaggaacaccaagtgtagaatgttgtacatctcttccagtctcaacgccatttagaaatggagatcaatcttcacaaggtttttgtgagattcaagtaagatgaagcacatcaaaatgctttgaaagctttgaatgtttttcagctcagtgccagcactggagattgcggtagttattatcatgactatccccaccccctcttaggtcccaagacctgagtaaaaggaagagttgggtgaatcttccacagcccctaggtcctgtcttctcggccttcgtcccttggcagcttttcaacctctcagcaggccacaggcgcacgtggctggcagctccccggcctccggctctgacagtccgggggcaaccaggcctgcagttctcgaggaaacccccagccccccacgtctcgttctggaccaggaaccccctccccaacaaccgcgcagcaagtggcgactctgggagctgaactggagtggagctcgaagtggctggggcgggcaaagactcccgcttcactctgggacacaactgggacggcgcttcaacctctgcctgcaggcgtgcttctcgcgcgcaccagcaagctctctatccacctcgcctgggcctttgcagcgccctgccgcccaggctccagcgcctctactaccctagccccttctcaacacgcggctctgccttcttccccagtaccactgcactgccgaaaataagcccggagactaacgcaccttgtagggaagagaaggacatctgtatctccaagcttatccaagcaaaggcctccagagtccctcccatggcccgaaacacctccctctgaccgaagagcgtcctttctttccgccgcctcctggactcatcctaaatagggcagacccgggctaaaccagtgatttttttttccatgaatacgaagaaccccgattgcactttgcgaagtctgcgcgtattcctttatcccgcaactagcttgctcccgggtggagtgggcacagtggggagcggtcagggcagggcagggcccaacgctggcccctcgcggagctttccctggcgcgacctcacacggtcgctgcctctattccgaccacgctctgcttcgctggctgcggctccgccaggaatccgagggggcgcaggcccaggctcggccctagatgcgcggaatcgccatcagcctttgcttacaccagcgtggccgcagggaaactcctttctctccctccagtgtcactttgcgagacaagaacagagggctcatacaaaagaaggctaatttggggtctgtagcttggaccaggtggaactgtgaggaggaaccacctgtctcaccgccccaccccccaactgctttttctaactccctttgtggtcctccacacctgtttagggcgctgagccactctgtctcctggtagtgttattttgctccaagttttatcgcaatttttgattcactcgacagtatttattcagctagggctctgtgccagggactacgcaaggcctgaaaattcaaacttaatctagatgcagctcctactcacacggaacttacacattcacaataaatcacccaaataatatgtagttactttctgacagatgttactctaggatccagtgagatagagagggttgtaatggagattcgtgtgtgggtttttgcaccatttcttgatctctcagcattccaaggtcgtgagaggagtccttgagtggaagtccgtcctaggtttgaaccctggctttgcctttttccagctgtgcagtaccgctcttgtgggctcccgccacaccctggagtcactcccatcacagccagagtaaaccagtgtgtgttttctggcttccctccttgagggtgagcccctgttttatctatctttgaaccccccagtgcctcgagaaacgctgaggaaacacagcctccgagcacctgtttcctgagctgtaaaaaatggtcacaacctgccctgtgtactggcttggtttgtgctagggatccaaacaattcaggatgagatcatgtgcctgagtttgtagatcacaaaagtcgctaatagaaggagttattccttctgattctgtattttggatttagagaaactgtgactctaggcctctgaccttcaacaagaaacacttgggcccctcagttgctcccgcagtctcccacagctaggcacaggcttctaagccgggctgagctgggctcgcgagtgccatcgaggcaaccaggcgcagggagcggaaggcaggagtgtaactgggcgctggggggcgctgctccgcaaccccaagatccgaggaatgcctccgggggatgatttctctggaggggtctcgcagggccccctctgcgctgctttctcaggcaccagaaccgaaatcctcgggagggaccgcgggagcccggggcgtgcagacaggcggctttcacagacgcagcgggaggaaggatccctctactgctccctttcccgatttgaccgtctagggcctttgagaggactttccttttgggaaagcttttctcaattcgtggcctgtgggcaggctggggggtggggcgccaagtcatccgagcgcggcttctgcttctccctttccctcacaggcatgctctacggagggtatgggaggcgagggcgcgtctatgagggccagagtccgcgaagagagtccggcccttaggcctttggtgttgaagaatctgctcctctgtcgggtcaagccccactagaagttaacacctgtggtctccaaacttgcctattttcctgtcacgcagttcaagccaagattcaactcgtcttgaatttttgtatttagagcccctaccttctccaccgactccaggggcgccctctggcgggaaggggcctggggtaggagggaacctgagggagcgggttacaaagcagagaacagcgggagctcagcagctccctttgaattgcgaggaaaccaagacggagacgggaggtaggagcacgggcctgaagcggtcagccgaccctgtgaggcccgcgctgccgtgctacgccgcgaatccgccagacgcccccgtcggaaggggcagggacaccctcgggggcgctctagggttcgtgctgcgctaaggtaagtttcgcagctgctcctgataattaaaggacagattcccgaagcatccttgtggcggcgcggctgttttcgccccaggacctgtgcagcctcattcagctttaggtagtcgaaacctatagctctttctgccctctgttccccaacaaatctcagtcccaacagtgggagcccgtgggccttgggtgttcgagtttcccgcgggcttgccagcagcgctggggttccctcctccgctcctttcctcctctccaacctcccaccacagcccgtctcccccacatccccaacacttgtcccaggcagtttccggtggccgcagtatcgaccccaggccattggggtgggtgtgagggaagggtggagggggaatctccgaggcccaatgttttctgggacttgagggaggctgaattctccctcgctgcctaggacttggggtctgaaggttgcagaccgaggcgatccgcagcgccctcttccggcggccgtctggagaactgcagctttagagcggtctcggggaagctttgctactagtttccggctagggaaaactggtggtggtcggagactggtagtacatcatccacgcattcgctcattctaactgtccgcccgaccatacgtcaggctgtctatcggtccacccaaagccaatataagttatgattgactctttgaatcacccagtctccttgcacctgctatttgaaagagcccaggtgtagatcagggcttggaagctgctcttgtacctaaaaccctcttttaattatgctttgcttcggaattttgttatgcgaatgtcctgtccaagtcagagggcatttggaggcatatttggtgaccaatggagtagcttgcactttctgcatgtcctttctggaggaggcagtggccctattagcttgacagcctgacacaagggggttctgccttgtgttgcagcagtaggagcataacctttagaaaatattggagtaggaaaacttctgggactagctacactcgatgggtgccttccagctctccaatctacggtaccaactcactcaggcaggctttcccccaaattattcccccttctttggactctggtcaaaaccagatcctctccaccctcccaaacccatcccagccaatatgcccatgttactctgctattctttttcacttagccagaaaaatcattctttccagccccacaactaagtcatatccttctctttaaaaatccaattgcctcttctgacaactaaatgcctgacacatagtgggagctcaatatatgtgtgcagaataaatggatgaatctctattacacttttctgttacattgataagcaatttcttaattgagtgatttcctaattgccatgtgtttgtgttctttttaggcagaccgtaagctccttattttctgttttttgttgttttgttttttccccccaagacagggtctctctctgttgcccaggccagagtatagcggtgtaatcatagctcactgccacctcaaactcctaggctcaagcaatcctccctgctcggtctcccaaagtgctggaattacgggcatgagccatcgtgcccgtccagctccttgattttaacagccatctcaaaaacacttagacatgttcctagaaatgtgcccagtgctctgaggcatttgataatgttaatcacccctttctaaaattctctcattggctgcagagtcaccactctatcatggttctcttcctccatctctggacatttcttctcagagactagggttgaattcccatcctgcactgtatacccatccccgtggcttcagctgccacctgttgctgatggctcctaaatccatacctctagccaacctctcttcagagcttccaatctatattttcagttgtttacctccttatgtgaatttctgccaaacaacatatccaaatctgaacttacactgtcccaatttgcttcttgtcctgtgttcttgatctaggtgaatggcatgaacatctcccaattcctgccaccccactccttcaccaagctcctgtgctagtcagttctgtctgccataacaaaacaccacagaccgggtggcttacacaatgaaaattggttttcttacagttctggaggctgcaacgtccaatatcaaagcctagcaggatttatttgctggtgagggcactcttaactggcttgcagagagacgccttctccatatgtctttgcatagcaaagagagatctttttctatataagccacagtcctaatagattagagccccacccttatgacttcttttaaccttaataaccttctgctagggtttgcatgtgtgccatccaaaattccagtgttgccaatgcgatagtattaagaggtgcagcctttaagatgtgattaggtcatgagggatcctccttccttaatgagattaaggatcttataaaagaggcttcacgaaacatttggctagcttgcagtcttgctcttctcccatgtgaggacacagtgttcctccctacaaggcccttaccaggtaccagcgtcttgaccttggacttccgagcctccagaactgtgagaaataaatttctgtcgtttttaaactactcagtttcagctactctgttatatcagcacaaatggactaagataccttctaaagatcctatctccagatagagtaacactgggggagggggggttaggacttcaacatctgaattttaggggaacacaattcaatgcctgctcagaagccaaatacctcgatatcaaccttttcctctccctcatccaactggtcataaagtcatttccattccacatcttagatgtttcccaaatccagccccacttcttcctcaccagttctctccattcactgcctcaaccgaggccatccatcatctaatacctaattgtctagttcttattcctaccctaggctctcccagtctagtccacaatcctgtccacaggacatagtccaacctatctctccaaactaatttcttcctgcctccctgcctaccccctcataacctactttttagctactctaaacttctcacttttttcattttgtacaactttattaaagtataactgagagagagagtgagagggagttgttgtgtgtttttttgttttgttttgttttgttttttgagatgcagtcttgctttgtcacccagactggagtacagtgaccagatcataagtccctgcagccttgaactactgggctcaagagatcctccttccccagcctcctgaatggtgggactacaggtgcacacaaccatgcacagtccagtttaaaattttttttttttgtagagacagggtctcactatgttgttcaggctggtttcaaacttctagcctcaagcaatcctcccacctcagcctcctaaagcactgggattacacgtgtgaattactgtgcccagcttgattttctatattgtttttctgtttttcatttcaatgatttctggtctcatttctgtttcttttattctactaacattgtgtttaatttgctcttctttttctagtttcttaacatataagctgaggtcattgatttgaggctacactagcttcctatggctgttgtaacaaattaccacaaactcagaggcttaaagatcaggaatgtattctctcacagttatgggagctagaagtctgaaatcaaggtgtccgcagattgtactctctccagaggctctggggagattctgttccttgcttcttccagcttctggaggcttttggcattcattggcttgtgacacatttctccaatctgtctccatttccacatggccttctttgtatgtgtttctctttgtctcttataaagatgctgtgatgacactgaagttccactcagataatccagggtgatctcatctcaagattctcaattatatctgcaaagactctttttccaaataaggtaacattcaaaggttctagtgattaggatgtggacttatctttccagaagccacaattcagtccacacagagacctttcttcttttctaaacaggcatttactactcagaatttccctctaagcactactttagctgcatcccacacatttttataggttatgttttcagtttcattttcaagtcagtgaaaacatgttcaaattccccttttgatgccttctttgactcttgagttatagagacttatgttctttaatttctaaatggtggttttctagagatcttgctgctattggttgctaatttgattctgttgtgatcaaggtacttggtatgacaggaatcctttcaaatttattgaggcttgtttaatggcccagaaaatgatctgtcttggtggatgtatatgcacatttgaaaggaatgcttgctctgctgttgttgagtggagtgtgtataaatgtcaattcggtcaacttgttccatagtgttattcaagtcttccatgcccttcttgttattctgtctacttattgagagagacatgttgaaatcttcatctataattgtgagtttcactattctccttatagttctatcagcttttgcttcatgtattttgaagatctgttactaggttcataaacacttaggattgttatgtcctcttgaattcaatattttatcattatgaaatgatctcttttttatctctgctaatattccatgttctgaagtctttttctgattatttagaccagtttcatttaatatggttattgatatgttgagtttaaatatactatcttgctgtttgtgttctatttgagacttcaactatgtcttccttttcctctttttatgcctttttttggggtattgagtgttttctacaatttcattatatctccttttttgcatattagcaaaacattttcatgtgttgttttagtggttgctttgagatttaatttagcatcacagtctactttcaaattatactataccacctcatgtataatagaagatccttacaactgcacacttttattattttctcttctggtttttgtgctattgtcttatattttacttctaaatatatccacaataaatgtttattatttttgtcttacacagtcagtaatcttttaaagagatgtaaatagtaaaaaaaattcttttatatttcacacatagttactatttctggtgctcttcactcctttgtgtaggttcatatttccatctagtattattttcttacaaagaatttcttttcaacatttcttatagtactggtgtgatgttgattaattctttcagctttgcctgtctttatttcatcctcattttgcaaagatattttcattaggtatagaattataggttcacaatgtttctgggttttctacccccagcactttgaagatgttgtcccagtgttttctggctgaaattgtttccagggacagcacaaaagtgtggagcactgggagggcttcacctctacctcaacagtcttcacaaactctctctaatctctgatatggaaaattaatttttagtaggttgtgtaagtgaagttttatagccctgcttcccatctgcctaaatggcacacaagattgttttccatcgccatatcctcactgtacatggaaattctggaactcccaccaattgcttccagagcagcggcacatgtcagagttagacattctatcatcccaattttgagccctttccaggatataactgccattattaaatggttattttttcttacctaagactttttaaaatgatccatgaagatgtactcttttgaggatgcaaggagagaattacagcatatgtttttaagaggttaccttgtgcttaattgaagttattcattaaagtcttacaaactatgtcttaggagaacatagaatttcagaccaatagtaagaaatgcattagcctgggccttttgagaccaaagcttggggaacactcttagataaaggaatagtcttggctggacccttccttctggcaagatacattccaggcattttggcattcatattacaagagaaaggtaatatattccctatttttatagatgaggaaaccgaagcccagaaaggttaagtaaattgctgaagatcacatggctagtaagtagtagaactaagttttgattgtcaacatgtcatattccaaaccacaagaggagtcattgcctaaataatcagacctttaaagaattgtctacctatcccccattcaacatcttgaaattttatagttattttgacagcaagatagttcaaatatctactcatctgcttggggagtttctttgtattactcccttgtctagctccgtagatgtcaaactttaatgtggacaaaaattattctatcaaagtataatctcaaattttgttaccatttcatcagttttctagggtacttttggtattattaaattttaccttaaggagtgtcatattttaaacgtaacaactaattgttatggaaccacactgtattatttccactatattcaatgcttctctaattttcaacaaatagtttccagtccttttggaaaaatgtagtaataaggaaaacactgtgggtaagagtatatttaccaagtttatatgactttattttagatttcagggagtgtgattaatgaacctgaagagtttaaattcttgttcgtagtgaggaagatgacttctcaaaagacaaagttaagcatggaagtttaatctaagacagcacctgtcaaactttggagtgcataagtataacccaaaaagcttgttttaagtgtatattcttgaatgggtgttctgagtccagtaataaaaagtacattatctgactatgcctttttcagataataatgataaactctggacaatacacacacacacacacacaaacacacacacaattatttgaaggcaccagaaagtggtcaaaagaagaaagaaactgaagaagtttctagtcataaatggaactactcactgggtaagaattaaacttacaaggatattctactgaggacaatactcataccacagagcacagggcaaatagaaggtgagcgaaaaaatccagtgttttttatttgaagtgtgagaggatggagtcaggggctgaaagaatatctgaaagattaaggtagggaactcctagaacagaggaatctagagactctaaaatgtatttttcacaatggcagattaaaataaaaaattactaggcatgtgaagacatagaagataatttccaaaatcagaagagaatgcagtcaatagaagcaaatctccaggtttggaattagcagaaaagtacatttaaagaggtatatatatatatatattcgaagacaaattaaaatatgtcaataactgaacaaattggggaactctatcagagaaatggaagctattttaaaaatgaattgaaaattctctaaagagctatagcgtctgaaatggaaaagaaaaatctctgggatgagctgaaagaagattggcgacagcagaagagccaacttgaatatagaatttatccagtctgagaagcagaaggaataaaaattaaaaacaaaaacagccccagtgatctgtgggacaatatcaaatgatcagaaacataaagcaaatttattttatgccctattagatcattaaacacgcagagatcggtcgggcgcggtggctcactcctgtaatcccaacactttgggaggctgaggcgggcggatcacctgaggtcaggcgttccagaccagcctggccaacatggcgaaaccctgtctctactaaaaatacaaaaattagccgggcatgatggtgcatgtctgtaatcccagctactcgggaggctgaggcaggagaatcgcttgaactcaggaggcggaggttgcagtgagcagagatggcgccattgcactctagcctgaatgacaagagtgaaactctgtcccaaaaaaagaaaaaaaacatgcagagatgaattttacatttataaattatttgtatctttcagtgaatattattattgttgttcgcatggccatcaaaatttttacctctgaataaaggcatttcttaacattggattggttatagcgtggaagaaattcaatcactccaccaatgttgtggcaaatacctcaaaagcacgatcagtcctatcatttatggctgccttggttaagcttcaagaataaaacttaacacacttctagacaatatacctcaaaagagattcttctacttgcttcactagctaaccaaacagaaatcattattgcttggcttggcttctccttccagcagaaaattaatcaacacctttgttaaatatgctgtatagatttctcttttttctgggggagtggggacactgttgttaaagtaagtcatctcaccttgtttttcagcttcctttagttgaatctcatatttttgaaattcatgaaatgcttctttcatcagtttgtctagatctactttttgtcttgaaagtccaactaagaattttgttttcagtataacggatataaccattagtaactccacagcgatctgtctgtatctatatattactagctagttaatatttcccaacatatcttaaacaagagaaagaaattcatagaagccagacactcctccaattatattctcttcatatatgattgtatctcacaggttggttgctatggtatttgattcctagttaccatgatactattaagtgtttgctgcagaatctgccatgcttggtcacagaactcagtgaaagttctattaaaagacttatcaatttgatgcctgttcagtcaacgtcttccattttgttgaggctggagaacctccaacagaagttaagcaaagttcagtaggtattaagctgggtcctgcttaaactggtggactttatcaacctgatgcatgcaacagaaaggaacaactctcatacattttaaagctgggctcatgggtccttcctggtcatcattaatgagcctttatgtgaaagttaaagcccaagccctagaagcacagtataggttgtactttatcttgatattctggtcagcatcacatgatttaatgggaaaaagacctgtggttggactttgaaactgcagcaatgttgagttgacagttatttcaaaatgatccagtttattccacacagtgtttaattatcagatcttggaagattaattattttaagagactcgtaaactgagatagaccttaagaaattagataaagaggatataactccatcaagtgagctggcaatgccaaattagtgaatctaatcataagcatcacaagctaaacttaatggttggcctggaaagtctctgttccagaaacctccaaggtcactttggacgtgaataccacactcctaccattgtactcagtttactgccttgacatttgattcttatttaattttttttttttttatagatggaatctcaccatgttgccaaggctggtcttgaactcctgttgtttttcaacttcctttagttgaatctcatatttttgaaattcatgaaaaatgaatttcatgaattcatgttttaattcatttcactcaagtgatcctcctgcctcagcttcctgagtaactgagactacaggcatgtgtcaccattccaggccacttggttccttttatagtttctatttcttcatttattacaagcatattttcctttatgtcctttgagcatagttataatgcagctttaaaattcttgtttgcta

SEQ ID NO: 94 - DNA, 27739 bp, Homo sapiens
tagcaaacaagaattttaaagctgcattataactatgctcaaaggacataaaggaaaatatgcttgtaataaatgaagaaatagaaactataaaaggaaccaagtggcctggaatggtgacacatgcctgtagtctcagttactcaggaagctgaggcaggaggatcacttgagtgaaatgaattaaaacatgaattcatgaaattcatttttcatgaatttcaaaaatatgagattcaactaaaggaagttgaaaaacaacaggagttcaagaccagccttggcaacatggtgagattccatctataaaaaaaaaaaaaattaaataagaatcaaatgtcaaggcagtaaactgagtacaatggtaggagtgtggtattcacgtccaaagtgaccttggaggtttctggaacagagactttccaggccaaccattaagtttagcttgtgatgcttatgattagattcactaatttggcattgccagctcacttgatggagttatatcctctttatctaatttcttaaggtctatctcagtttacgagtctcttaaaataattaatcttccaagatctgataattaaacactgtgtggaataaactggatcattttgaaataactgtcaactcaacattgctgcagtttcaaagtccaaccacaggtctttttcccattaaatcatgtgatgctgaccagaatatcaagataaagtacaacctatactgtgcttctagggcttgggctttaactttcacataaaggctcattaatgatgaccaggaaggacccatgagcccagctttaaaatgtatgagagttgttcctttctgttgcatgcatcaggttgataaagtccaccagtttaagcaggacccagcttaatacctactgaactttgcttaacttctgttggaggttctccagcctcaacaaaatggaagacgttgactgaacaggcatcaaattgataagtcttttaatagaactttcactgagttctgtgaccaagcatggcagattctgcagcaaacacttaatagtatcatggtaactaggaatcaaataccatagcaaccaacctgtgagatacaatcatatatgaagagaatataattggaggagtgtctggcttctatgaatttctttctcttgtttaagatatgttgggaaatattaactagctagtaatatatagatacagacagatcgctgtggagttactaatggttatatccgttatactgaaaacaaaattcttagttggactttcaagacaaaaagtagatctagacaaactgatgaaagaagcatttcatgaatttcaaaaatatgagattcaactaaaggaagctgaaaaacaaggtgagatgacttactttaacaacagtgtccccactcccccagaaaaaagagaaatctatacagcatatttaacaaaggtgttgattaattttctgctggaaggagaagccaagccaagcaataatgatttctgtttggttagctagtgaagcaagtagaagaatctcttttgaggtatattgtctagaagtgtgttaagttttattcttgaagcttaaccaaggcagccataaatgataggactgatcgtgcttttgaggtatttgccacaacattggtggagtgattgaatttcttccacgctataaccaatccaatgttaagaaatgcctttattcagaggtaaaaattttgatggccatgcgaacaacaataataatattcactgaaagatacaaataatttataaatgtaaaattcatctctgcatgttttttttctttttttgggacagagtttcactcttgtcattcaggctagagtgcaatggcgccatctctgctcactgcaacctccgcctcctgagttcaagcgattctcctgcctcagcctcccgagtagctgggattacagacatgcaccatcatgcccggctaatttttgtatttttagtagagacagggtttcgccatgttggccaggctggtctggaacgcctgacctcaggtgatccgcccgcctcagcctcccaaagtgttgggattacaggagtgagccaccgcgcccgaccgatctctgcgtgtttaatgatctaatagggcataaaataaatttgctttatgtttctgatcatttgatattgtcccacagatcactggggctgtttttgtttttaatttttattccttctgcttctcagactggataaattctatattcaagttggctcttctgctgtcgccaatcttctttcagctcatcccagagatttttcttttccatttcagacgctatagctctttagagaattttcaattcatttttaaaatagcttccatttctctgatagagttccccaatttgttcagttattgacatattttaatttgtcttcgaatatatatatatatatacctctttaaatgtacttttctgctaattccaaacctggagatttgcttctattgactgcattctcttctgattttggaaattatcttctatgtcttcacatgcctagtaattttttattttaatctgccattgtgaaaaatacattttagagtctctagattcctctgttctaggagttccctaccttaatctttcagatattctttcagcccctgactccatcctctcacacttcaaataaaaaacactggattttttcgctcaccttctatttgccctgtgctctgtggtatgagtattgtcctcagtagaatatccttgtaagtttaattcttacccagtgagtagttccatttatgactagaaacttcttcagtttctttcttcttttgaccactttctggtgccttcaaataattgtgtgtgtgtttgtgtgtgtgtgtgtgtgtattgtccagagtttatcattattatctgaaaaaggcatagtcagataatgtactttttattactggactcagaacacccattcaagaatatacacttaaaacaagctttttgggttatacttatgcactccaaagtttgacaggtgctgtcttagattaaacttccatgcttaactttgtcttttgagaagtcatcttcctcactacgaacaagaatttaaactcttcaggttcattaatcacactccctgaaatctaaaataaagtcatataaacttggtaaatatactcttacccacagtgttttccttattactacatttttccaaaaggactggaaactatttgttgaaaattagagaagcattgaatatagtggaaataatacagtgtggttccataacaattagttgttacgtttaaaatatgacactccttaaggtaaaatttaataataccaaaagtaccctagaaaactgatgaaatggtaacaaaatttgagattatactttgatagaataatttttgtccacattaaagtttgacatctacggagctagacaagggagtaatacaaagaaactccccaagcagatgagtagatatttgaactatcttgctgtcaaaataactataaaatttcaagatgttgaatgggggataggtagacaattctttaaaggtctgattatttaggcaatgactcctcttgtggtttggaatatgacatgttgacaatcaaaacttagttctactacttactagccatgtgatcttcagcaatttacttaacctttctgggcttcggtttcctcatctataaaaatagggaatatattacctttctcttgtaatatgaatgccaaaatgcctggaatgtatcttgccagaaggaagggtccagccaagactattcctttatctaagagtgttccccaagctttggtctcaaaaggcccaggctaatgcatttcttactattggtctgaaattctatgttctcctaagacatagtttgtaagactttaatgaataacttcaattaagcacaaggtaacctcttaaaaacatatgctgtaattctctccttgcatcctcaaaagagtacatcttcatggatcattttaaaaagtcttaggtaagaaaaaataaccatttaataatggcagttatatcctggaaagggctcaaaattgggatgatagaatgtctaactctgacatgtgccgctgctctggaagcaattggtgggagttccagaatttccatgtacagtgaggatatggcgatggaaaacaatcttgtgtgccatttaggcagatgggaagcagggctataaaacttcacttacacaacctactaaaaattaattttccatatcagagattagagagagtttgtgaagactgttgaggtagaggtgaagccctcccagtgctccacacttttgtgctgtccctggaaacaatttcagccagaaaacactgggacaacatcttcaaagtgctgggggtagaaaacccagaaacattgtgaacctataattctatacctaatgaaaatatctttgcaaaatgaggatgaaataaagacaggcaaagctgaaagaattaatcaacatcacaccagtactataagaaatgttgaaaagaaattctttgtaagaaaataatactagatggaaatatgaacctacacaaaggagtgaagagcaccagaaatagtaactatgtgtgaaatataaaagaattttttttactatttacatctctttaaaagattactgactgtgtaagacaaaaataataaacatttattgtggatatatttagaagtaaaatataagacaatagcacaaaaaccagaagagaaaataataaaagtgtgcagttgtaaggatcttctattatacatgaggtggtatagtataatttgaaagtagactgtgatgctaaattaaatctcaaagcaaccactaaaacaacacatgaaaatgttttgctaatatgcaaaaaaggagatataatgaaattgtagaaaacactcaataccccaaaaaaaggcataaaaagaggaaaaggaagacatagttgaagtctcaaatagaacacaaacagcaagatagtatatttaaactcaacatatcaataaccatattaaatgaaactggtctaaataatcagaaaaagacttcagaacatggaatattagcagagataaaaaagagatcatttcataatgataaaatattgaattcaagaggacataacaatcctaagtgtttatgaacctagtaacagatcttcaaaatacatgaagcaaaagctgatagaactataaggagaatagtgaaactcacaattatagatgaagatttcaacatgtctctctcaataagtagacagaataacaagaagggcatggaagacttgaataacactatggaacaagttgaccgaattgacatttatacacactccactcaacaacagcagagcaagcattcctttcaaatgtgcatatacatccaccaagacagatcattttctgggccattaaacaagcctcaataaatttgaaaggattcctgtcataccaagtaccttgatcacaacagaatcaaattagcaaccaatagcagcaagatctctagaaaaccaccatttagaaattaaagaacataagtctctataactcaagagtcaaagaaggcatcaaaaggggaatttgaacatgttttcactgacttgaaaatgaaactgaaaacataacctataaaaatgtgtgggatgcagctaaagtagtgcttagagggaaattctgagtagtaaatgcctgtttagaaaagaagaaaggtctctgtgtggactgaattgtggcttctggaaagataagtccacatcctaatcactagaacctttgaatgttaccttatttggaaaaagagtctttgcagatataattgagaatcttgagatgagatcaccctggattatctgagtggaacttcagtgtcatcacagcatctttataagagacaaagagaaacacatacaaagaaggccatgtggaaatggagacagattggagaaatgtgtcacaagccaatgaatgccaaaagcctccagaagctggaagaagcaaggaacagaatctccccagagcctctggagagagtacaatctgcggacaccttgatttcagacttctagctcccataactgtgagagaatacattcctgatctttaagcctctgagtttgtggtaatttgttacaacagccataggaagctagtgtagcctcaaatcaatgacctcagcttatatgttaagaaactagaaaaagaagagcaaattaaacacaatgttagtagaataaaagaaacagaaatgagaccagaaatcattgaaatgaaaaacagaaaaacaatatagaaaatcaagctgggcacagtaattcacacgtgtaatcccagtgctttaggaggctgaggtgggaggattgcttgaggctagaagtttgaaaccagcctgaacaacatagtgagaccctgtctctacaaaaaaaaaaaattttaaactggactgtgcatggttgtgtgcacctgtagtcccaccattcaggaggctggggaaggaggatctcttgagcccagtagttcaaggctgcagggacttatgatctggtcactgtactccagtctgggtgacaaagcaagactgcatctcaaaaaacaaaacaaaacaaaacaaaaaaacacacaacaactccctctcactctctctctcagttatactttaataaagttgtacaaaatgaaaaaagtgagaagtttagagtagctaaaaagtaggttatgagggggtaggcagggaggcaggaagaaattagtttggagagataggttggactatgtcctgtggacaggattgtggactagactgggagagcctagggtaggaataagaactagacaattaggtattagatgatggatggcctcggttgaggcagtgaatggagagaactggtgaggaagaagtggggctggatttgggaaacatctaagatgtggaatggaaatgactttatgaccagttggatgagggagaggaaaaggttgatatcgaggtatttggcttctgagcaggcattgaattgtgttcccctaaaattcagatgttgaagtcctaaccccccctcccccagtgttactctatctggagataggatctttagaaggtatcttagtccatttgtgctgatataacagagtagctgaaactgagtagtttaaaaacgacagaaatttatttctcacagttctggaggctcggaagtccaaggtcaagacgctggtacctggtaagggccttgtagggaggaacactgtgtcctcacatgggagaagagcaagactgcaagctagccaaatgtttcgtgaagcctcttttataagatccttaatctcattaaggaaggaggatccctcatgacctaatcacatcttaaaggctgcacctcttaatactatcgcattggcaacactggaattttggatggcacacatgcaaaccctagcagaaggttattaaggttaaaagaagtcataagggtggggctctaatctattaggactgtggcttatatagaaaaagatctctctttgctatgcaaagacatatggagaaggcgtctctctgcaagccagttaagagtgccctcaccagcaaataaatcctgctaggctttgatattggacgttgcagcctccagaactgtaagaaaaccaattttcattgtgtaagccacccggtctgtggtgttttgttatggcagacagaactgactagcacaggagcttggtgaaggagtggggtggcaggaattgggagatgttcatgccattcacctagatcaagaacacaggacaagaagcaaattgggacagtgtaagttcagatttggatatgttgtttggcagaaattcacataaggaggtaaacaactgaaaatatagattggaagctctgaagagaggttggctagaggtatggatttaggagccatcagcaacaggtggcagctgaagccacggggatgggtatacagtgcaggatgggaattcaaccctagtctctgagaagaaatgtccagagatggaggaagagaaccatgatagagtggtgactctgcagccaatgagagaattttagaaaggggtgattaacattatcaaatgcctcagagcactgggcacatttctaggaacatgtctaagtgtttttgagatggctgttaaaatcaaggagctggacgggcacgatggctcatgcccgtaattccagcactttgggagaccgagcagggaggattgcttgagcctaggagtttgaggtggcagtgagctatgattacaccgctatactctggcctgggcaacagagagagaccctgtcttggggggaaaaaacaaaacaacaaaaaacagaaaataaggagcttacggtctgcctaaaaagaacacaaacacatggcaattaggaaatcactcaattaagaaattgcttatcaatgtaacagaaaagtgtaatagagattcatccatttattctgcacacatatattgagctcccactatgtgtcaggcatttagttgtcagaagaggcaattggatttttaaagagaaggatatgacttagttgtggggctggaaagaatgatttttctggctaagtgaaaaagaatagcagagtaacatgggcatattggctgggatgggtttgggagggtggagaggatctggttttgaccagagtccaaagaagggggaataatttgggggaaagcctgcctgagtgagttggtaccgtagattggagagctggaaggcacccatcgagtgtagctagtcccagaagttttcctactccaatattttctaaaggttatgctcctactgctgcaacacaaggcagaacccccttgtgtcaggctgtcaagctaatagggccactgcctcctccagaaaggacatgcagaaagtgcaagctactccattggtcaccaaatatgcctccaaatgccctctgacttggacaggacattcgcataacaaaattccgaagcaaagcataattaaaagagggttttaggtacaagagcagcttccaagccctgatctacacctgggctctttcaaatagcaggtgcaaggagactgggtgattcaaagagtcaatcataacttatattggctttgggtggaccgatagacagcctgacgtatggtcgggcggacagttagaatgagcgaatgcgtggatgatgtactaccagtctccgaccaccaccagttttccctagccggaaactagtagcaaagcttccccgagaccgctctaaagctgcagttctccagacggccgccggaagagggcgctgcggatcgcctcggtctgcaaccttcagaccccaagtcctaggcagcgagggagaattcagcctccctcaagtcccagaaaacattgggcctcggagattccccctccacccttccctcacacccaccccaatggcctggggtcgatactgcggccaccggaaactgcctgggacaagtgttggggatgtgggggagacgggctgtggtgggaggttggagaggaggaaaggagcggaggagggaaccccagcgctgctggcaagcccgcgggaaactcgaacacccaaggcccacgggctcccactgttgggactgagatttgttggggaacagagggcagaaagagctataggtttcgactacctaaagctgaatgaggctgcacaggtcctggggcgaaaacagccgcgccgccacaaggatgcttcgggaatctgtcctttaattatcaggagcagctgcgaaacttaccttagcgcagcacgaaccctagagcgcccccgagggtgtccctgccccttccgacgggggcgtctggcggattcgcggcgtagcacggcagcgcgggcctcacagggtcggctgaccgcttcaggcccgtgctcctacctcccgtctccgtcttggtttcctcgcaattcaaagggagctgctgagctcccgctgttctctgctttgtaacccgctccctcaggttccctcctaccccaggccccttcccgccagagggcgcccctggagtcggtggagaaggtaggggctctaaatacaaaaattcaagacgagttgaatcttggcttgaactgcgtgacaggaaaataggcaagtttggagaccacaggtgttaacttctagtggggcttgacccgacagaggagcagattcttcaacaccaaaggcctaagggccggactctcttcgcggactctggccctcatagacgcgccctcgcctcccataccctccgtagagcatgcctgtgagggaaagggagaagcagaagccgcgctcggatgacttggcgccccaccccccagcctgcccacaggccacgaattgagaaaagctttcccaaaaggaaagtcctctcaaaggccctagacggtcaaatcgggaaagggagcagtagagggatccttcctcccgctgcgtctgtgaaagccgcctgtctgcacgccccgggctcccgcggtccctcccgaggatttcggttctggtgcctgagaaagcagcgcagagggggccctgcgagacccctccagagaaatcatcccccggaggcattcctcggatcttggggttgcggagcagcgccccccagcgcccagttacactcctgccttccgctccctgcgcctggttgcctcgatggcactcgcgagcccagctcagcccggcttagaagcctgtgcctagctgtgggagactgcgggagcaactgaggggcccaagtgtttcttgttgaaggtcagaggcctagagtcacagtttctctaaatccaaaatacagaatcagaaggaataactccttctattagcgacttttgtgatctacaaactcaggcacatgatctcatcctgaattgtttggatccctagcacaaaccaagccagtacacagggcaggttgtgaccattttttacagctcaggaaacaggtgctcggaggctgtgtttcctcagcgtttctcgaggcactggggggttcaaagatagataaaacaggggctcaccctcaaggagggaagccagaaaacacacactggtttactctggctgtgatgggagtgactccagggtgtggcgggagcccacaagagcggtactgcacagctggaaaaaggcaaagccagggttcaaacctaggacggacttccactcaaggactcctctcacgaccttggaatgctgagagatcaagaaatggtgcaaaaacccacacacgaatctccattacaaccctctctatctcactggatcctagagtaacatctgtcagaaagtaactacatattatttgggtgatttattgtgaatgtgtaagttccgtgtgagtaggagctgcatctagattaagtttgaattttcaggccttgcgtagtccctggcacagagccctagctgaataaatactgtcgagtgaatcaaaaattgcgataaaacttggagcaaaataacactaccaggagacagagtggctcagcgccctaaacaggtgtggaggaccacaaagggagttagaaaaagcagttggggggtggggcggtgagacaggtggttcctcctcacagttccacctggtccaagctacagaccccaaattagccttcttttgtatgagccctctgttcttgtctcgcaaagtgacactggagggagagaaaggagtttccctgcggccacgctggtgtaagcaaaggctgatggcgattccgcgcatctagggccgagcctgggcctgcgccccctcggattcctggcggagccgcagccagcgaagcagagcgtggtcggaatagaggcagcgaccgtgtgaggtcgcgccagggaaagctccgcgaggggccagcgttgggccctgccctgccctgaccgctccccactgtgcccactccacccgggagcaagctagttgcgggataaaggaatacgcgcagacttcgcaaagtgcaatcggggttcttcgtattcatggaaaaaaaaatcactggtttagcccgggtctgccctatttaggatgagtccaggaggcggcggaaagaaaggacgctcttcggtcagagggaggtgtttcgggccatgggagggactctggaggcctttgcttggataagcttggagatacagatgtccttctcttccctacaaggtgcgttagtctccgggcttattttcggcagtgcagtggtactggggaagaaggcagagccgcgtgttgagaaggggctagggtagtagaggcgctggagcctgggcggcagggcgctgcaaaggcccaggcgaggtggatagagagcttgctggtgcgcgcgagaagcacgcctgcaggcagaggttgaagcgccgtcccagttgtgtcccagagtgaagcgggagtctttgcccgccccagccacttcgagctccactccagttcagctcccagagtcgccacttgctgcgcggttgttggggagggggttcctggtccagaacgagacgtggggggctgggggtttcctcgagaactgcaggcctggttgcccccggactgtcagagccggaggccggggagctgccagccacgtgcgcctgtggcctgctgagaggttgaaaagctgccaagggacgaaggccgagaagacaggacctaggggctgtggaagattcacccaactcttccttttactcaggtcttgggacctaagagggggtggggatagtcatgataataactaccgcaatctccagtgctggcactgagctgaaaaacattcaaagctttcaaagcattttgatgtgcttcatcttacttgaatctcacaaaaaccttgtgaagattgatctccatttctaaatggcgttgagactggaagagatgtacaacattctacacttggtgttccttaaacttacaaacaactatgaaataatggcgagtgagagaaagaagctgggtgactgggaaacccaccccgccttcgcaattagaccccattcgggactcaggcccggccaggtcgcgcctgcagacaaggtctgtattcagcgttgccagttctcctctgtggttcgcttaagcccggcgtcgcctcccctccttgcttagccaccacagtgatcaatgctcagttcgtcggggcctgagagcgccccccagagaagcccctgggaaggaagggcaaggagccgggcttcgctctggtctttcgcaacaccagcggcgagcgcgtctccctgcgcaaacgtagggtggcctccccagctctgccgtggggaccgcacaaaaacgcgggcgcaggtgggagggcggagggtgtcctgagctttctttaccctggtaaagaaggtaggcggtgagaaaagcgaatgttattatagaagttggctttgtattgagggagtaagagctctcttcaaggagagggctgaaatctttaaaaataaataaaactttctctactgtaattgctattaataaaaaaagggagcccggatgaattaagtagctcaaaactgcctgttcgtcatgatcaggagctccttctctacaaggaggggaaagaaaatgtgaaaacaaaaactaaattcaagaagctccttgaccagcgcgggtgtcttggaggcacctgccggggccggccggggagcgctccgccctcccagcccctggcgcgcagaggagactaaaacagctaaggagaaagcaaaacaaaaacaatgataaaaacgtttaaaatccaaggacaaaaaccggagtcggtctcaaaatccgcgccgttcagtgctccactcggtagtcgactcggctgcaggccccggcctggccggagcaacgcgggggacacccccgattccgctggggagcgcagcccacagctccccctcgccaggcgcccaaggaccctcaaggcgcggggcccacacttgaagcctgggaacgcgcagacaggaaaccctcttcctcctaagcagtttcttgctcgtcggatgagaggcgcccaattgaagcagaatgatcctcatctactaatatccagcgtggccacaaagcgactggccatttacgccaccactttaaacaaagatatttggttattcccgggaagcaagagcacttttgcatggctgagctgcgggcggaggcgagcctcggcccagcctcccgcccgctgagctgcccgcacctcggcattcgccccctcctggccagcgctccagccgccggggttcaggctcagttccgcccggcaacagacagacgggcactcacgccgctccctgctcgcgcgctccctgaagcatcagaggggaaaacagcgtggctctgggctcgggtgctggggctgtgatgtcctcggaaagtcagctccagccccagatccccgcgtgtctgggagatgggcgagggtcagggacaccaggtttgttcgaggtggggcaacttcagtgacggaccctcccgtgagaccccttcccatcctcccagctctgggggccagtgctgtgtttgctcggccgggggtggggggggggggggaagaccttgggggaggcgtgttagcgggggtggcccactgaaaaacccctgagctgcgggggcgggttgtggctcggggatccgggacagcctccgggaggcagtcgatcccctactcagcgccccctccgcccgctcggattctctccggtagggggaaagggggcggggagcagaggtgtccctctgacggcggcagaagagaggcagacagactgacagacacgtagaccaacagtgcggccccagggttcgtccccagactcgctcgctcatttgttggcgactggggctcagcgcagcgaagcccgatgtggtccggaggcagtgggaaggcgcggggctgggaggccgcggcgggagggaggagcagccccggcaggctcaggtgaaacccccaccctgtccctcagccccctcctcctaaagacctgtccgtgcccggggaaccccgaccgaattggaaagtggttccactttgtaactccgcaagttggttgcaaagcagcattcaccttccttcctctcaaccatctctcctcctctgttactcccccaccccacctcctgccctccccgctctcggttccctcctccttcccctcccctccacctcctccccgcgctccgctggtaccccacaaaaaatgggggtgggggtgtccaagggaggggggaaatgctttgggtctcgtctctgcctctctctctctctctttgagacctaaaaatcctgacaagtgaaacttaaaggtgtttaccttgtcatcagcatgtaagctaattatctcgggcaagatgtaggcttctattgtcttgttgctttagcgcttacgccccgcctctggtggctgcctaaaacctggcgccgggctaaaacaaacgcgaggcagcccccgagcctccactcaagccaattaaggaggactcggtccactccgttacgtgtacatccaacaagatcggcgttaaggtaacaccagaatatttggcaaagggagaaaaaaaaagcagcgaggcttcgccttccccctctcccttttttttcctcctcttccttcctcctccagccgccgccgaatcatgtcgatgagtccaaagcacacgactccgttctcagtgtctgacatcttgagtcccctggaggaaagctacaagaaagtgggcatggagggcggcggcctcggggctccgctggcggcgtacaggcagggccaggcggcaccgccaacagcggccatgcagcagcacgccgtggggcaccacggcgccgtcaccgccgcctaccacatgacggcggcgggggtgccccagctctcgcactccgccgtggggggctactgcaacggcaacctgggcaacatgagcgagctgccgccgtaccaggacaccatgaggaacagcgcctctggccccggatggtacggcgccaacccagacccgcgcttccccgccagtaagtgaggccgccccactgcggggccgcgggctgagctcaggaggtgcggcgagagccgtccagaaggcgcggcgccggcaggctgcgcgctgggcatcagggagggcggcccggcagcggcgccagggacttgggtgcgggagctggggatgcttccccctgctcggctgggggtccaagaacaggcacttggtagcgctggggtcctgcggtcagatgcgggtactcggcgtctcctaggcgcggtggactggcagctctgctcggcgcagaagacctcggggagccaagggaagcgaccccgagctcaaggagcaggggcgagcagagcgcggagaggctagaccgggccaggagggaggctgccctgttgggaggcactcgagcgcccggcccggccctctctccagcggagtctgggcaggtgggaggactcgcagttccagaggggactctaagggtccgagcaggtgccctcactggggcctgacaggagagaagccaagaggcaaagcgtctgggggctccagcttttggaagtcaacaccccctctcctaacctctccaaactggggtctaccgtaggaccccagctcccggcctgagcccagttcgccgcctgtggccagctaatcctaatgctctgacccgggctgggcacgaaaggagcagaagcggcctttcccccactgcgtcttttggttcgaaagagggaactgagactgagggagggcagccagggttggggctgtgagcgctccagtacagccccctcgacggtacggcctggggcaggcgctggcagttccccgcggatgggcctcttgggccccagcgctaggctgcctgggtcaggagggcgccgtcggttggggcgggccgggcgggccaatggcgcggaaaacaggggtggcctggctcggcctggccccggccgacgctgtgcgtttgtcgcttacagtctcccgcttcatgggcccggcgagcggcatgaacatgagcggcatgggcggcctgggctcgctgggggacgtgagcaagaacatggccccgctgccaagcgcgccgcgcaggaagcgccgggtgctcttctcgcaggcgcaggtgtacgagctggagcgacgcttcaagcaacagaagtacctgtcggcgccggagcgcgagcacctggccagcatgatccacctgacgcccacgcaggtcaagatctggttccagaaccaccgctacaaaatgaagcgccaggccaaggacaaggcggcgcagcagcaactgcagcaggacagcggcggcggcgggggcggcgggggcaccgggtgcccgcagcagcaacaggctcagcagcagtcgccgcgacgcgtggcggtgccggtcctggtgaaagacggcaaaccgtgccaggcgggtgcccccgcgccgggcgccgccagcctacaaggccacgcgcagcagcaggcgcagcaccaggcgcaggccgcgcaggcggcggcagcggccatctccgtgggcagcggtggcgccggccttggcgcacacccgggccaccagccaggcagcgcaggccagtctccggacctggcgcaccacgccgccagccccgcggcgctgcagggccaggtatccagcctgtcccacctgaactcctcgggctcggactacggcaccatgtcctgctccaccttgctatacggtcggacctggtgagaggacgccgggccggccctagcccagcgctctgcctcaccgcttccctcctgcccgccacacagaccaccatccaccgctgctccacgcgcttcgacttttcttaacaacctggccgcgtttagaccaaggaacaaaaaaaccacaaaggccaaactgctggacgtctttctttttttccccccctaaaatttgtgggtttttttttttaaaaaaagaaaatgaaaaacaaccaagcgcatccaatctcaaggaatctttaagcagagaagggcataaaacagctttggggtgtctttttttggtgattcaaatgggttttccacgctagggcggggcacagattggagagggctctgtgctgacatggctctggactctaaagaccaaacttcactctgggcacactctgccagcaaagaggactcgcttgtaaataccaggatttttttttttttttgaagggaggacgggagctggggagaggaaagagtcttcaacataacccacttgtcactgacacaaaggaagtgccccctccccggcaccctctggccgcctaggctcagcggcgaccgccctccgcgaaaatagtttgtttaatgtgaacttgtagctgtaaaacgctgtcaaaagttggactaaatgcctagtttttagtaatctgtacattttgttgtaaaaagaaaaaccactcccagtccccagcccttcacattttttatgggcattgacaaatctgtgtatattatttggcagtttggtatttgcggcgtcagtctttttctgttgtaacttatgtagatatttggcttaaatatagttcctaagaagcttctaataaattatacaaattaaaaagattctttttctgattaaaaccctcctttttgttttgttttgatttggctttaaatggctttgaggggcgggggcttgggaggatcttgtctttggtctgatgagattcaaattgtttgggtttgagctcaaaggattctgaaccggttaaggaggtaaggaggccaggcccagagtccttgccccacaggaagagggagttttgttctgcctcagaaattgtgtggaaacaaatcttgagcagtcctgagactgcagtggaggaccgaaataccaaactacttccaccaagagggagagggagagaggaagagaaagagaccaaataattcattttctgagtcagacttctgttgataggagtctcagaactgtctactgtggtctcacaaagctgagccaaagttttaaaacagtgagagaggacacccattttaaatcagtctgagtgagttatggttttcagtgaatggatcacctctgtagatttgaacatcaaacctttatttctaatcagtggctgagctccttcacagaattcgatgggaggctgttttcgaaagtaaggaagtcattcaggggttttgtttctgtcctaaaacagggacccctctaggggaccagcagcagacgccttcagcccctgctgcttttggctcctttggcctccaacggggtaacactgggtgacaggcctgaggacatcccaggaaggactttgggagctgagatttcactctttgttgtactgggttttatctctgggatcctaaatttttgtagtaatgaatctttctcctgtttacagttcttcacctcccagccactacctcccacgccaagcaaaaaaaataaataaataataaatcatttttgattcctttcttccaacctctaatttcctggtttcctcagcgctcagtgtttgtgttgggagacccattagggatgagagagaggggagaaggaatggttttgaacacagaaaaattgtagtcccctggatgggctgtagcccttccgggtcacccttgccaaatctccggtcgaaaggcagctgagccagctgcgggcagacgcccctcccagcactttcctctaggcctggaagtattggattatgggcaattgattcttatttggcatgtactcacttctcgcccaggttttcaactttctttttcttcctctcttcccctctctcatttcgttattcgtctgcatctcttcccaatccctctctcccgctcccccaccaagagcttgtgaggaaagcagactggccggagtcctcgctccgggcccagcagtcctctttgttaacttcctggagcctcctctggcgtggtgccttaagactgtgggctaggccgggctttctccctcagaaacctgggcctcactgctgagacacagtttccaacagccagagggactcgaagattcccaagaggatggttgggtctagtgagagtgcttgttggaaggcggggaagggagattttaacaggtctcacgttttggaaaacaaacaaatttgaccacttgcgttggaatggtcagctgtggttccgggaccgggagtgtaggtggctaaggcacccagctcaggccggccgggcaggggacatggatactgcagctgctgtttggctctaggtccggatcccacggaattggagcttcgcttaacctgccccagcctagcccaagcccgggcggggacctggctggcggtgcccggctgtggttctggcggctgccccgcaccccattctagctgggaggaagcctttgggagtcacaattttagtaggctgtggcaccctcggccttatcatctttgcattggatggagtttccatcaaatacattcttctcctcgccgtctacagtcggcatagtttgaagtctgtttacttgtcccggggaaaggtgaactcaatcgggtttgcggaccgagacaaacaggacctcagcctctttcttgccatcaattacgctggctccatccgctcccgctcccggctgggggaattgtcgcagctgcgggaagagacctagaacgcaatctgaagcgtttcattagggaaataggtgcgcgctgggagcagtgcaagagggttccgcaacctggggacaccctccgcccctacagcaccgtcggcttctggaaagccgacagtcctcctttctgggaatctcctgcatcaactcgtgcccaatttctggcctcccctctcggagaaatcagcattctgaggatgcccctggcgctgaggtgcttggaagcttccgaggtttgggagcaagtacggttcaccccgagatcaccgcgaagctttgcctccgccaaagtaccctacccatccctaggccccaacggctgagaggagtgggggagattttgcacactgcaccccccttcctcctctccccacccccacttcgccatgtaaacactaggactttctcgagagccttggagagccgctctagtggcttcgggccctgaaaccccaggctgggcttttttgatgtttagcatcccaaagctgctccccaccctggccccagcctgggaactgggagctgtgggcaggagaggaaggaaagcagctctctcagctagcgagggggtcagggactgggccaagctcagaagcggggagaagagcgagacagagatgctctgagcaggggagacagggatcccgggctgctgccgctaccaacaagggtacacactgcggtcctcaaggccaggaggggggtgggggcagggaatgcctcagccaacagggcagcggctcggccctgctgctggcccggtgggaagtagcctggggccccgcgactgaaatccgagccaggcctgggcagtctccgctagaaacgctctgggcgcgcactcctggagacgcggaggcccgggcgctccagaccagtgtccttgtaggaggcttcttcacgaagcttagagtttggcctttcatagggaaagacttgctcgggagcaagtctaagggattttaagggattttaaatcttcctgggccagggctagggagctctagtgacagtgtcttggtctggaatccaactctccaattttgaggccgcagggaggaattctgagactttagaggccgcacagccttcagcgcgctcaccgcgtccaggcgtcagtgaggggctatctcgaggcgcgagtgcacaaaaggtagcgcgagtctcttctcaggcgatccagataagaggaaatgagagccgggttttctgacttccaactcattagggaccaggtaaggtcaatgctttctctattatgtctttatcttaaaagcgggtcaatttaagataagggaaaaaaaatccaggatctgtgtgaaccgtgctgataaagactgaccccttttctgaactaaaagcaagccaggcagacattcattttctataaacaagagagttgtgagaagctgccttgaattctgatcatatgtctccagacatcgctctcccttccctgctccccaccccccaattattagcgcgaggaagcagagtagacgattttatttgtggagaactagaaagcccattgggagatgagaatctgagatgatatgattcttaggcatgggttactggcttgtttagttcaactaggactttctttttgaatggaaagaaagtgacagacacgggtattgggagggaggaggctgaatgttttctctgctcggctagatcctggttaggagacgctggacaccatgttcctctggctctccctgccttctggctgacgcgttcctccttgtgcagctgtgtttctgagacttcaggccaccctctgtggggcccaatttggtagcttacctcaacttggagcatagaaagttttctggtgccccttcggccagttgtttctagaaggagtatcttattttcagtcaccctctctggaaagtttgtccacccaagctgagggatttggatatggatgggagtagatgaaagtaagttttattgaagggggtctgcatatgcccttatcctcacctcatgtagttgtgtttctgaactttctttaatgaatctcaaaggaacggagaaagagcaggttcagcaacttggcagcacagcttttgcctcagctgaagccatagctgaagtggctggctgcatttctctctgatagtgacctaatgcccaacttggtgggcatcgaggcatgatcctgggctcctgcgcctctcctcgtttgctaatgtttcccgtttgacctctgcttcgtaagcatttattacccttgttattatgagttgtagcaaagttttggaaagggtgagatttaaattcattttcctgttttatctatttttgttatttgcaggacccttcaacataaattgatcactgttagtgctctgcctgaaatataaataaaacataacataaatgtggcaggcaaaggacttgttaaagaaaactcttgcctcccacctaaaatccacatctgattctgcctactttgtaagtgattgcacacagatttctatgtatatatgtatgtgtgtatagaggtatatatacatatgtgtctctcttatacacatgtatatatacatatgtatctctcttatacacatgtatatatacatatgtatctctcttatacacatgtatatatacatatgtatctctcttatacacatgtatatatacatatgtatctctcttatacacatgtatatatacatatgtatctctcttatacacatgtatatatacatatgtatctcttatacacatgtatatatacatatgtatctatcttacacacatatatctattttataagatattcaaaaactgtaatatagaattctcagagattttacagaacctgttagatgcaagaacattgaataaattcactacctcaattaaggtgtctcatgaaaaagtttccttgaaaaattcaaatagaccaaaaccctttagttttacccactttaagtcagaatatttatttattgtcatgtgaaactctggataactaattatgttttaggaaattttaaaatttattcctaaataatttgaacttggtgtctgagacacagctgtggataagactttttgagacattctataacaacaacaaaaaaattgtcccttgccgaacttctattatccatctataaaaatcactggtataaatactaccgccctggggcaacaacagcaacgaacaaatgaaaactgtttctgctccgcatttgttgcaaacgtcctcttgatttcacactttaagccttcacatagtagtggaaataagaatgcaggtctgagtgttgtctgacaacaaggaaaaagacaaattttttttcttctcccttttcccctctatttcacacatttctggggaatccggtctttgattgttagatcttgctgctagtaacagcagactgttggtggagtgtcaaacattctatttctagagtattggtgattgttgatcattcatttatataaaatcagagctatcaggccaccaagtatctttggatatccttcccctgtccctgtgctctggatccagtctatggaaaatgacccacaacaggttagcgtctgccttgcctagcattctccctcctaatgctgctgctctaaaagtccaaagctctaggaaaacaaggctttatttggcccgcgtgctactgatttacctgatctcagcagcacacacggggctgagtgcgcgcgcgcagaagtaaacctgtgaattaccataatgacactaagaggaccgagagctagttcctctgagctgactgcacgctctgccgcaacccaggagacccagtcaatgtctaaggaactggatatgcctatgtgtaaagcgaacctcgcaaagttatggtcccaacagacgcttccagagcattaggtctctaaacagacttgcagcgacagacttctagaggagactcaagccgcagaggattaaatctctctctctgcctggccacttgatggtgcctcaaggtctgcaaggcctggggtgggactaagggcctggggggctgggcagtggcagcttcttccttcccttctgattctacttcagaaagaattgcaactgtcaaaccaccgtggtgcacacagcacacattcctacctcaagccacagcagacagaaattgtagctagttcgttactgccctgtgacctggcagtattaactgaaatgtcgattactactccctggcagcactgttccctgacaggactcctgagcctcgacctgggtgcagtaaactttggaagtgctgcattgtatcatacctacaactcacgcaatagataaaactcagacatctctctacacatctacatagtccattggcttcgtactgaaatcaaacagaaaaagtttttggaaatatttaacaaaaagccaacccactcatggccatcatttagcactgggtaggggtaaagagaaagagaaaccctttgaggtatgtggtagcatacaaacatgttcacagtaaccttcctgtattaaccattttctaacaattacaatgccacatcaacacagttagttgttgaaaattctcaacatggctaaatacttagattgcattggtggtgtgcctgtgaaagctatttgggggttgtgtatgtggttctgctcattggaaagacagaagagagaaagggggccggaaaggatactgggagaaaacagaaacaactattcctggtgaaagtgtgtgggcttctgagggcggttgtggcagctgagaagtgctggttatatatagctgggtcacagtgatggggaggtggggatggtggtggatgactgtgtcatgtgcctgtggtgtttagggggtgatcctagtggggagggcctgggagacggctgggtggtggtgtgtgtaccctgtctgagctttgggccggtaacacaatggcaacgtaattatctggctgaaacacgctcaaatggcaaaaagttgcaaaatagatcgacctcccagagaagagacagagctggttacagaggtctgcacccatcatccttttttcaatacattttaaacaagaggatctagcgagtgattctgattcaatacacataatcagtttgcaagtcttatttccatttgaaaacagggccatttgcaatcataagagccggacacgctgaaagatacggagcgcattccgagcagatgatgggtgacagaatctgtaggcaagcactaaatattttcttccagcttcagaccttgtgcatcagtcttctgtcccgaaccattttaaatggaatgttcctgttgaatatataatttaattgcttagaaaatggagactccatggttgggaggaaaaaaccggcaagaaaggtgacagagaaactatgttgattgtgcttctcctcagtactggttaacagtcatttaacgaagagtctacccattgggtagaagacttgatggaaaaaatgaattggtttttaaaggaacaaccgccagaaggggttgccggggctaacattctcaggctggagctgcaaagccctggctgggtgtggccgggactggcggggagtctgcggggccttcagggaagcccagggacaactccgcggcctcccaacgacgccgccaaagacctgggggcccctcgcggcccggctgttccgaattggttgccaaatgtctaaactagaagtgtggacacttgaaatctcgagctgtcttagggtctctcgctacgaaagtttggtttctaggaccaagagaagcagctgtcccaggcccttcgtttcctgtccgcagcctcatcctccccgcaccccccagctctcagtctccccagtcccagtccttaccccgtccacccgcggcctctctcccaacacccagccggcagcctcgctctcggcccccgcccgccccgcgtctccgcgtacccaggtccccgcgccccgccccgccccgcccctgcccaggttctccctcccgttcccgcgctgggaacagcctcggccgcgcgccccctgaggacgcggcccccaacccctcctggagaccacaccggcaagtctggtgtgcggaagagcagaaacttcctcggaatttcgatcccagaatatacaaatattagttcactaggtcacgacgatgatgcaaactctaacttgcagggatttttaaaaaagatcttaacgcacaatctttctttgtacaaataaacgaaaccaaacaaagccagcgaactactgctgtttccctcgtgaattttcttaaggaaaagagagattccttctctccccagatatcaacatctaacgaattttctaggagactgaaactcaacctaataatagtatgtgcttaatgctgattccatttttgtttcaaaggggggtaatttattagcttcctcaaagtggtgcctcgtaggcaggtgttgtattttttgatatccttgtaaagagtttttgcgtctgggaagatctcagaagaaccaataaataaggtgtgtgtatgttggggggtggaggtgggattctgtacagctcatggccctgcttgttcaatttcatgcaaaactcattctaaaagccccagggttctctttaataggggccaaatggcaggaaccccaaagatctaaatatttcactcttcctccctgtacctccctcactgcgccttccacccccagctataaattctagattcccctccccgccccccccccacccatcctgcggataattgagtggctcagaggcactaatctgccctggggtgaggtggggctggcagtggaggtaaggcctcccacaggctccctggttccgcaaaatgggaggacagaactcctacaactggcaggaggtgaagaggacgctgggacccacaggacctagtctgccaggggaaagggaaacaggctcccctgactaaggacacagcctcagaccaggcttggctgggtggacaggaatgtggtgcccaagagcagcagagatccagggtaggaagttgcagccatctgaaaaccccatagagatatattgcccacatgactatttcta

SEQ ID NO: 95 - DNA, 29528 bp, Homo sapiens
tccttattagtgaaactaataattactattaatacctggcccctccctggccctttcatccaggtgggtggggaggttttgaagatgaaagtctggggggcctctctagatgcaggtttcggggattcacaactactaattaagcttggcagcccctctagttccctcccccacccccggggatgctgcaccagcagactcaatgcctttccaggtgggacacagcagggagctgctccctgggctgggcctcctcctgagaggtgttgagtagctgcagttgtgggggatggggctgtcaggcaagacagtcatgaggaggtgccggaaagaggaacctcacaccaggtggctgagactcaggagccctgcccccagctgaaattacagccccatccctgaggctgcccctcatcccaccccagggtctgtgtgtctctggaccctgccagatggtagtgggggaatggtgccaaagggagaggaggctccaaccagacaaagagacagagccagcatatccagctcctccgtgtggccccaggggcaccgagtcctgctatctggcatcctcagggtctattttgttccacctcccctcaaagaggcctcctctctctagtggcatcagccagcctgtcctgcacacctccggtgatgaggccttcactacctgccagactgtgggctgtgtgaagggatctcatccaatcccttgacataaaatacaacctagaggctcctgaggttacatcagcagtcctgaactttccaataagctccaactgcttgccccatccttctactaggatatcacacagaaggctccaaaaatagcagggcctgagcctgattccagcctccacccaagttgtgacctccccctggctctccccaccttggttaatagccccatcatccacccgttgctcaagcctagaacctacaatcatcctcacccctccatccaattcatctgaaaattctacagattctgcttccaaagtatctctcagatctgaccattgttctccatcttcacagctgccatcgcggtctgagcccccgtcacctctcaccagcgtgaccgtctccacctcctcctgctccctctcttgctcaccttcagccaattctccaaagccagagtagactttcgtttattttttaaatttattttatttttattttatttattttatttttattttttgtaaagacaaggtcttgcttgctaagttgcccagtctggactcaaactcttgggctcaagcgatcctcccgcctcagccttccaaagtgctgggattacaggtgcaagccatcactcctggcccagagtggacttctaaagacaaatcagaacatgtggctccctgcttaaagctcttcactgccttcccatgcaatcagaatataatctacagttggccgggcgcagtggctcacgcctgtaatcctaacagtttgggagcccggagcgggtggatcatttgaggtcaggagtttgagaccagcctggccaacatggtgaaaccctgtctctactaaaaatacaaaaattagccgggcgtggtggcacgtgcctgtaatcccagctacctgggaggcagaggttgcagagagccgagatcgcgccactgcactccagcctgggcgactgagcagaactgtttcaaaataataataataataataataataataataataataacaacaacaacaacaacaacaacaacaacgataataataaatctacactccttgacaaggcagggcctagcaggcccagaggatctggcccctgccctcagggacagccctaacactcttctctctcctggccccagccccgcctccttgcagttcctcgggctcctcccaattttggcagcctgtgcactgctgtcctctctgcccctaaggctgctcctccagccctcctcatggctgcacctcgcacgcttcaggtctcagcttccatatctcctcctgagccctccctgtgcctgagccctgcccacctcgagagtgagcctaccttggaatcttctcaggtgtgcgtatttccttcatagcccttaccacaatctctaataataaagttgttggcaggcttatctgtataacgcctggctgtctccccattaggttgtcccttccgtggggaaggagacccatgtctgtgttatccgttgctttatcgctcaccagtgcctggcacacagtaggtgctcaataaacccgctgaatgaataaacgactcgggatccatgccctggcactgccagccattgggctgccctggcactgcccttccctttggatggactgagcgcaggccctctgcgagctggcctgcggcaggcagggcacacagaggccgggtgccatctttgtccacttcaccaccctgaaccagctgagtgacctgggcgcagccctgacctcatcctacttaaagcttcccgctgagtaaaatgagaataataatctgagctcctggggtgtgatgggacacaaagggagaatgtacatcaaggccgtcgtcacatcacaaccacatcctaggacgtcccaaccatcttctgggcttagacacctcaccctgcgccttccgcccaccctccaccctccaccctccaccctccaccctccaccctccaccctccaccctccacgtgtacctgccccgccgaggcgggtccttcccctgcagcacggagatctggcgccatctagcgggcacttcgggaagagcgggcgttccccgcccctgtattccacgcaccgtgggtggggccgcaccccgggaccccgccccgacattcctcactgagcagagttgggcccaggatcaaaccgaggatctgcctccgttgggtcagagcgagggagacctctcacccaccgcccccaaggcccaggccccaacctttgatcttacctcccacccaccccctcccctcagcacagagacttctcccgaatccctgaatgatcccaggtcccctttgattcaagacctttccacgtgctgtttcgtgagctgggagttttctttttcttttcttttttttttttttttttttttttttgagacagagtcttgctctgtcgcccaggctggagtgcagtggcacgatctcggctcactgcaagctccgcctcccgggttgacgccgttctcctgcctcagcctcctgagtagctgggactacaggcgtccgccaccacgcctggctaatttttttatttttttagtagagacggggtttcaccatgttagccaggatggtctcgatctcctgacctcgtgatccacccgccttggcctcccaaagtgctgggattacaggcgtgagccaccgcgcccggcctgagctgggagttttctcccaccctcttcttcctgtcctggctgtctcctactcccattttgggccctccagcaaggcccctgagcaagccagagccctccgtatcccccgttccttactttgtccttgtttcttgcccatattccctgctagacaaagccccttggcagcaggccgtgacacggtcactgtgtggcgagtgctgagatgacaggtcctggggcacacaggggctcccatcagttgctcgcagaccgcgtgtgagtcctgtgagcacggggagcaggtgaattacagccctggaggacgaagcctgccggtctctagaggggcattgctacagagggagccatctccaggccttttgtagcccctcctcccctggaccctggagggtgtgcacctggcctaatccccaacacacacaccgccgctctcccttgtgtgccacacttacacacgcagactagcgctcatgtgtgttctggggctcagaccagcaatagacccatgactccacgacagcttcacagcagccaacacttttgagaaggtcctccctccaagtcccaggaccacctgggccacagttggtgtctgattcctggctgtgtgtcctggtgagcaaactcaccctctctgagccacagcttcttcccacccttcctctgttgcatttgcaaactacccttcaaggggaggaggggatagagctcctggacaaatgacagtatgagctgctgccgagaatggggagcacggggccttccaggttgagcttgaggacccaggaaagggcttggcttctgctgctgcaggctaattccttgctcttccttcatccaatcaacagatatttacaaaacacctgtacctgaggttacacgaattgggctctggagtcagactgcttgggcccagatcctggtgccccacttagagctgttgaccttttccttgtgtcctcagttataacgggggggattaaacattttctacctcctgtggttgttgagaggaagctgcttgctttccacttccggaatgagaactttctccagctcctgctgccacatttgcccccaccgtcttccttcctcattagcacctgaggtgagctgtccacattcctgcctaaagccgatgcctccacatgcgcagcagaggcctttacctattgcctgctcaatgtcagggctccagcatgtttttccttcacttctagactattcccagcagtgttaaaatatctgttattgatgcaaccttaaaaaaggaaaaaaaagaacctcttgatctcacattcccattctccatctgccccctggcacacctctgcagaaaaactcaagagctgtctatgaaggaactgggcatggtggctcacacctgtaatcccagcattttggaaggccgaggtgggaggaccacttgagcccaggaggtcaagaccaacctgggcaacttagggagactcagtatttaaagaaaaatgagggccaggcacggtggctcatgcctgtaatcctagcactttgggaggccgaggcgggcgaatcacttgaggtcaggaattcgagaccagcctggccaacatggtgaaacctcatctctactaaaaatacaaaaattagccaggtgtgtggtgcaaacctctaatcccagctatacggaggctgaggcatgaaaatcgcttgaacctgggaggcagaggttgcactcaagcctgggcaacagagtgagactctgtctcaaaaataacaaaattttaaaaattaaaaaaataataataattgggccaggcatgctggctcacacctgtaatcccagcactttgggaggccaaggtgggcagatcatgaggtcaagaaattgagaccatcctggccaacatggtgaaaccccttctctactaaaaatacaaaaattagctgggtgtggtggcgtgtgcctgtaatcccagctactcaggaggctgaggcacgggaattacttgaacccaggaggtggagattgcagtgagctgagatcacaccactgcactccagcctggtaacagagagggactctatcttaaaataaataaataaataaataaataaataaataaatattggaaagagctgtccaagaggtgtggacctccctctcttactccattcacacttttgcactccccccacccagccccccaatcaagctgctgttgtcaaagtccccagtatttcatgttgctacatccaacggtcatccttagcccttgttatccttgacctctaagcgcgatggcacaggtgcacactcccttctgcttgattgcatttctccagttgccttctggatgtgccctctcctggtctcctttcatttctgttcatggcttattttcttggctctctccttctcttatccccatgctctcaacgctcagtccttagcctcttctttatctacactcagccccttggcgggactcgtgattaaaatcagtcttgtgattttaaataccatctgtatgctggagactcccaaatttacacctccagccctgatccacttctcaattccagattcatctatctcagctgtcattctgacagctccactcgggtatgtaataaacagctcaaactcaggcctacgagtgggcatctgatcttcccctaaaaacctcctccaccctctgccttccctaccccagctgagggcaactccatccttctggttcctccagccataaatgctagaatcatctttgacaacactcttttcccatgccccatgtctagtttaatctatcagtaaatcctgttggatccattttctcattttcttttctttttctttttttttttttttttttttgagacagagtctcactctgtcacccaggctggagtgcagtggtacgatttcaatctctgcctcctgggttccagcgattctcatgcctcagcctcccgagtagctgggagtatgggtgcgcgctaccatgcccagataatttttgtattttttgtagagatggggttttgccatgttagctaggctgatctcgaactcctgacctcaattgatccacccaccttggcctcccaaagtgctgggattataggcgtgagccactgcactcggccaccattttcacttgatcttagccaaaaggccgagaagctatcggaccccattttcaaaataaaaccaaatattagcgacttctttctacctctactgatgcctcctccgtcttagctaccaatgtctttcacttgctttattgcaaaagcctcctaaccgtcatccctgcttctacttttgcccctcaccccaccccacagagcacccagagtgcacctattaaaacagaagtcagttctgtcaccctctgcttaaaaccttccagtggctccactcagtaaaagccaatgaactctaaggcctacatggtctacacaatctctctccacccccagtgacctctcgtcacatctcctcacctgcctgccctggctcaccccataccagccaccctggcctccttgctgttgctagaacatgccagtcatactcccgcctctaggctttgcacatactgctccctctgcccataaccatcttcccttagatacctgcaaggctggctccctctcccaccttgtggggaaaagagagatcagaccattactgtgtctgtgtagaaagaagtagacataagagactccattttgttctgtactaagaaaaatttttctgccttgagatgctattaatctgtaaccctacccccaaccctgtgctcgcagaaacatgtgctgtgtcgactcaaggtttaatggatttagggctatgcaggatgtgctttgttaaacaaatgcttgaaggcagcatgcttcttgaaagtcatcatcaatccctaatctcaagtacccagggacacaaaacactgcggaaggctgcagggacctctgcctaggaaagccagatattgtccaagttctccccatgtgatagtctgaaatatggccttgtgggaagggaaagacctgaccgtcccccagcctgatacccgtaaagggtctgtgctgaggaggattagtaaaagaggaaggcctctttgcagttgaggtaagaggaaggcatctgtttcctgctcgtccctgggcaatggaatgtctcgttgtaaaacgcaattgtatatttcatctactgagataggagaaaaccgccttagggctggaggtgagacatgctggcggcaatactgctctttaatgcaccgagatgtttatgtatgtgcacatcaaagcacagcacctttttcttaaccttgtttatgacacagagacatttgttcacacgttttcctgctgaccctctccccactattaccctattgtcctgccacatccctctctccaagatggtagagataatgatcaataaatactgaaggaactcagagaccggtgtcatcgtgggccctccatatgctgagcgccagtcccctggcactctttctctatactttgtctctgtgtctctttcttttctcagtctctcatcccacctgacgagaaacacccacaggtgtggaggggcaggccaccccttcaccacctcacagctctgctcaaatcactcctcagcaaggctgcctggccctctctgtttaattcagccacccaccccacccctttcctcagaccttcagtacccttcgcccagcctgactttttctttcttcttcttcttctttttttttctttgagatggagtttcactcttgtcgcccaggctggagtgcaacagcgcggtctcagctcactgcaacctctgcctcccaggttcaagctattctcgtgcttcagcctcccaagtagctgggattacaggcacctgccaccacccccagctaatttttgtatgtttagtagcgacggggtttcaccatgttggccaggttggtctcaaactcctgacctcaggtgatctgcccacctgagccatgcaaggtgctgggattacaggtgtgagccaccacacctggccaactttttcttctttccacaggactgaccactttctaacaaaataggaagcttacatagacattatgtctgctcttccttccagaatgtagactttgagagggtagggaccattgtttttgtcactgatgtatcccaagtatttacaatgtcagacacatcctaggtgctcagtgagtgctccctgagtgagtgtgtgagctctgagaggggagggtaagtacacccctgtgctggcagtgttgacagcgcaggggtgcggtggggtggggaacgcagacatggcaacagtgaggtgaggccccacggaaagtggctgtgctgcccctccagcctcagcccccattcctcttcccttattcacaacaccccagtactactggccattttttaattccttgagttctccaaacacctacccacttcagggcctttgcatattctattctccctgcccagaccattcttcacaccttcacgtagctaattcctactctactttcaagtctcagttcaaatgccatgattgtatctcagtgcctgacaaagagtaagcgtccaataaaggtacaggtttttggctgggtgcggtggctcatgcctgtaatcctagcactttgggaggccgaggctggtggatcacctgaggtcaggagttcaagatcagcctggacaacatggtgaaaccccgtctctactaaaaatacaaaaaattagccaggtgtggtgaagggcgcctgtaatcccaactacttgggaggctgaggcaggagaattgctcgaacccgggaggaggaggttgtggtgagctgagatcgtgcgactgcactccagcctgggcgacagagtgagactctgtctcaaaacacaaaagatacaggttttcattacacattttaaaaatatatatattgggtctcactatcgcccaggctggagtgcagtggtgtgatcacagctcactgcagccttcacctcccaggatcaggtgatcctcccaagtagctgggattataggtgcaggtcaccatacctggttaatttttctatttgttgtagagaaggtgtttcaccatgttgcccagactggtctccaactcctgagctcaagtgatcctcctgcctcagtctcccacagtgttggaattataggcgtgagccactgagccctgaagttttcaacatacatttaaaaatgtactattatcggccaggcgcggtggctcacatctgtaatctcagcactttggaagaccgcgggggctggatcacctgaggtcaggagttcgaaatcagcctgggccaacatggtgaaaccccgtctctactaaaaatacaaaaaaaaaaaaaaaaaactacccgggtgtggtggtgtgtgcctgtagtcccagctactagggaggctgaggcaggggaaggcaacagtgagactctgtctcaaaaaaaaaaaaaaaaatgaataaaaataaaaatatgctattatcatcccatttcacagatgagaaaactgaagcccagagaggttacaatttttgcccaaagaaccatagctaataactgcagaaacaataaatatgttgattaaataaagtggagtttgaaagcagtgactttgatggtttctgggataaagataggcttccctgtggaaaaatttgtcctgaggtgattgtgtgggctgccttcagccataagatcaaggcttgctccctccatgaagccacatgaggtttggaggtctgtttaatacaactcttaatcaaagcggaactcactccacaatactccagtctctgctaacatactgggaagctcattaaaacaaaaaagccctctccttcaaaaaatacagacatttcacagaagagatgcaaatggttaaaacaatccgtaaagagatgtctgacgtcactcatcatcgaagaaatgcaatgcaacgagaaggtatgttgaggctgggtgcattggctcacgcctataatgccagccctttgggagaccgaggcgggtggatcacctgaggcaggagttcgagaccagcctggacaacatggtgaaaccccgtctctactaaaaatacaaaaattagccgggtgtggtggcgcacacctgtaatcccagctactcgggagatgaggcaggagaatcacttgaacccaggaggcggagcttgcagtgagccaagatggcgtcactgcactccagcctgggcaacaagagccagactccgtctcaaaaaaaaaaagaaggtatgttgagtttttcagtttagcagaataaattttttttttttttgagacagggtctcgctgtgtcacccaggctggagccacgggatatatttatatatttaaaatatatttataatatttatatagtatgtaatacaaaaatactatatatattccatataaatattacatatagtacatagataaaatgtatctaccgcttgcctagctctgtgaggtacacttcttggcccttccccacagctccgacatattctcccaagccttcaaggtccttcaatattgttattagaggctgggcacggtggctcacgcctgtaatcccagcactttgggaggccgaggcaggtggatcacgaggtcagaaaatccagaccaccctagtcaacacggtaaaaccccgtctctactaatacacacacacaaaaaatttgtcgggcgtggtggcacgcgcctgtagtcccagctacttgggaggctgaggcagaatagcttgaacctgggaggcagaggttgcggtcagccgagattgcgccactgcactccagccttggctacagaacaagattcggtcgaaatatatacatgtatattgttattagagggctatgtggaagtagctattaaacacgagggctttgaagctagaattccaaacccttctgcaaaggtgtgctctcagttaacatcctttatctgtaagagggaaatcaaaattatttgataatgtcttgaggagtaaatgaagcaatgcatataaactgtttagcccagaccggtctgaaaatacatattgaataatttattcttattttgcccattatataatatgccaaagtaagtgattacggtgtgttttccccgactatgttgcctaggctggcctcgaactacttggacgaagcgatcctcagcctcctgagtaactgggaccacaggccggcgccaccctagctttaattaaggccgttttgttgttgttattcccctgctccacacaaggggcgctgccgctccaaggctgccagggcgggagtcaggatggcggaagtctgtctagccacgaccaccgccatcatggaatacaggcccacctcaccccgcgggtgtagccgcttcgtactgtcgcttaggccgacccgctcgcagcgacaaccagccctctacctcttttcgctctcccttaagtaataaaccgtctttccttatgacgagtcttaaactctttgggaggaataatgccggcgtcttccggaacccgacctcgccccgtgacctcagaggtatacttccgggacacggaagtgacccccgtcgctccgccccctcccactctctctttccggtgtggagtctggagacgacgtgcaggtaggaggcccgggcgcgacaatcggggggcatcctgcggcgaggggaccctgtggggcttgggacgagagacgggggtctttccgtgggaaccgagctaggtgccgggcaagagacgcgcggctggcccacctggatcctggccaactcgggattgagttcgttcctggtctcagaaggcccgttttgctttcagggaggagcttgtgaagtaagggtgagtgcgggtccagccttttaaggcctcggccccgcaatacggccacggccacggccgcgtttgagctgcacagcgtagttgagggaacccgggacagacgtgggctcccgcctctacctcgccaaacttttttcttggtgatcgcaggcccacgcctaatctcgtttgtttcctcgtttgcaaaataggaataacaatagcaccgatcccatgggtttgtagtgatcattcaaagaaggaaagcagggaaaactctcgcactatgttggatgcttctaaatctgggcgattctttccgttgctgagtcgggcacgttgcaagttctgggcgctcagggcccagcaccaatgtttgctgtgcgcttgccctgcgtttatatactcctgatgaccactctgctcgttactttaggggatgttaggaacggagaaactgcaaattggcatttactgaatggccatcatgccgaaacatactcatgcttacgtatttgagatatgctggagcctttctatgcttctcgaggcagaactttgggcttctctcctgtggcgcgttccttacaatagttaacgcactgggtcgtgctcattggtctgatttgaagataggaacatttaacttcgtacacccaagacttacacttgaagtacttactgtggtcacacacttaactaaagtttatatagggaaggcagaggagagatctaggaacacctgagacagactagggtagttatttgtggtgtagaggcatcttggcaggaggcagagagtgctgggctgggagtcaggacacgttgtttctatgtttggttttgccactgtctttactgtgaccataggctgagacactctctatcttcaccatctgcaggatatcgattagtgttagtgtcttctgaaaatgttaaattgttctgaacaccaggaggttcagaaggcctggggctttaggccggaagcagtcttatcctagccttccactttctcattcattctcacccgccttcctcctgtcagtttctctctcccttagatcttgtgacagtatgattgcaattattatgaaggtcataataggttagagttatttagtctcaggacccatcagatttctgagatgggtcttttccattagcctgccttttggatatattttagtgcctttgatatttgatgttggtgacaaagatttagttctaaatagttgtgggagtcaaatcagttgcatttttgaacattttgaagggatcaggtggagcacaggaaaacaggagatgagaggcttgagggctgtgttggtaagggtcccttgaattctaagctgaggagttcatgcaggaatcaagcagctccctcgccccatgaagggtgttaggaatggtaccagtacatgggtagctgttggtcttgggtttcttcttgccttttggggtgcagccttcaggcatctgctgctagatccctaggcttctatcttgtaggtgctgtgagctgagctgttggtagtttctggggaaaggatacttctcatggtactttgccatgtggccacagttgatacccccccaagtgcaaggagaaagaagttttagtgaggcagaaatgagagaatacagtagagtattggatggaagaagacagggacatgaagcaggactagggtttcatttaatagccaggggaaagggattctggaaatgttttgtctgttaaccttgagtttcttttccttccactcagaaatggcacctcgaaaggggaaggaaaagaaggaagaacaggtcatcagcctcggacctcaggtggctgaaggagagaatgtatttggtgtctgccatatctttgcatccttcaatgacacttttgtccatgtcactgatctttctggcaagtgagtacctgggtggagaggcatccagctggcaaaaggctgaggaaggcaatggctgggacgggctagcagttcaggggattctctctaaagaaatgctgttttgtccaggtaagaaaatgtgcttgtccatttagcccacaaatattgtgatttcccaggggttacaagagaggagacacattcttcgtccttacagcgtgatggtcattgaatccttggtttcttgggaattatcttctttccctagttccctttgcaggagcagcagtggactgcaagtgggctctgggtgcgggttcgacggccatttagcaagttgtgacttgtgtgaaatcactcagattctgagttttggtttcctcatatgtaaaattaggacagtaatgtctaccttgtggagtaatggtaaggattaaatgcaaaagtagatatataaaatgttaatactgagtatagctatattgggccattcaaccccactggactgaactccatgagggcagagcccatgaccatcatcctccaccatgactgagctgtgttgctcttcactcattaggatatcgtaagcactccttgttggacgaggaagaaatgaccctgtgcttttgtccccagggaaaccatctgccgtgtgactggtgggatgaaggtaaaggcagaccgagatgaatcctcaccatatgctgctatgttggctgcccaggatgtggcccagaggtgcaaggagctgggtatcaccgccctacacatcaaactccgggccacaggaggaaataggtacgagtcgcagaggggatggctgggtggtagaaaacctgctgggcttgggtgctggagcacctggatttgaggtttgggttttttgttgtgaccttgaacaagatattttaggcatatacatacttaataattggctcctgtgtacaccccccagcagctcagtgttgagcacccactgtatactaggagctgtgtttcaggtactagaagagagtgatggggaaacagacatggtctctaccctccttgtgtgggaccgaggctggtgggagagtcagactttaaacaacagagcaccagggagtatgtggttttcatttgtgacaaatgccaggaagcacaagtaaggagttggtgataaagtgtaatttaaactagggtctaaatgataagtccggagtccttccagtgaaataaggacaggaggagggtattccagctagagacaactgcagggaaaggtcttgaggtgggggtgaacctgggcacctgtgaaggaaagagtggcatgaggtgcagtcagaggggaagaggtggagtcctgtaggagaggggaaggacctggatttgagtgatgggggcatgaaagctgaaatagatgactgttgcgtgaacaagccagacagtggtcagaacataacaacaaaccatagtggccccctcagcctaaaatatttactgtctggcttttttttttttcctcttttttgagacagggtctcactctcacccaggctggagtgcagtggcgctatctcagcttactgcagtctctggctttcaggctctagcagtcctcccacctcagcctcccgagtagctgggactgctagtagtagtgccaccacgcctggctaaattgtgtatttttgtagagatggggtttcaccatgttgctcaggctggtcttgaactcctgagctgaagcagtccgccctgccttagcctcccaaggtgctgagattatgggtgtgaaccactgtgtacagccctgtctggctctttacagaaagtttgcagacctctgaactagcggggtgttgggatcttagaaaggagatcttccattgacttggccaaaggctcttcttaacttaaaccttcattttctaggaccaagacccctggacctggggcccagtcggccctcagagcccttgcccgctcgggtatgaagatcgggcggattggtaagtgcccccctctagctaatgcttgggtttattttgaagcattggccccaaaaagcacgtgctgtgcccagtggatgtgcagcggctggtctggtcacttttggcagttaagtttgttaagggaggctgcaagaggcaccttgtgacttaaaaatctctccctgaatatctctgtcaccttgatatgaatgtcctgtttcatttgtgaatctctgtcctacactgcctggtgcaggtaaaactgacaagagatgaattgtcctttcctccattcttgaggtcattgctattagcattttgtgtgtaccatctcctgcattgtaggatgttcagcatttttggtttccgcctactaaatatcagttgggcatgccagtcgtgtgacagccaaaaatgaagtggggggtaccagcttctgttattaataccctcaggcctgtgatctcctggctccttacagctcttaggaagggaacagtagtctttccctgcacattgttctgtgcagttagtagcgacatacactgacgccccaggccaaagttcctactgtgtcctacttgaaggatgattttgttttcttgagacagggtctggctctgttgcgtgggctggaattcagtggcacaatctcagctcactgtaaatttcgcctcgtgggcggatctgtccaaaggatcctcccacctgcatctactgagtagctgggacaacagtgtgtgccacaccgggctttttttttttgtagcggggagtttcaccatgttgcccaggttggtcccaaactcctggcctcaggcgttccaccagcctcagtctcccaaagcccaaagtgctaggattacaggcatgagccaccgcgcccagccttaaaagattttttcagactttttttcagtgtctttttacttaatgaaaacgagacagttgcagttaccctgtctaaaagggttttttcctctagagaagacggtgggctagatgtcagaacctggatttgtcctgtgcctctgacatcttgcgcacagctcagcctgtttccctttctggaaagtgagttaagaccacgtcaggaaattcgaggaactggcagatggggccacttcatgttcacatccatctgttaggtactggggagtcatttggggagcagcaggatctgttgctgattggttaggccattggtctagggagtcctgggggcccttcccatccagctccaggcaatgacgctttctcttcctccccacagaggatgtcacccccatcccctctgacagcactcgcaggaaggggggtcgccgtggtcgccgtctgtgaacaagattcctcaaaatattttctgttaataaattgccttcatgtaaactgtttcaactccagccttctctccttcatcaggggctactcaggcatttgatttcttcctcctatttggcttcttgggagaaaggagcctgaggagagctgagatcctggtgctgcatttggggtcttttccatgctacttgcggcattaagttgccttggtcatctaaagcagaccaaggcgttggagacctcgttttgagtggagatgctggttctaaatatggaccaattcttaaagagccagagtgggaactgttgatccaagtgtagcctgaagcgaaagaggagccttccagacccatgccatatataaacacacgtgggtgtgcattctccccccacaccttctgtgcaaagctgggagctcactccactgcgtcttgctttttttcacttggcagatcttggagattgttccacatcagtacataaagtacataaagattgtcaccccacaaatacacaccaagtcctattttcatcagcgataaaaaagaaaagttcttgctttccggaagcttgcatgcggctctgagtacccagtgacaccagatggtactcagcgttttgcaagggattaccacaaggccccgtgatggtgcctgccatggttaggacaggctggtggctgggtagggttagtgagacccagtggagaggatgctgtgtgtcacaggctggagaggtgagaccattgaggtagtcagttgtagaggaaagaaaccagcaagaggggaaaatctgttgggatgctgcttttagcctttgatggcgtgttccaggcagagggaataagcaaataaatgggtcctgagacaaggggttactgtgatgaggcggcgttggttacatgccaaaccttgctagggattttaataacaacattgaatcttaacctgatgaaataacagtactcctggggaggcgggagggatagcattaggagatatacctaatgctaaatgacgagttaatgggtgcagcacaccaacatggcacatgtatacatatgtaacaaacctgcacgttgtgcacatgtaccctaaaacttaaagtataataaaaaaaaaaagcttgcaaaaaaaatataacagtactccttaaattgttaaaagtcatgaaagtcaaggacaggagattaaggaggcgtgaaaactaaatgcccattgtggtatcctggattggattctggaaccagaatagggtattagtataaaaactagtgaaataggataaaggcagggcacagtggttcacgcctataatcccaacactttgggaagccgagacaggaggacggattgagcccaggagtttgagaccagcctgggcaacacagggagaccccgtctctacaaaaaataaaaaattagctgggcatggtggcacacgtctgtactgccagctacttgggaggctgaggtgggagaattgcctgagcctgggaagtggaggccgcagtgagctgtgattgcatcactacattcagcctgggtcacagagcaagatcctatctcaaaaactaaataagtaaataataaattaaaaaatatgaataaagtctggagttaaagtctggaataaagctagtagtaatgtaccagtggtttcctacttttggcaaatgtatcatggcgatgtaagatggtaacaggtgaaaccgggtgagtggcacacagaaactgtatctttgcaactttttggtaaacttaaaattattccaaagtcaaattattagggaaaaaaaatgaggggtgcttttatactgtcagtctggcagtctaaggcaggatgtggtgcacagaccctcaggaggcagacacacctggaggaaaatcctattccacagcttcagaccgttcaaccttaggcaaagtacttaacctctcagccgtttagtggaaactcctgtgatgatggctgcctcaaatggaatcacacaagatcaaagtgtttagcgcagtgcctggcactgaagaagctgctgctattcttacactggtgcaggtcttgtgccaagcagcataaaggacagctggctggaatcgtggtagaaaaatgctgccagtcgccggagcattctttttatttcctgtggtgagactgtaacttgtcctgctctttcctggtaaccagggatgcaatcagccgggtctttgaaagcagttcctttcgggggttttgcctgaaaggagagccaagttgtggtgtggctcaggtgggaacgtagcagcctattgaccgcagaggcggctgggctgctgcccacctgagactgcagcctgcagcagaggcgcctgaagctgcgactgcagccccaaccagacctctagagacagtcgctgcccctctcccctgctccccttctggccgccttcccatgccaaggtttccttcctagcgtttcccagtcttccctctggcctctgcctatctctagaccacattgcaacatgccatctaaaactaactggattctgtcactccctgctgttttctttgagacggagtttcgctctgtcacccagggtggagtgcaatggcatgatctcaggctcactgcaatctctgcctcctgggttggagagattctcctgcctcagcctcccaagtggctgggattacaggtgcccgccaccatgcctggctcatttttgtagagtttcaccatattggccaggcaggtctcaaactcctaacctcaggtgatccgcctgcctcggcttcccaaagtgctggggttacaggcatgagccgccacgcctggccctcccctgctgttttatcactgccctccctgttgtctttagaataggatccaatctcctcagtgaatctcctgtgttttagctggccccaccccatcctccgccctcctctcactctgcccaagccaagcctgtttccctcagttctcccctcctccatgccttctcatgctttcagcctctcctctgtgtcttccttcccagcttggctcatggagcatctactctccccaacttggcctcactatcatctgcttacctgttagaatctgttttgtttttttttgttgttgtttttgagactgggtctcactctgttgcccaggctggagtgcagtggcacaatcacggctcactgcagccttgacctcctgggttcaagtgatcctcctccgcctcagcctcctgagtagctgggactacaagtgtgcatcaccacacccacctatttttaaattttttgtagagactgggtctccctgtgccgcccaggctggtctcgaactcctggactcaagtgaccctcctgccttggcctcccaaagtgctgggatttacaggcatgagccaccgtgcctggcctggaatcaatttttcatcactgtctcaaaagtatcttcctggaggctaggcgcagtggctgacacctgtaattccagcactttgggaggccgaggcgggtggatcacctgacgtcagaagtttgagatcaaaaggtatcttcctggatgccttcaaggtacctctccactgaattctcataacacctctattcccccatggtaccactggtcaccctctatcacaacagcctactcacccccgcaccgccaaagtctatgagccctgagagggaagggagtatgtcttgttcaatgtctgccacatcagcacccagcctgctgaggcagaagaatcgcttgaacccgggaggcggaggttgcagtgagccgagatcatgccattgcactccagcctgggcaaacgagcaaaactccatctaaaaaaaaaaaaagaagaagaaaggaaaaaagaaaaaaccgaatggaaagctgcaggcgaagaatggtggagaatcctggagagcggctgggaggttatacctaggttctatcactccccatccccaaccccaaacaaagtgagggagctgaacttgacattcacattaagccctaaatactctgatttctgggctagcacgagcccaggtaggagtgtccttgagctcttcgcagaagttaaagcacatcctctctgagtaaagcccttgacaacggaatccctccagtttcccacacattaggtaaaaccaaatatgggcccactccctgccctctcagagctcatagaaaaaaatcaacacacacgcaaataaaccaccagaatgagaggcagcagaaacaacaaacagatttagatacccaaaagacttctgatgatattagaattagaatataactacatatgaaatgttgaaagaaatatgcaatggaacaaaaagagtggacaaaacctattaaaaaaatcatgtatattcaaaatggaaccagagaaaaccctcagaaagaaaaacacgtatgatcaatgaaatgaaatgctcagtggataggttaaatggcagattagagccagctgcaagaagagttactggccaggtgaagtggctcacgcctgtaatctcagcactttgggaggccgaggggggcggatcacgaggtcaggagtttgagaccagcctaaccaacatggtgaaaccccatctctgctaaaaatacaaaaattagctgggcctggtggcgcgtgcctatagtcccagctactcaggaggctgaggtaggagaatcgctcaaacccgggaggtggaggttgcagtgagccaagatcgtgctattgcactccagcctgggtgacagagcaagactctgtctcaaaaaaaaaaaaaaaaagttactgaactgcaaaataaatctgaagaaattacaaaacagagaagattccaagaggatttggaactgaagacaattctgcctgagggagcaccggccttgccagcccctctggtgcccagtgagcctccattcacctgggggaccttgcagtgacccctgttgtccagagagggcactagcaaggccatcctcaatctcttggtgcaggatcaggaaaacctttcccaagatgtggctgcaaaggagggttatttactttaaatgggccaaaaaggaaaacgtataagggatttcaaataggtaaagttctgtctcagggaagaggcagcagtgtcgttatgtgtggtcctacgatggtagaagttggctagggaaggagttgtagagaggtagacttgacatcaaataaacaggggtctccttccttccttccttccttccttccttccttccttcctttcttccttccttcttttctttttctttcttcccttctttatttatgtttattttttttgaagacaagacctctgcccagactggagtgcagtagtgtgattgtagctcactgcagcctccacctcccagggtcaagcagtcctcccacctcagcctgctgagtagctgggactacaggtgtgcatcaccattcccaactaattttttccccactttttgtagagatagggtctcacaatgttgcccaggctggtctcgaactcctggggtcaagcaatcatcccactttggcttcccaaagtactgggattacagttgtgagccactatccctggcctaaagaggagttttttatttttatttttatttttttgagacagagtcttgctcttgttgcccaggttggagtgcaatggcaccatctctgctcactgcaacctccgcctcccaggttcaagcaattctcctgccgcagcctcctgagtagctgggattaacaggcacctgacaccacacccgactaatttttgtatttttagtagagatgaggtttcattatattggccaggctggtctcgaattcctgacctcaggtgatctgcctgcctcggccttccaaagtgctgggattacaggcgtgagccctgcgcctggcctaaaaaggagttttctaaaagagctgctcagagatttaaactgcttcatgagatagtgatctctccatcactggaggcatacacgtgtaaaagacttccaaaggctagttatatcagaaacacataaaagagaaaggtgcaagcagtgaaattcaaatgctcccaaaccaaacataccatctctcttctcccttactgaaaacaacaataaaacccactagaattagcaccaaagaaatacaacgtaagccacaaaagtgaaccacatatgtaatttcaaattttctagtagccatattaataaagtaccaaaaagtgacattaattttaataatatatttcatttaacccaatatgtccaaaatattttcacttcaacatataatcaaaataaaaattattaataagatgttttactgtttttttgtggtaagtttgagattcattgtacatttacacttatagcacacttccatttggacttgccacatttcaaggactcaaccaccatgtggcagagataattgtgtcccagtatgctttctcttcatcttctattggaaataggaatctcaatttttagctgcgtgtatggctgatcagaatgaagatgacattttatggaggatggtctgagcaatattaaaatagaaaaaaaagaagaaacatagaattaagagaaacaaggaataaacagtacagtttccagccccctcccaggcagctaagtgtcactcacacaactaagttgtggccagtgagaagtaagcagagtcatgaatgcagtctacagtctacagggagagtcttgaagaggagatggcatgaccttcttctctttcctctagatactcacttttagatctctgctggaaactgtcgccttatcagacaaacttccctgacatcacagatccattagcatccctcacctctgcccatcattctcaagctatttatccatgtatgcggccaaatgtgtagatcttagcccaacttggtattaacatctatatcaccaagtcagtggttctcaaacaagtatgcatcagattcagattgctgggctcccaccccgagtttctgattcagtagatctgggatggaggcctgaatatctgcctgcctgcctgcctgcctgcctgcctgccttcccttcctccctgccttcttccttcttttctttctttcctttctttctcttttctttctttctttttctttctttctttcctttttctttttctttccttctttctttctccttccttccttccctccctgcctgcctctttccttccctccctccttccttcctttcttttctttctttttctttctttctttctttctttctttctttctttctttctttctttctttcttttttctctttctttctttctttctcttccttccttccttccttccttccttccttccttccttccttccttccatctttctttctttttctttatttagaggtggggtcttgctatgttgccctcactggtcttgaactccagggctcaattgattacccaacccagcctccaaaatgccgggattataggcatgagccaccgcacccggtctgaagatttgtatttctaagttcccaagtagtgctgatgttgatggttcagagaccacattttgagaaccactgggcttggtgactactggacttttccgttcaggtcactgctgtcccagcacctgagacaatgcgtacctggtatcatataaatatttatgactcatattacaagtattacctcattcagtcgctttgaggtaagtactgttattatcaaaatttaacatgtgaggaaactgagggtcagagaggttaagtgactcgtccaggggcacacagctggaaaggggcaggagcaaggattcaaacttacatacgcttgtctataaccacagaccgtgcccttaatcgccacactctttcacttctagcaggctggggctcagtgcaatcaggctaccaaggaagtcgaggaggaggaggacccgccctgtctcagcatctcttcagagggctgggaagtacacggtagcagagtcctgcccctgaagggagccccgttgccgtgggagcttacatcagtcatatataggtggccaccaggtggcagcattgttctgacaggaagccgcgtgctgccttgctgtcttagttctgatctgggttctgccacccctggttcagtggccctcagcctatccatttcttatgtgcctccgtttcctcatctttacaaaaaggagattgcatctctgtgatctctgaagagcccttgcacctcagatgccatgtaaaagagaaaggtgcagccagtggaattcaaatgctcccaaaccaaaccagatctcctcccccccactgaaaacaacaataaaacccactagaattagcaccaaagaaatatgatgcaagccacagaagtgagccacaggtgtaatttcaaattttccagtagccacactgataaagtatcacaaaatgacattaattttaataatatatttcatgtaacccaatatgttcaaaatattttcattccaacatataatcaatataaaaattattaagatgttttactttttttgtgtgaagtttgagatccattgtactttttttttttgagacggagtctctctgtcactcaggctggagtgcagtggcacaatcttgtctcactgcaacctctacctcccgggttcaagcaattctcctgtctcagcctcccaagtagctgggattacaggcacccaccaccacacctggctaatttttgtatttttagtagagacagggtttcaccatgttggtcaggctggtcttgaactcctgaactcaggtgatccacccgcctcagcctctcaaagtgctgggattacaggcctgagccactgagcccggctggtcccttatatatttccacttatagcacacttccatttggactagccacatttcaagggctcaaccaccatgtgtagctagtggctgccatgttagacagcacagccttagatattaatgccaaacatttattgaggtaggtactatgccgagtgttttacatgcattctctttttttttttttttttttccgagacagagtttcgctctgtcacccaggctggagtgcaatggcactatcttggttcactgcaaccttcgcctcccgggttcaagcgagattctccccttcagcctcccgagtagcgaggagtacaggcacctgctatcatgctggctagttttttgcatttttagtagagacggggtttcaccatattggccaggctggtctcgaactcctgacctcatgatccacctgcctcggcctcccaaagtgctgggattacaggtgtgagccactgcgcctggctgcattctcttaatcaatcttcacaacatgctatgaagcaggcaagattattattattattagtcctgttttgcagatgagaaaactgaggcttgcttagggagactaagtgcctcagccaagatcacacagcaagtaagtggaggagtctggatttgaacttagctctgcctggctccggagtccgggcccttcatcatgacatcatcctgccctgatggcagatgcttagggtatgctgtcagagaggcctaccgacagggattccaaatccaagtaatgcaaattcctgggagtaaacaatcaggcctgtcagggcaggaggggaggccctgaagctacattctcccacccgccgcagttgtgtgtctggcaaagttgagcttgcctggcaaacaaccaatgactctgacaagaagaaaccatgatcttggggaaattatgtttgcatgatgaaaaatggaacttgcaaaaagaaaatctggcatcaagtggccgggtgcagtggctcaagcctgtaatcccagcactttgggtggccaaggcaggcggatcacttgaggtcatgagttcaagaccagcctggccaacatggtgaagccctgtctctactaaaaaaaaaaaaaaaaaaaaaaaaattagccaggtgtggtggcagtcatctgtaatcccagctacttaggaggttgaggcaggagaattgcttaaagccaggaggtggagattacagtgagccgagatcatgacactgcactctagcctgggcgacagagggagactccatctcaaaaaaaaaaaacaaaataaaaccaaaaactctggcatcaggagaaaattaaaattgagaaatggactagggtggctcacgcctgtagtcccaacactttggaaggccaaggtgggcggatcacttgagcctaggagttcgaggccagccatggggagactctgtctctacaaaaataccaaaattacccaggcattgtggtgtgaacctgttgttccaactactcaagaggctgaggtgggaggatggcttgagtccaggaggcagaggttgcagtaagctgagatggaatcactacactccagcctgggtgatggagcaagactctgtctcaaaaaagaaaaagaaaaattgagaaatgcagaacaataggaataacctgcaggtgagtgcgaaagagggtagaattccaagggacagagctagacctaaagtatggaagttacagggaggcaagctgtggtgcgacattagggaaaatagcactaactagactgacgatgttatacagctgaaatttattaagcacttatcaagcaacttaaatgtagcagcttattggctgggtgcggtgactcacgcctgttatcccagcactttgggaggctgaggcggctggatcacctgaggtcaggagtttgagaccagcctggccaacatggtgaatcccagtctctactaaaaatacaaaagttagccaggcatggtggtgcacacctgtagtgctagctactcaggaggctgaggcaggagaatcacaagaacccaggaggcggaggttgcagtgagccaagatgccgttgcactccagcctgggtgacagagtgagactgtctcaaaaaaaaaaaaaaaagtagcagcttatttaattctcatactcacagtaggaagtagcatgcaagtagaccatcagaggtgtaaggaagtagatactgctattattaccctttttgtttttgtttttttagagacagggtcttgctctgttgcccaggctggagtgcaatggtgtgatcacagctcactgcagcctcaaactcctgagactatcagagatgtgaggaattaggtattgctattattacctttttctatttttttttgagatggagttttgctcttgttgcccaagctggagtgcattggcaccatctcagcttacagcaacctccacctcccaggttcaagcaattctcctgcctcagcctcccaagtagctggtatttacaggcgtctgccaccttgcccagctaatttttatatttttaatagagacagggtttcaccatgttggccaggctggtctcgaactcctgacctcaagcgatccgctcacctcagcctcccaaagtggtgggattacaggcgtgagccaccacacctggcctgcctcttttggttttgttttttcagagatagggtcttgttctgttgcccaggctggagtgcagtggtgcgatcatggctcactgcagcctcgaactcccaggttcaagtgatcctcctgccttagctttcagagtagctagaactataggcatacaccaccatgcctggctaatcaaaaaaaaattttttttgagatggagtctggagtgcagtggcgcaatcttggctcactgcaagctccgcctcccaggttcacgccattctcctgcctcaggctcctgggattacaggcgcccgccaccacgcccggctaatttttttgtatttttagtagagacggggtttcaccgtggtctcgatctcctgaccttgtgatctgcccgcctcggcctcccaaagtgctgggattacaggcgtgagccactgcacctggcctaatttttttgtttttaagagatgggcgtcaccctatgttgtccaggctagtcttgaactcctgggctcaaggcaatcctccttccttgacctcccaaattgttgggattagagggatggaccactgtgccaggctgttattac

SEQ ID NO: 96 - DNA, 29528 bp, Homo sapiens
gtaataacagcctggcacagtggtccatccctctaatcccaacaatttgggaggtcaaggaaggaggattgccttgagcccaggagttcaagactagcctggacaacatagggtgacgcccatctcttaaaaacaaaaaaattaggccaggtgcagtggctcacgcctgtaatcccagcactttgggaggccgaggcgggcagatcacaaggtcaggagatcgagaccacggtgaaaccccgtctctactaaaaatacaaaaaaattagccgggcgtggtggcgggcgcctgtaatcccaggagcctgaggcaggagaatggcgtgaacctgggaggcggagcttgcagtgagccaagattgcgccactgcactccagactccatctcaaaaaaaatttttttttgattagccaggcatggtggtgtatgcctatagttctagctactctgaaagctaaggcaggaggatcacttgaacctgggagttcgaggctgcagtgagccatgatcgcaccactgcactccagcctgggcaacagaacaagaccctatctctgaaaaaacaaaaccaaaagaggcaggccaggtgtggtggctcacgcctgtaatcccaccactttgggaggctgaggtgagcggatcgcttgaggtcaggagttcgagaccagcctggccaacatggtgaaaccctgtctctattaaaaatataaaaattagctgggcaaggtggcagacgcctgtaaataccagctacttgggaggctgaggcaggagaattgcttgaacctgggaggtggaggttgctgtaagctgagatggtgccaatgcactccagcttgggcaacaagagcaaaactccatctcaaaaaaaaatagaaaaaggtaataatagcaatacctaattcctcacatctctgatagtctcaggagtttgaggctgcagtgagctgtgatcacaccattgcactccagcctgggcaacagagcaagaccctgtctctaaaaaaacaaaaacaaaaagggtaataatagcagtatctacttccttacacctctgatggtctacttgcatgctacttcctactgtgagtatgagaattaaataagctgctacttttttttttttttttgagacagtctcactctgtcacccaggctggagtgcaacggcatcttggctcactgcaacctccgcctcctgggttcttgtgattctcctgcctcagcctcctgagtagctagcactacaggtgtgcaccaccatgcctggctaacttttgtatttttagtagagactgggattcaccatgttggccaggctggtctcaaactcctgacctcaggtgatccagccgcctcagcctcccaaagtgctgggataacaggcgtgagtcaccgcacccagccaataagctgctacatttaagttgcttgataagtgcttaataaatttcagctgtataacatcgtcagtctagttagtgctattttccctaatgtcgcaccacagcttgcctccctgtaacttccatactttaggtctagctctgtcccttggaattctaccctctttcgcactcacctgcaggttattcctattgttctgcatttctcaatttttctttttcttttttgagacagagtcttgctccatcacccaggctggagtgtagtgattccatctcagcttactgcaacctctgcctcctggactcaagccatcctcccacctcagcctcttgagtagttggaacaacaggttcacaccacaatgcctgggtaattttggtatttttgtagagacagagtctccccatggctggcctcgaactcctaggctcaagtgatccgcccaccttggccttccaaagtgttgggactacaggcgtgagccaccctagtccatttctcaattttaattttctcctgatgccagagtttttggttttattttgttttttttttttgagatggagtctccctctgtcgcccaggctagagtgcagtgtcatgatctcggctcactgtaatctccacctcctggctttaagcaattctcctgcctcaacctcctaagtagctgggattacagatgactgccaccacacctggctaatttttttttttttttttttttttttagtagagacagggcttcaccatgttggccaggctggtcttgaactcatgacctcaagtgatccgcctgccttggccacccaaagtgctgggattacaggcttgagccactgcacccggccacttgatgccagattttctttttgcaagttccatttttcatcatgcaaacataatttccccaagatcatggtttcttcttgtcagagtcattggttgtttgccaggcaagctcaactttgccagacacacaactgcggcgggtgggagaatgtagcttcagggcctcccctcctgccctgacaggcctgattgtttactcccaggaatttgcattacttggatttggaatccctgtcggtaggcctctctgacagcataccctaagcatctgccatcagggcaggatgatgtcatgatgaagggcccggactccggagccaggcagagctaagttcaaatccagactcctccacttacttgctgtgtgatcttggctgaggcacttagtctccctaagcaagcctcagttttctcatctgcaaaacaggactaataataataataatcttgcctgcttcatagcatgttgtgaagattgattaagagaatgcagccaggcgcagtggctcacacctgtaatcccagcactttgggaggccgaggcaggtggatcatgaggtcaggagttcgagaccagcctggccaatatggtgaaaccccgtctctactaaaaatgcaaaaaactagccagcatgatagcaggtgcctgtactcctcgctactcgggaggctgaaggggagaatctcgcttgaacccgggaggcgaaggttgcagtgaaccaagatagtgccattgcactccagcctgggtgacagagcgaaactctgtctcggaaaaaaaaaaaaaaaaaaagagaatgcatgtaaaacactcggcatagtacctacctcaataaatgtttggcattaatatctaaggctgtgctgtctaacatggcagccactagctacacatggtggttgagcccttgaaatgtggctagtccaaatggaagtgtgctataagtggaaatatataagggaccagccgggctcagtggctcaggcctgtaatcccagcactttgagaggctgaggcgggtggatcacctgagttcaggagttcaagaccagcctgaccaacatggtgaaaccctgtctctactaaaaatacaaaaattagccaggtgtggtggtgggtgcctgtaatcccagctacttgggaggctgagacaggagaattgcttgaacccgggaggtagaggttgcagtgagacaagattgtgccactgcactccagcctgagtgacagagagactccgtctcaaaaaaaaaaagtacaatggatctcaaacttcacacaaaaaaagtaaaacatcttaataatttttatattgattatatgttggaatgaaaatattttgaacatattgggttacatgaaatatattattaaaattaatgtcattttgtgatactttatcagtgtggctactggaaaatttgaaattacacctgtggctcacttctgtggcttgcatcatatttctttggtgctaattctagtgggttttattgttgttttcagtgggggggaggagatctggtttggtttgggagcatttgaattccactggctgcacctttctcttttacatggcatctgaggtgcaagggctcttcagagatcacagagatgcaatctcctttttgtaaagatgaggaaacggaggcacataagaaatggataggctgagggccactgaaccaggggtggcagaacccagatcagaactaagacagcaaggcagcacgcggcttcctgtcagaacaatgctgccacctggtggccacctatatatgactgatgtaagctcccacggcaacggggctcccttcaggggcaggactctgctaccgtgtacttcccagccctctgaagagatgctgagacagggcgggtcctcctcctcctcgacttccttggtagcctgattgcactgagccccagcctgctagaagtgaaagagtgtggcgattaagggcacggtctgtggttatagacaagcgtatgtaagtttgaatccttgctcctgcccctttccagctgtgtgcccctggacgagtcacttaacctctctgaccctcagtttcctcacatgttaaattttgataataacagtacttacctcaaagcgactgaatgaggtaatacttgtaatatgagtcataaatatttatatgataccaggtacgcattgtctcaggtgctgggacagcagtgacctgaacggaaaagtccagtagtcaccaagcccagtggttctcaaaatgtggtctctgaaccatcaacatcagcactacttgggaacttagaaatacaaatcttcagaccgggtgcggtggctcatgcctataatcccggcattttggaggctgggttgggtaatcaattgagccctggagttcaagaccagtgagggcaacatagcaagaccccacctctaaataaagaaaaagaaagaaagatggaaggaaggaaggaaggaaggaaggaaggaaggaaggaaggaaggaagagaaagaaagaaagaaagagaaaaaagaaagaaagaaagaaagaaagaaagaaagaaagaaagaaagaaagaaagaaaaagaaagaaaagaaaggaaggaaggagggagggaaggaaagaggcaggcagggagggaaggaaggaaggagaaagaaagaaggaaagaaaaagaaaaaggaaagaaagaaagaaaaagaaagaaagaaaagagaaagaaaggaaagaaagaaaagaaggaagaaggcagggaggaagggaaggcaggcaggcaggcaggcaggcaggcaggcagatattcaggcctccatcccagatctactgaatcagaaactcggggtgggagcccagcaatctgaatctgatgcatacttgtttgagaaccactgacttggtgatatagatgttaataccaagttgggctaagatctacacatttggccgcatacatggataaatagcttgagaatgatgggcagaggtgagggatgctaatggatctgtgatgtcagggaagtttgtctgataaggcgacagtttccagcagagatctaaaagtgagtatctagaggaaagagaagaaggtcatgccatctcctcttcaagactctccctgtagactgtagactgcattcatgactctgcttacttctcactggccacaacttagttgtgtgagtgacacttagctgcctgggagggggctggaaactgtactgtttattccttgtttctcttaattctatgtttcttcttttttttctattttaatattgctcagaccatcctccataaaatgtcatcttcattctgatcagccatacacgcagctaaaaattgagattcctatttccaatagaagatgaagagaaagcatactgggacacaattatctctgccacatggtggttgagtccttgaaatgtggcaagtccaaatggaagtgtgctataagtgtaaatgtacaatgaatctcaaacttaccacaaaaaaacagtaaaacatcttattaataatttttattttgattatatgttgaagtgaaaatattttggacatattgggttaaatgaaatatattattaaaattaatgtcactttttggtactttattaatatggctactagaaaatttgaaattacatatgtggttcacttttgtggcttacgttgtatttctttggtgctaattctagtgggttttattgttgttttcagtaagggagaagagagatggtatgtttggtttgggagcatttgaatttcactgcttgcacctttctcttttatgtgtttctgatataactagcctttggaagtcttttacacgtgtatgcctccagtgatggagagatcactatctcatgaagcagtttaaatctctgagcagctcttttagaaaactcctttttaggccaggcgcagggctcacgcctgtaatcccagcactttggaaggccgaggcaggcagatcacctgaggtcaggaattcgagaccagcctggccaatataatgaaacctcatctctactaaaaatacaaaaattagtcgggtgtggtgtcaggtgcctgttaatcccagctactcaggaggctgcggcaggagaattgcttgaacctgggaggcggaggttgcagtgagcagagatggtgccattgcactccaacctgggcaacaagagcaagactctgtctcaaaaaaataaaaataaaaataaaaaactcctctttaggccagggatagtggctcacaactgtaatcccagtactttgggaagccaaagtgggatgattgcttgaccccaggagttcgagaccagcctgggcaacattgtgagaccctatctctacaaaaagtggggaaaaaattagttgggaatggtgatgcacacctgtagtcccagctactcagcaggctgaggtgggaggactgcttgaccctgggaggtggaggctgcagtgagctacaatcacactactgcactccagtctgggcagaggtcttgtcttcaaaaaaaataaacataaataaagaagggaagaaagaaaaagaaaagaaggaaggaagaaaggaaggaaggaaggaaggaaggaaggaaggaaggaaggagacccctgtttatttgatgtcaagtctacctctctacaactccttccctagccaacttctaccatcgtaggaccacacataacgacactgctgcctcttccctgagacagaactttacctatttgaaatcccttatacgttttcctttttggcccatttaaagtaaataaccctcctttgcagccacatcttgggaaaggttttcctgatcctgcaccaagagattgaggatggccttgctagtgccctctctggacaacaggggtcactgcaaggtcccccaggtgaatggaggctcactgggcaccagaggggctggcaaggccggtgctccctcaggcagaattgtcttcagttccaaatcctcttggaatcttctctgttttgtaatttcttcagatttattttgcagttcagtaactttttttttttttttttgagacagagtcttgctctgtcacccaggctggagtgcaatagcacgatcttggctcactgcaacctccacctcccgggtttgagcgattctcctacctcagcctcctgagtagctgggactataggcacgcgccaccaggcccagctaatttttgtatttttagcagagatggggtttcaccatgttggttaggctggtctcaaactcctgacctcgtgatccgcccccctcggcctcccaaagtgctgagattacaggcgtgagccacttcacctggccagtaactcttcttgcagctggctctaatctgccatttaacctatccactgagcatttcatttcattgatcatacgtgtttttctttctgagggttttctctggttccattttgaatatacatgatttttttaataggttttgtccactctttttgttccattgcatatttctttcaacatttcatatgtagttatattctaattctaatatcatcagaagtcttttgggtatctaaatctgtttgttgtttctgctgcctctcattctggtggtttatttgcgtgtgtgttgatttttttctatgagctctgagagggcagggagtgggcccatatttggttttacctaatgtgtgggaaactggagggattccgttgtcaagggctttactcagagaggatgtgctttaacttctgcgaagagctcaaggacactcctacctgggctcgtgctagcccagaaatcagagtatttagggcttaatgtgaatgtcaagttcagctccctcactttgtttggggttggggatggggagtgatagaacctaggtataacctcccagccgctctccaggattctccaccattcttcgcctgcagctttccattcggttttttcttttttcctttcttcttctttttttttttttagatggagttttgctcgtttgcccaggctggagtgcaatggcatgatctcggctcactgcaacctccgcctcccgggttcaagcgattcttctgcctcagcaggctgggtgctgatgtggcagacattgaacaagacatactcccttccctctcagggctcatagactttggcggtgcgggggtgagtaggctgttgtgatagagggtgaccagtggtaccatgggggaatagaggtgttatgagaattcagtggagaggtaccttgaaggcatccaggaagataccttttgatctcaaacttctgacgtcaggtgatccacccgcctcggcctcccaaagtgctggaattacaggtgtcagccactgcgcctagcctccaggaagatacttttgagacagtgatgaaaaattgattccaggccaggcacggtggctcatgcctgtaaatcccagcactttgggaggccaaggcaggagggtcacttgagtccaggagttcgagaccagcctgggcggcacagggagacccagtctctacaaaaaatttaaaaataggtgggtgtggtgatgcacacttgtagtcccagctactcaggaggctgaggcggaggaggatcacttgaacccaggaggtcaaggctgcagtgagccgtgattgtgccactgcactccagcctgggcaacagagtgagacccagtctcaaaaacaacaacaaaaaaaaacaaaacagattctaacaggtaagcagatgatagtgaggccaagttggggagagtagatgctccatgagccaagctgggaaggaagacacagaggagaggctgaaagcatgagaaggcatggaggaggggagaactgagggaaacaggcttggcttgggcagagtgagaggagggcggaggatggggtggggccagctaaaacacaggagattcactgaggagattggatcctattctaaagacaacagggagggcagtgataaaacagcaggggagggccaggcgtggcggctcatgcctgtaaccccagcactttgggaagccgaggcaggcggatcacctgaggttaggagtttgagacctgcctggccaatatggtgaaactctacaaaaatgagccaggcatggtggcgggcacctgtaatcccagccacttgggaggctgaggcaggagaatctctccaacccaggaggcagagattgcagtgagcctgagatcatgccattgcactccaccctgggtgacagagcgaaactccgtctcaaagaaaacagcagggagtgacagaatccagttagttttagatggcatgttgcaatgtggtctagagataggcagaggccagagggaagactgggaaacgctaggaaggaaaccttggcatgggaaggcggccagaaggggagcaggggagaggggcagcgactgtctctagaggtctggttggggctgcagtcgcagcttcaggcgcctctgctgcaggctgcagtctcaggtgggcagcagcccagccgcctctgcggtcaataggctgctacgttcccacctgagccacaccacaacttggctctcctttcaggcaaaacccccgaaaggaactgctttcaaagacccggctgattgcatccctggttaccaggaaagagcaggacaagttacagtctcaccacaggaaataaaaagaatgctccggcgactggcagcatttttctaccacgattccagccagctgtcctttatgctgcttggcacaagacctgcaccagtgtaagaatagcagcagcttcttcagtgccaggcactgcgctaaacactttgatcttgtgtgattccatttgaggcagccatcatcacaggagtttccactaaacggctgagaggttaagtactttgcctaaggttgaacggtctgaagctgtggaataggattttcctccaggtgtgtctgcctcctgagggtctgtgcaccacatcctgccttagactgccagactgacagtataaaagcacccctcattttttttccctaataatttgactttggaataattttaagtttaccaaaaagttgcaaagatacagtttctgtgtgccactcacccggtttcacctgttaccatcttacatcgccatgatacatttgccaaaagtaggaaaccactggtacattactactagctttattccagactttaactccagactttattcatattttttaatttattatttacttatttagtttttgagataggatcttgctctgtgacccaggctgaatgtagtgatgcaatcacagctcactgcggcctccacttcccaggctcaggcaattctcccacctcagcctcccaagtagctggcagtacagacgtgtgccaccatgcccagctaattttttattttttgtagagacggggtctccctgtgttgcccaggctggtctcaaactcctgggctcaatccgtcctcctgtctcggcttcccaaagtgttgggattataggcgtgaaccactgtgccctgcctttatcctatttcactagtttttatactaataccctattctggttccagaatccaatccaggataccacaatgggcatttagttttcacgcctccttaatctcctgtccttgactttcatgacttttaacaatttaaggagtactgttatattttttttgcaagctttttttttttattatactttaagttttagggtacatgtgcacaacgtgcaggtttgttacatatgtatacatgtgccatgttggtgtgctgcacccattaactcgtcatttagcattaggtatatctcctaatgctatccctcccgcctccccaggagtactgttatttcatcaggttaagattcaatgttgttattaaaatccctagcaaggtttggcatgtaaccaacgccgcctcatcacagtaaccccttgtctcaggacccatttatttgcttattccctctgcctggaacacgccatcaaaggctaaaagcagcatcccaacagattttcccctcttgctggtttctttcctctacaactgactacctcaatggtctcacctctccagcctgtgacacacagcatcctctccactgggtctcactaaccctacccagccaccagcctgtcctaaccatggcaggcaccatcacggggccttgtggtaatcccttgcaaaacgctgagtaccatctggtgtcactgggtactcagagccgcatgcaagcttccggaaagcaagaacttttcttttttatcgctgatgaaaataggacttggtgtgtatttgtggggtgacaatctttatgtactttatgtactgatgtggaacaatctccaagatctgccaagtgaaaaaaagcaagacgcagtggagtgagctcccagctttgcacagaaggtgtggggggagaatgcacacccacgtgtgtttatatatggcatgggtctggaaggctcctctttcgcttcaggctacacttggatcaacagttcccactctggctctttaagaattggtccatatttagaaccagcatctccactcaaaacgaggtctccaacgccttggtctgctttagatgaccaaggcaacttaatgccgcaagtagcatggaaaagaccccaaatgcagcaccaggatctcagctctcctcaggctcctttctcccaagaagccaaataggaggaagaaatcaaatgcctgagtagcccctgatgaaggagagaaggctggagttgaaacagtttacatgaaggcaatttattaacagaaaatattttgaggaatcttgttcacagacggcgaccacggcgaccccccttcctgcgagtgctgtcagaggggatgggggtgacatcctctgtggggaggaagagaaagcgtcattgcctggagctggatgggaagggcccccaggactccctagaccaatggcctaaccaatcagcaacagatcctgctgctccccaaatgactccccagtacctaacagatggatgtgaacatgaagtggccccatctgccagttcctcgaatttcctgacgtggtcttaactcactttccagaaagggaaacaggctgagctgtgcgcaagatgtcagaggcacaggacaaatccaggttctgacatctagcccaccgtcttctctagaggaaaaaacccttttagacagggtaactgcaactgtctcgttttcattaagtaaaaagacactgaaaaaaagtctgaaaaaatcttttaaggctgggcgcggtggctcatgcctgtaatcctagcactttgggctttgggagactgaggctggtggaacgcctgaggccaggagtttgggaccaacctgggcaacatggtgaaactccccgctacaaaaaaaaaaagcccggtgtggcacacactgttgtcccagctactcagtagatgcaggtgggaggatcctttggacagatccgcccacgaggcgaaatttacagtgagctgagattgtgccactgaattccagcccacgcaacagagccagaccctgtctcaagaaaacaaaatcatccttcaagtaggacacagtaggaactttggcctggggcgtcagtgtatgtcgctactaactgcacagaacaatgtgcagggaaagactactgttcccttcctaagagctgtaaggagccaggagatcacaggcctgagggtattaataacagaagctggtaccccccacttcatttttggctgtcacacgactggcatgcccaactgatatttagtaggcggaaaccaaaaatgctgaacatcctacaatgcaggagatggtacacacaaaatgctaatagcaatgacctcaagaatggaggaaaggacaattcatctcttgtcagttttacctgcaccaggcagtgtaggacagagattcacaaatgaaacaggacattcatatcaaggtgacagagatattcagggagagatttttaagtcacaaggtgcctcttgcagcctcccttaacaaacttaactgccaaaagtgaccagaccagccgctgcacatccactgggcacagcacgtgctttttggggccaatgcttcaaaataaacccaagcattagctagaggggggcacttaccaatccgcccgatcttcatacccgagcgggcaagggctctgagggccgactgggccccaggtccaggggtcttggtcctagaaaatgaaggtttaagttaagaagagcctttggccaagtcaatggaagatctcctttctaagatcccaacaccccgctagttcagaggtctgcaaactttctgtaaagagccagacagggctgtacacagtggttcacacccataatctcagcaccttgggaggctaaggcagggcggactgcttcagctcaggagttcaagaccagcctgagcaacatggtgaaaccccatctctacaaaaatacacaatttagccaggcgtggtggcactactactagcagtcccagctactcgggaggctgaggtgggaggactgctagagcctgaaagccagagactgcagtaagctgagatagcgccactgcactccagcctgggtgagagtgagaccctgtctcaaaaaagaggaaaaaaaaaaaagccagacagtaaatattttaggctgagggggccactatggtttgttgttatgttctgaccactgtctggcttgttcacgcaacagtcatctatttcagctttcatgcccccatcactcaaatccaggtccttcccctctcctacaggactccacctcttcccctctgactgcacctcatgccactctttccttcacaggtgcccaggttcacccccacctcaagacctttccctgcagttgtctctagctggaataccctcctcctgtccttatttcactggaaggactccggacttatcatttagaccctagtttaaattacactttatcaccaactccttacttgtgcttcctggcatttgtcacaaatgaaaaccacatactccctggtgctctgttgtttaaagtctgactctcccaccagcctcggtcccacacaaggagggtagagaccatgtctgtttccccatcactctcttctagtacctgaaacacagctcctagtatacagtgggtgctcaacactgagctgctggggggtgtacacaggagccaattattaagtatgtatatgcctaaaatatcttgttcaaggtcacaacaaaaaacccaaacctcaaatccaggtgctccagcacccaagcccagcaggttttctaccacccagccatcccctctgcgactcgtacctatttcctcctgtggcccggagtttgatgtgtagggcggtgatacccagctccttgcacctctgggccacatcctgggcagccaacatagcagcatatggtgaggattcatctcggtctgcctttaccttcatcccaccagtcacacggcagatggtttccctggggacaaaagcacagggtcatttcttcctcgtccaacaaggagtgcttacgatatcctaatgagtgaagagcaacacagctcagtcatggtggaggatgatggtcatgggctctgccctcatggagttcagtccagtggggttgaatggcccaatatagctatactcagtattaacattttatatatctacttttgcatttaatccttaccattactccacaaggtagacattactgtcctaattttacatatgaggaaaccaaaactcagaatctgagtgatttcacacaagtcacaacttgctaaatggccgtcgaacccgcacccagagcccacttgcagtccactgctgctcctgcaaagggaactagggaaagaagataattcccaagaaaccaaggattcaatgaccatcacgctgtaaggacgaagaatgtgtctcctctcttgtaacccctgggaaatcacaatatttgtgggctaaatggacaagcacattttcttacctggacaaaacagcatttctttagagagaatcccctgaactgctagcccgtcccagccattgccttcctcagccttttgccagctggatgcctctccacccaggtactcacttgccagaaagatcagtgacatggacaaaagtgtcattgaaggatgcaaagatatggcagacaccaaatacattctctccttcagccacctgaggtccgaggctgatgacctgttcttccttcttttccttcccctttcgaggtgccatttctgagtggaaggaaaagaaactcaaggttaacagacaaaacatttccagaatccctttcccctggctattaaatgaaaccctagtcctgcttcatgtccctgtcttcttccatccaatactctactgtattctctcatttctgcctcactaaaacttctttctccttgcacttgggggggtatcaactgtggccacatggcaaagtaccatgagaagtatcctttccccagaaactaccaacagctcagctcacagcacctacaagatagaagcctagggatctagcagcagatgcctgaaggctgcaccccaaaaggcaagaagaaacccaagaccaacagctacccatgtactggtaccattcctaacacccttcatggggcgagggagctgcttgattcctgcatgaactcctcagcttagaattcaagggacccttaccaacacagccctcaagcctctcatctcctgttttcctgtgctccacctgatcccttcaaaatgttcaaaaatgcaactgatttgactcccacaactatttagaactaaatctttgtcaccaacatcaaatatcaaaggcactaaaatatatccaaaaggcaggctaatggaaaagacccatctcagaaatctgatgggtcctgagactaaataactctaacctattatgaccttcataataattgcaatcatactgtcacaagatctaagggagagagaaactgacaggaggaaggcgggtgagaatgaatgagaaagtggaaggctaggataagactgcttccggcctaaagccccaggccttctgaacctcctggtgttcagaacaatttaacattttcagaagacactaacactaatcgatatcctgcagatggtgaagatagagagtgtctcagcctatggtcacagtaaagacagtggcaaaaccaaacatagaaacaacgtgtcctgactcccagcccagcactctctgcctcctgccaagatgcctctacaccacaaataactaccctagtctgtctcaggtgttcctagatctctcctctgccttccctatataaactttagttaagtgtgtgaccacagtaagtacttcaagtgtaagtcttgggtgtacgaagttaaatgttcctatcttcaaatcagaccaatgagcacgacccagtgcgttaactattgtaaggaacgcgccacaggagagaagcccaaagttctgcctcgagaagcatagaaaggctccagcatatctcaaatacgtaagcatgagtatgtttcggcatgatggccattcagtaaatgccaatttgcagtttctccgttcctaacatcccctaaagtaacgagcagagtggtcatcaggagtatataaacgcagggcaagcgcacagcaaacattggtgctgggccctgagcgcccagaacttgcaacgtgcccgactcagcaacggaaagaatcgcccagatttagaagcatccaacatagtgcgagagttttccctgctttccttctttgaatgatcactacaaacccatgggatcggtgctattgttattcctattttgcaaacgaggaaacaaacgagattaggcgtgggcctgcgatcaccaagaaaaaagtttggcgaggtagaggcgggagcccacgtctgtcccgggttccctcaactacgctgtgcagctcaaacgcggccgtggccgtggccgtattgcggggccgaggccttaaaaggctggacccgcactcacccttacttcacaagctcctccctgaaagcaaaacgggccttctgagaccaggaacgaactcaatcccgagttggccaggatccaggtgggccagccgcgcgtctcttgcccggcacctagctcggttcccacggaaagacccccgtctctcgtcccaagccccacagggtcccctcgccgcaggatgccccccgattgtcgcgcccgggcctcctacctgcacgtcgtctccagactccacaccggaaagagagagtgggagggggcggagcgacgggggtcacttccgtgtcccggaagtatacctctgaggtcacggggcgaggtcgggttccggaagacgccggcattattcctcccaaagagtttaagactcgtcataaggaaagacggtttattacttaagggagagcgaaaagaggtagagggctggttgtcgctgcgagcgggtcggcctaagcgacagtacgaagcggctacacccgcggggtgaggtgggcctgtattccatgatggcggtggtcgtggctagacagacttccgccatcctgactcccgccctggcagccttggagcggcagcgccccttgtgtggagcaggggaataacaacaacaaaacggccttaattaaagctagggtggcgccggcctgtggtcccagttactcaggaggctgaggatcgcttcgtccaagtagttcgaggccagcctaggcaacatagtcggggaaaacacaccgtaatcacttactttggcatattatataatgggcaaaataagaataaattattcaatatgtattttcagaccggtctgggctaaacagtttatatgcattgcttcatttactcctcaagacattatcaaataattttgatttccctcttacagataaaggatgttaactgagagcacacctttgcagaagggtttggaattctagcttcaaagccctcgtgtttaatagctacttccacatagccctctaataacaatatacatgtatatatttcgaccgaatcttgttctgtagccaaggctggagtgcagtggcgcaatctcggctgaccgcaacctctgcctcccaggttcaagctattctgcctcagcctcccaagtagctgggactacaggcgcgtgccaccacgcccgacaaattttttgtgtgtgtgtattagtagagacggggttttaccgtgttgactagggtggtctggattttctgacctcgtgatccacctgcctcggcctcccaaagtgctgggattacaggcgtgagccaccgtgcccagcctctaataacaatattgaaggaccttgaaggcttgggagaatatgtcggagctgtggggaagggccaagaagtgtacctcacagagctaggcaagcggtagatacattttatctatgtactatatgtaatatttatatggaatatatatagtatttttgtattacatactatataaatattataaatatattttaaatatataaatatatcccgtggctccagcctgggtgacacagcgagaccctgtctcaaaaaaaaaaaaaatttattctgctaaactgaaaaactcaacataccttctttttttttttgagacggagtctggctcttgttgcccaggctggagtgcagtgacgccatcttggctcactgcaagctccgcctcctgggttcaagtgattctcctgcctcatctcccgagtagctgggattacaggtgtgcgccaccacacccggctaatttttgtatttttagtagagacggggtttcaccatgttgtccaggctggtctcgaactcctgcctcaggtgatccacccgcctcggtctcccaaagggctggcattataggcgtgagccaatgcacccagcctcaacataccttctcgttgcattgcatttcttcgatgatgagtgacgtcagacatctctttacggattgttttaaccatttgcatctcttctgtgaaatgtctgtattttttgaaggagagggcttttttgttttaatgagcttcccagtatgttagcagagactggagtattgtggagtgagttccgctttgattaagagttgtattaaacagacctccaaacctcatgtggcttcatggagggagcaagccttgatcttatggctgaaggcagcccacacaatcacctcaggacaaatttttccacagggaagcctatctttatcccagaaaccatcaaagtcactgctttcaaactccactttatttaatcaacatatttattgtttctgcagttattagctatggttctttgggcaaaaattgtaacctctctgggcttcagttttctcatctgtgaaatgggatgataatagcatatttttatttttattcatttttttttttttttttgagacagagtctcactgttgccttcccctgcctcagcctccctagtagctgggactacaggcacacaccaccacacccgggtagttttttttttttttttttgtatttttagtagagacggggtttcaccatgttggcccaggctgatttcgaactcctgacctcaggtgatccagcccccgcggtcttccaaagtgctgagattacagatgtgagccaccgcgcctggccgataatagtacatttttaaatgtatgttgaaaacttcagggctcagtggctcacgcctataattccaacactgtgggagactgaggcaggaggatcacttgagctcaggagttggagaccagtctgggcaacatggtgaaacaccttctctacaacaaatagaaaaattaaccaggtatggtgacctgcacctataatcccagctacttgggaggatcacctgatcctgggaggtgaaggctgcagtgagctgtgatcacaccactgcactccagcctgggcgatagtgagacccaatatatatatttttaaaatgtgtaatgaaaacctgtatcttttgtgttttgagacagagtctcactctgtcgcccaggctggagtgcagtcgcacgatctcagctcaccacaacctcctcctcccgggttcgagcaattctcctgcctcagcctcccaagtagttgggattacaggcgcccttcaccacacctggctaattttttgtatttttagtagagacggggtttcaccatgttgtccaggctgatcttgaactcctgacctcaggtgatccaccagcctcggcctcccaaagtgctaggattacaggcatgagccaccgcacccagccaaaaacctgtacctttattggacgcttactctttgtcaggcactgagatacaatcatggcatttgaactgagacttgaaagtagagtaggaattagctacgtgaaggtgtgaagaatggtctgggcagggagaatagaatatgcaaaggccctgaagtgggtaggtgtttggagaactcaaggaattaaaaaatggccagtagtactggggtgttgtgaataagggaagaggaatgggggctgaggctggaggggcagcacagccactttccgtggggcctcacctcactgttgccatgtctgcgttccccaccccaccgcacccctgcgctgtcaacactgccagcacaggggtgtacttaccctcccctctcagagctcacacactcactcagggagcactcactgagcacctaggatgtgtctgacattgtaaatacttgggatacatcagtgacaaaaacaatggtccctaccctctcaaagtctacattctggaaggaagagcagacataatgtctatgtaagcttcctattttgttagaaagtggtcagtcctgtggaaagaagaaaaagttggccaggtgtggtggctcacacctgtaatcccagcaccttgcatggctcaggtgggcagatcacctgaggtcaggagtttgagaccaacctggccaacatggtgaaaccccgtcgctactaaacatacaaaaattagctgggggtggtggcaggtgcctgtaatcccagctacttgggaggctgaagcacgagaatagcttgaacctgggaggcagaggttgcagtgagctgagaccgcgctgttgcactccagcctgggcgacaagagtgaaactccatctcaaagaaaaaaaaagaagaagaagaagaaagaaaaagtcaggctgggcgaagggtactgaaggtctgaggaaaggggtggggtgggtggctgaattaaacagagagggccaggcagccttgctgaggagtgatttgagcagagctgtgaggtggtgaaggggtggcctgcccctccacacctgtgggtgtttctcgtcaggtgggatgagagactgagaaaagaaagagacacagagacaaagtatagagaaagagtgccaggggactggcgctcagcatatggagggcccacgatgacaccggtctctgagttccttcagtatttattgatcattatctctaccatcttggagagagggatgtggcaggacaatagggtaatagtggggagagggtcagcaggaaaacgtgtgaacaaatgtctctgtgtcataaacaaggttaagaaaaaggtgctgtgctttgatgtgcacatacataaacatctcggtgcattaaagagcagtattgccgccagcatgtctcacctccagccctaaggcggttttctcctatctcagtagatgaaatatacaattgcgttttacaacgagacattccattgcccagggacgagcaggaaacagatgccttcctcttacctcaactgcaaagaggccttcctcttttactaatcctcctcagcacagaccctttacgggtatcaggctgggggacggtcaggtctttcccttcccacaaggccatatttcagactatcacatggggagaacttggacaatatctggctttcctaggcagaggtccctgcagccttccgcagtgttttgtgtccctgggtacttgagattagggattgatgatgactttcaagaagcatgctgccttcaagcatttgtttaacaaagcacatcctgcatagccctaaatccattaaaccttgagtcgacacagcacatgtttctgcgagcacagggttgggggtagggttacagattaatagcatctcaaggcagaaaaatttttcttagtacagaacaaaatggagtctcttatgtctacttctttctacacagacacagtaatggtctgatctctcttttccccacaaggtgggagagggagccagccttgcaggtatctaagggaagatggttatgggcagagggagcagtatgtgcaaagcctagaggcgggagtatgactggcatgttctagcaacagcaaggaggccagggtggctggtatggggtgagccagggcaggcaggtgaggagatgtgacgagaggtcactgggggtggagagagattgtgtagaccatgtaggccttagagttcattggcttttactgagtggagccactggaaggttttaagcagagggtgacagaactgacttctgttttaataggtgcactctgggtgctctgtggggtggggtgaggggcaaaagtagaagcagggatgacggttaggaggcttttgcaataaagcaagtgaaagacattggtagctaagacggaggaggcatcagtagaggtagaaagaagtcgctaatatttggttttattttgaaaatggggtccgatagcttctcggccttttggctaagatcaagtgaaaatggtggccgagtgcagtggctcacgcctataatcccagcactttgggaggccaaggtgggtggatcaattgaggtcaggagttcgagatcagcctagctaacatggcaaaaccccatctctacaaaaaatacaaaaattatctgggcatggtagcgcgcacccatactcccagctactcgggaggctgaggcatgagaatcgctggaacccaggaggcagagattgaaatcgtaccactgcactccagcctgggtgacagagtgagactctgtctcaaaaaaaaaaaaaaaaaaaaagaaaaagaaaagaaaatgagaaaatggatccaacaggatttactgatagattaaactagacatggggcatgggaaaagagtgttgtcaaagatgattctagcatttatggctggaggaaccagaaggatggagttgccctcagctggggtagggaaggcagagggtggaggaggtttttaggggaagatcagatgcccactcgtaggcctgagtttgagctgtttattacatacccgagtggagctgtcagaatgacagctgagatagatgaatctggaattgagaagtggatcagggctggaggtgtaaatttgggagtctccagcatacagatggtatttaaaatcacaagactgattttaatcacgagtcccgccaaggggctgagtgtagataaagaagaggctaaggactgagcgttgagagcatggggataagagaaggagagagccaagaaaataagccatgaacagaaatgaaaggagaccaggagagggcacatccagaaggcaactggagaaatgcaatcaagcagaagggagtgtgcacctgtgccatcgcgcttagaggtcaaggataacaagggctaaggatgaccgttggatgtagcaacatgaaatactggggactttgacaacagcagcttgattggggggctgggtggggggagtgcaaaagtgtgaatggagtaagagagggaggtccacacctcttggacagctctttccaatatttatttatttatttatttatttatttatttattttaagatagagtccctctctgttaccaggctggagtgcagtggtgtgatctcagctcactgcaatctccacctcctgggttcaagtaattcccgtgcctcagcctcctgagtagctgggattacaggcacacgccaccacacccagctaatttttgtatttttagtagagaaggggtttcaccatgttggccaggatggtctcaatttcttgacctcatgatctgcccaccttggcctcccaaagtgctgggattacaggtgtgagccagcatgcctggcccaattattattatttttttaatttttaaaattttgttatttttgagacagagtctcactctgttgcccaggcttgagtgcaacctctgcctcccaggttcaagcgattttcatgcctcagcctccgtatagctgggattagaggtttgcaccacacacctggctaatttttgtatttttagtagagatgaggtttcaccatgttggccaggctggtctcgaattcctgacctcaagtgattcgcccgcctcggcctcccaaagtgctaggattacaggcatgagccaccgtgcctggccctcatttttctttaaatactgagtctccctaagttgcccaggttggtcttgacctcctgggctcaagtggtcctcccacctcggccttccaaaatgctgggattacaggtgtgagccaccatgcccagttccttcatagacagctcttgagtttttctgcagaggtgtgccagggggcagatggagaatgggaatgtgagatcaagaggttcttttttttccttttttaaggttgcatcaataacagatattttaacactgctgggaatagtctagaagtgaaggaaaaacatgctggagccctgacattgagcaggcaataggtaaaggcctctgctgcgcatgtggaggcatcggctttaggcaggaatgtggacagctcacctcaggtgctaatgaggaaggaagacggtgggggcaaatgtggcagcaggagctggagaaagttctcattccggaagtggaaagcaagcagcttcctctcaacaaccacaggaggtagaaaatgtttaatcccccccgttataactgaggacacaaggaaaaggtcaacagctctaagtggggcaccaggatctgggcccaagcagtctgactccagagcccaattcgtgtaacctcaggtacaggtgttttgtaaatatctgttgattggatgaaggaagagcaaggaattagcctgcagcagcagaagccaagccctttcctgggtcctcaagctcaacctggaaggccccgtgctccccattctcggcagcagctcatactgtcatttgtccaggagctctatcccctcctccccttgaagggtagtttgcaaatgcaacagaggaagggtgggaagaagctgtggctcagagagggtgagtttgctcaccaggacacacagccaggaatcagacaccaactgtggcccaggtggtcctgggacttggagggaggaccttctcaaaagtgttggctgctgtgaagctgtcgtggagtcatgggtctattgctggtctgagccccagaacacacatgagcgctagtctgcgtgtgtaagtgtggcacacaagggagagcggcggtgtgtgtgttggggattaggccaggtgcacaccctccagggtccaggggaggaggggctacaaaaggcctggagatggctccctctgtagcaatgcccctctagagaccggcaggcttcgtcctccagggctgtaattcacctgctccccgtgctcacaggactcacacgcggtctgcgagcaactgatgggagcccctgtgtgccccaggacctgtcatctcagcactcgccacacagtgaccgtgtcacggcctgctgccaaggggctttgtctagcagggaatatgggcaagaaacaaggacaaagtaaggaacgggggatacggagggctctggcttgctcaggggccttgctggagggcccaaaatgggagtaggagacagccaggacaggaagaagagggtgggagaaaactcccagctcaggccgggcgcggtggctcacgcctgtaatcccagcactttgggaggccaaggcgggtggatcacgaggtcaggagatcgagaccatcctggctaacatggtgaaaccccgtctctactaaaaaaataaaaaaattagccaggcgtggtggcggacgcctgtagtcccagctactcaggaggctgaggcaggagaacggcgtcaacccgggaggcggagcttgcagtgagccgagatcgtgccactgcactccagcctgggcgacagagcaagactctgtctcaaaaaaaaaaaaaaaaaaaaaaaaaagaaaagaaaaagaaaactcccagctcacgaaacagcacgtggaaaggtcttgaatcaaaggggacctgggatcattcagggattcgggagaagtctctgtgctgaggggagggggtgggtgggaggtaagatcaaaggttggggcctgggccttgggggcggtgggtgagaggtctccctcgctctgacccaacggaggcagatcctcggtttgatcctgggcccaactctgctcagtgaggaatgtcggggcggggtcccggggtgcggccccacccacggtgcgtggaatacaggggcggggaacgcccgctcttcccgaagtgcccgctagatggcgccagatctccgtgctgcaggggaaggacccgcctcggcggggcaggtacacgtggagggtggagggtggagggtggagggtggagggtggagggtggagggtggagggtgggcggaaggcgcagggtgaggtgtctaagcccagaagatggttgggacgtcctaggatgtggttgtgatgtgacgacggccttgatgtacattctccctttgtgtcccatcacaccccaggagctcagattattattctcattttactcagcgggaagctttaagtaggatgaggtcagggctgcgcccaggtcactcagctggttcagggtggtgaagtggacaaagatggcacccggcctctgtgtgccctgcctgccgcaggccagctcgcagagggcctgcgctcagtccatccaaagggaagggcagtgccagggcagcccaatggctggcagtgccagggcatggatcccgagtcgtttattcattcagcgggtttattgagcacctactgtgtgccaggcactggtgagcgataaagcaacggataacacagacatgggtctccttccccacggaagggacaacctaatggggagacagccaggcgttatacagataagcctgccaacaactttattattagagattgtggtaagggctatgaaggaaatacgcacacctgagaagattccaaggtaggctcactctcgaggtgggcagggctcaggcacagggagggctcaggaggagatatggaagctgagacctgaagcgtgcgaggtgcagccatgaggagggctggaggagcagccttaggggcagagaggacagcagtgcacaggctgccaaaattgggaggagcccgaggaactgcaaggaggcggggctggggccaggagagagaagagtgttagggctgtccctgagggcaggggccagatcctctgggcctgctaggccctgccttgtcaaggagtgtagatttattattatcgttgttgttgttgttgttgttgttgttgttattattattattattattattattattattattattttgaaacagttctgctcagtcgcccaggctggagtgcagtggcgcgatctcggctctctgcaacctctgcctcccaggtagctgggattacaggcacgtgccaccacgcccggctaatttttgtatttttagtagagacagggtttcaccatgttggccaggctggtctcaaactcctgacctcaaatgatccacccgctccgggctcccaaactgttaggattacaggcgtgagccactgcgcccggccaactgtagattatattctgattgcatgggaaggcagtgaagagctttaagcagggagccacatgttctgatttgtctttagaagtccactctgggccaggagtgatggcttgcacctgtaatcccagcactttggaaggctgaggcgggaggatcgcttgagcccaagagtttgagtccagactgggcaacttagcaagcaagaccttgtctttacaaaaaataaaaataaaataaataaaataaaaataaaataaatttaaaaaataaacgaaagtctactctggctttggagaattggctgaaggtgagcaagagagggagcaggaggaggtggagacggtcacgctggtgagaggtgacgggggctcagaccgcgatggcagctgtgaagatggagaacaatggtcagatctgagagatactttggaagcagaatctgtagaattttcagatgaattggatggaggggtgaggatgattgtaggttctaggcttgagcaacgggtggatgatggggctattaaccaaggtggggagagccagggggaggtcacaacttgggtggaggctggaatcaggctcaggccctgctatttttggagccttctgtgtgatatcctagtagaaggatggggcaagcagttggagcttattggaaagttcaggactgctgatgtaacctcaggagcctctaggttgtattttatgtcaagggattggatgagatcccttcacacagcccacagtctggcaggtagtgaaggcctcatcaccggaggtgtgcaggacaggctggctgatgccactagagagaggaggcctctttgaggggaggtggaacaaaatagaccctgaggatgccagatagcaggactcggtgcccctggggccacacggaggagctggatatgctggctctgtctctttgtctggttggagcctcctctccctttggcaccattcccccactaccatctggcagggtccagagacacacagaccctggggtgggatgaggggcagcctcagggatggggctgtaatttcagctgggggcagggctcctgagtctcagccacctggtgtgaggttcctctttccggcacctcctcatgactgtcttgcctgacagccccatcccccacaactgcagctactcaacacctctcaggaggaggcccagcccagggagcagctccctgctgtgtcccacctggaaaggcattgagtctgctggtgcagcatccccgggggtgggggagggaactagaggggctgccaagcttaattagtagttgtgaatccccgaaacctgcatctagagaggccccccagactttcatcttcaaaacctccccacccacctggatgaaagggccagggaggggccaggtattaatagtaattattagtttcactaataagga

SEQ ID NO: 97 - DNA, 27951 bp, Mus musculus
gctcattcattcatcaaacaccagccaactggcccacacacttccatgcatggacacccactccttttgccagcttttcctactatggccaactcagtaatttgcagaacccagttcaagccaggaactataataaggtatataaacccaagcacaagaaaggcaggaaatcatctcactcaagcatcaggtgaacctgcactactgttaccgagagagaccctaactcaaaatcgtcactcctgaaaaataaagggaagaaggccttttcttattcaaaaagctaagaagtttagaacgaactcaaccacctaaaactgctataagatacaatgtgcacagcctccaccaacacgtacttcttaaaaatctttaaaacaaacaaaaaaggaagtattttatttttattcatgtgtgtgaacatgtgttcaagttcctaatgagccagaggaaggcatcacatccctgcagccaaagttgtcagtggttgtgaaatgccccgtgtgacttcttgggagctgaactctggctctatgcaagagcagtgctggctcttaaccgctgagccatctctcctgccctcccccttctttcacagtgacacttctcaaccttcaggtccacatccctttggcaaacctatctccaaaaatatttacattatgattcataacagtagcaaattgcagttatgaagtcacaacaaaaaataattttgtggtttggagggaagttatcacaacatgaggaactgtatgagagggtcgcagcatcaggaaggttgagaactactggctcacactctcatgctgagtgcttgcctaccgcttttcccaattactcctcccataactgatctctcttatcattcaagactctgcctaaatgtcaccaacatggttccctaatttaaagtagccacccacatagctctcctcggaatttctatttaagagcctggagtttggctcagtattagtgtacttacctagcattcacttaaggccttgagttcaagtctcagaactgggggggggggggaaccaagcctgggaatgcacacctttaatggcagcactcaggaggcagaggcaggggcaggtggatcttgagttcaaggccagcctggctctacagagcgagctccaggacagtcagagctacacagagaaaccctgtctcaaaaaactccaaaccaacaaaacaaataatagttaaaaaaaaaaaaaaaaaaaaaaacaaacacacccaaaatggaaaaaccactccaaatcaaatcatgccacacaacctcgcacttcagtcccttccaggagtgcgtcctgatctatgacatcatctgtgcctgccagttactgtttattgtccccccctccctactagaatgttaactcctgacagcaaagcccatgtctgtcctgctcagactgagtcagtcccctggtgcctaatctagcacttggcatattactcctttaatgactgtggctgagcctgttggcacacacctaatcccagcactgaggaaggaggcagagcagaaggactgggcaagttcaaggccaacctaggctgcatagcgagtaacagtcagccccacatagcaggactatttcatataagctctattaacagcaggagggctggaggggtggctcagcggttaagagaactgactgctccccttagaggtcctgaattcaactcccagcaaccacatggtggctcacaaccacttgcaatgggacccgatgcgtgcaggaacatgatactcaaaaggacacatccctctgcctcatatctcctactttcttgttctaccacccagactagcacaggagtagtctccatttgtcctcgcgcaccccaatactaatgagaccaagagccagagccccaggccctgaaacagaaagagaacaaactcaagtgttgagaaaaacaagagggagaggaggaggagccaacagggaggagagaaaagacagggaggagaaggaaggagctttgctgataattcctcttcttcactttattagtgaaactaataattattattaatacctggcctctgcttggccctttcatccagcctggtggggaggttttgaagatgaaagacactgtgggggtactttcagatgcaggtcccaacacctcataaccactaattaaacgtggcagccccctccaattagcccctggtccctagggatactgtgccacctgactcgggtgccttcctttccgggtgggagttagcagttggcgccccctgggcctggccctccttggagaaaggtgaagaaagcttctggtgcggtgggggtgaagggtgggagccccacagcccagagagtcgcatgagaaatgctggaaagagcaggaaccagacggctgaaacggaggagttttgtctccagctgaaattacagccccatccctgaggctgcccctctctccatccctccccagaatctgtgagcagctgggccctgccatatggcaatgggggaagggtaccaccaaaaaaggaagatgtaaccagacaaagagatagagtaagtatggccacccccccacacacacacacacacacattgccctagagtcacagtcacggagtttctgccatcctttgggtggcttccttctacttcctgtccaagaagcctcctctctccagcagccttgaccaatatcagccatcccctgctacttgctgagtgaggtctcctccagcaccatatactcctgatatggagtataatcgagaggctgctgatacatttcagcagccttagtctttccagtaagcttcaaatgctcggccgctgtctttctgctaaggtgtcagagttactccaagcatggcagggcctagctcaatgcccagctttacccagggagcacctcacctaggcctcagggagcacctcacctaggcctcagggagcacctcacctaggcctcagggagcacctcgcctaggcctcagggagcacctcacctaggcctcagggagcacctcacctaggcctcctccttggcacaaggtctcagcttcgcccatccctcaagcctgaatccttctcagccctggagtagcccaactaatctttttttttttttttgggttgttctttaagatttattaattttatgtatgtgtgtacattgctattctctttggacacaccagaggagggcactggatcccattgcagatggttgtgagccaccatgtggttgctgggagttgaaatcaggacccctctggaagaaatcagtgagtgctcttaactgctgagccatctctccagctcagcccaactaatcttaaaaggttagagcctgcttccaaaattggcctcagataaggatattgccctggtgttgtagcttcatgatggagcacttgcctctgaggctctggatttgctccaagcactgtggcacctctacctccccctaaaatctattatttctctccatagctattgtcatggtctaagccactgtggtctcccatttatacagcagccttcacatcttcctctcctcctccttctctttttcttttttaagatttattaatttattttacgtatatgagtactctatttgcaagtatgtcttcatgaaagaagaaggcatcggattccattacagatggttgtgagccaccatgtggttgctgggaattgaactcaggacctctggaagagcagtcagtgctctccagctcatcttcttcacttattgtctccactcttgttccttctactgacactcattctccaaacaaagccaggatttacttcattgtctgtctgtctgtctgtctatctatctatttttgaaagagggtttcaagtacctcttgctgccctcaaactcaccagctaggggtgatcatgaacttcaggcttttcttgcctgcacctctgaagtgctgagattacagccctgcctttcatggctggattatgttgccacttgagactgaacccaaggtttcatatgttctatgcattccttctactgaacttcatctccagcctctagaacagacctataaagatatcatttggggggggggagggggcgctgaagagatggcccaggggttaagaacacttgtttctcttgcagagtgcctgggtttgctcctcagttttctcagtaccatccctcccagatctcccccttccctaactccctctccctcttccaagtcttttgcaaggctttccttgccctggcagtccttgtccacttctccaacagtggcccaggcctgtccagtcgtcttccttcccagcacttcccacgatctgtaatgatctgattatcggcaggctacttacacaatgccctgttaccactcacattagacagctctttccacggggagagagatgtacaacttccctatccacggcttcgtcattcatcacagaaagagggttcactgaatatgtagattgagcacgccatacaggctatagatcctaggacagacaacccaatgggtgtggttcttccctttgaaagagcaaaggaggctggttcctttgtaaattagcctacgacttgactgagtgcacaaaggcacagatgcaaaaacgtctccacttgctcaactctgaagctggcaagtagaattgggcgctgcttcagttttgctacagccctggtcacatcacatgtcttaagtgggataaacaaactccagagctaaaaccagcaccgggtccaactaccagcatcgtggagccaggcgccatctagcgatgctcgagtaagaacaggactttcctaccccaatgtcctagcttcctttcatctaatcttatgccagtcctactcattgataatcttttgttttgtttgaaacagaatctcatgtagcctcagctgcccactatgtatctcagacaggccttgaactgattctcctggcctttcctctacttcccaagtgctgagattacaagtacgtcctgctatgccaggctccatttgggtttttgtttgttttgttgccagagatcgaacccagaaactcctaggtgctaggcaggacacagcaacaagagtcactgctctgagtttcagctctcagagttgcagctaagagccctgcaagaagccctgcttctgtggcttcgagacctccagtctttggcctcacatcttcaatcactgaaagatctgatcccaggcccaacttacagttatttgtattttgttttgctttatttttatgggggttaattttaatcatcaacttgagacaatctagagtcacttaaaagaagggcctctgagagtgtctgtaagggaatgccttagttaaaccagttgatatgggaagacttatctactgtgggtggcaccattccctaggcttggggatttggggttgtctaagtgtagagaaggggctgaaggctagcatgcacatattcattgttctctacttcctgctgtagatttggtgtgatcagttgcttcaagctcatgctttcctgacattttcaccaccccttgaactgtgagaagaaatgaatctgttctcccttacattgcctttgtcaggttaacaggaaaataaactaagacagaaactggtactaggagtgggtattgtgataaacctgttcatgggctgttaggcctttggaactgtttggggatggaataaggatcattttgcaacactgggctaggaaaacagctaatgcaaggcttaggggaccactctggtagaagtctggaagatatgaatcctgacagagggctggagatatgcctgggtggttaagagcactggctactcttccagaggacccaggttcaaatccctgtacccacatggcagttcacaactgtctgtaactccaggtccaagggatctgacaatctcatacacacagatggacattcaggaaaaataccaatgtacatcaaaacttatgacataaattcggatagtgagttcctggctcacaaggtgtcagaggagacgaggaatggcatcaggaaccgagtgagaggcgatctgtgtgtgatgttttggggaaaaccgtgactgtattttgcctatgtcctgagaattgagtgaagttgaatagaaaaataatgaattaatttgttcaacaaaaggagatgtagcataggcaagttcaacgtttcaaacaaggtacatgtaggcaacaaaacagctgtaactattaaataagaaattagccaagtgtggtggcgcatgctttaatcccagcacttgacaggaaagacagatggttctctgtgagtttgagcctggcctgatttacatagcaaattccaggccagccagggctacatagtaagtatctatctcagagagggatgaggagagagagagacagagagagacagagagacagagacagacagagacagacagacagagatacagagagagacacagatacagacagagacagacagagagagagacagagagagagacagagagagagagacagacagagagagacagagagagatattagcaccattaaagaaaaacctagggctgacaggagagctcagtgggacaaggtcaaagccacactacctcagttcacttcccaggatccacactgtgagaggagagaactgaaccaactcccacaagctgtcctctgatcaccacatctacacaacagtatttgttgatgcacacacaagcacacaagtatagcaatataaatgtttctcgacagggtctctctatgtcgtagctattgactgtccttgagcttgctattgagacctgggtggcctcgaagtcacagagatcctctgcctctgcctcctaagggatgggattaaagacttgtgcaccagcttgtcctcaatggatttttttttttttaaggagataagaaagcatttccttggggtcagcacacataggatgatgcagctgtgatccaagggtgcttactgggctacgtctgttgtccaagtgttactggtttcaaaggcacaaaagctgcaagatttggggatgggccctaagaagctattgtgtgaagccataaagttaaagcctaaggctgcattggtaaccccagaatactggagatgccaggaccacggcaccgtgtgctaaggagagacgctgagtgtgccaagggcagaggagatggaggtggcaggcaacagaagccttttcagagcccaggtgtttatattacacggcccacatccagagcacagagctttaggcctttgtgcctgccttacaccctgtgcatttgctgtgctcggactgtccctatatcttggttctttcgctgaggggcagcaaagtgtaatcttgtgaggacggaaatggtgctttatcggaactcgggagactttggacttttactgttaataattatgatattaaacgattgaactctagaactttgcttggtgtattttgtattagaaggtgacctttgagcttatctggacaaaagatatggtggcatgacaggttgataaggggtggagtagggatggttacttttaatcatcaatttgacaccacctagcatcacctgagagagaggccagagagtgtctgttaaagcttgctttctttttaaagacagggtctcactatatggttctagttggcctgactctcacatgaagaccaagttggccttgaactctcaaatgtctgcctgcctctgcgcatcaaatgctggaattaaaggtgtgcaccagcagacctggttgtgagagatttcttaattacattagttgggaagccctcctcagtgggtggcttccttctctgggctcagggaccttgggctggataagagcggagagcggatgggctgcagcattcgttcattgactgctttctgcttcctgacacagatgcgatgtgacctgtgatttccagctcctgcagctgggacttccacacatttatggactgtggactgaaataaacccttcctccttgggctgctttttgttttggttttgtttgtttgtttttgttttgtcttggtttggttttttgacacagggtttctctgtgtagccctggctgtcctagaactctctctgtagaacaggctggcctcaaactcagaaatccccctgcttctgtctcctgagtattgggattaaaggtaaaggcgtgtgtgatcactgcctggcccgtcaggatatttaatcccagaaacacagagggaagctaagactcttgttttttactgttctgacagggactgctatgtagttctggctggcctggagctcactgtggagggtaggctggccttagactcatagcaatcctcttccctcagccttccaagtacttggaccaacaggcatgtgccaccacaccctcacggcattttctgtgtttctttttcttttttttggtttttcgagacagggtttctctgtgtagccctggctgtcctggaactcactctgtagaccaggctggcctcgaactcagaaatccgcctgcctctgcctcccaagtgctgggattaaaggcgtgcgccaccagcccggcttctgtgtttcttaagttgtaaaatgaggggactgaaacagcctgcctctaccagtcaccaggaaagttcaattagatgagtaagcaagtcactggctgtgatggtagtccagcagtccccactactacccactaaacacactcactcatctcatggcacctttacctgcccacatgctagtccccggggcgccctggcaggccctctgcagtctatccctcagatctgcctatctcctcagctcatagattttggaggccatggtttttctcaagaggagacaagggaacagaaagtgagagtaaggaaatggtgagagcgactgagcatgctgggaagttggaggaatgtcggggcacgagggacaacatggagagagtgggaagaacggatttcgaatttaagtggaatatactcaccaagggacggttaaagtcaacacactgcctgttggtttccatcagggtctaggggccaagagtgtgatggtggtttggagaagactaacaggtcgtgactgttgacaacacggaagttaagtggcctcggtgggcaagatggccagctagttagtaagaagaggttaagaaccaagcatagtggtgcacgcatgtgaccccagctctcagggagctgaggcgggagaagcgggaggtggaggccactttgggtgaccgcgtaggctgctccctccaggaagccttctctctctccctggtgtttacagcacgctttcagtttagactcaaagcaggagctcactccctggctctcatccctgctaatatcctccttctacagagcaacacactaccacagaacaaagaatcctaaccgttaaagaataggaacagccggacagtggtggcgcatgcctttaatcccagcccctgggaggcagaggcaggccgatttctgagttcgaggccagcctggtctacagagtgagttccaggacagccagggctatacagagaaaccctgtctcgaataggaacagctcagagaagatgaaaacagataaaccaagataaaccagtctttacagagaaggctcagctacacaccaggaggcccacagctgcgattacaacattgagagccagaggtaaaatgaggagttcagctacttcagaccttgtgggtgagggcacgcccctttaatcccagcactcctgaggcaggggcaggtgggtctcttgagttcaaggccagcctggtctacaaacagagttccagagcaggcggggttactcagagaacaaacaaagaaacaagcaaaaaatggaaaaaaagacattgtcttaaacaaacatccaaacaaaacaaaatgcaacccaaaccaaactacaaaagactgactcctgagaagccacgcacacacacttgctgtgtcctctcctcactccatttctgagtctcaggctgggaggctggcgagactggctcagtggttctctagagcactgactacccttctgaaggtctcaagttcaattcccagcaaccacatggtgactcacagccatccgtaatgggatctgacgccctcttctggtgcatctgaacacagctacagtgtacttacatataataataaataaataaatcttagacaaaacagacaagagtgcttactgcatttgctcttgttctagctctatcggagaactcagtttggctcccaggacccagatggtgcctcacaaccatccataacttcagttccatgggctctgactcccccttctgactctcacaggcaccagacccacatgcggtgtgcacacatgcaggcaaaatactcagatatgaaaaataaagtaataaatctaaacttcttgttttgttttttgagacagggtttctctgacagccctggctggctttgaactcagagatccgcctgcctctgcctcctgagtgctgggattaaaggcgtgcgccaccatgcccggcttctgtagctgcttttataaagcacaaggaaaacaatacttttttttttttttttaaggaaagtttccttcaggtatggtaatacatgccttagatcctagtggtctaggggcagaggtggctgggatctctaggagttccaggccatcttggtaaacatagcaagttccaggccaggaatggtaacacggtgaggctctgtctcaaaaaaataaaagtttagtagccgggcgtggtggcgcacgcctttaatcccagcactcgggaggcagaggcaggccgatttctgagttcgaggccagcctggtctacaaagtgtgttccaggacagccagggctatacagagaaaccctgtcttgaaaaaccaaaaaaataaaaaataaaagtttagctgggaggtgttggtgcacgatgtctttcatcccagcactgaggaagtagaggcaggcagatctccaagtacgagatcagtctggcctacagggtgagttctagggcagccagtggtacccagtgaaaccctgaaactctgaatctaaaacaacaacttgaagccagcctggtctacagagtgagttccaggacagccagggctacacagagaaacctgaatagaaaacaacaacaacaaagaataaattttccttaaatttagcctaagtcttttggaatggtatcaattccagtacacagagagctatatgcaatatatagtatatacgtgtagctctactgttcgccatgctctgagagatatacaggtcatgatatatgtaatatgaatctagagatgtatatacataccagtgtatgtgtgtgaatactgtacccatgtttttcaagttctactaagtatacatccgtgtttccatctacaaagtttcccaattattcaatgtcctgcagtattgttattagaaggttatatgaaatgactattagatataagggttttatgtcatagccccaaatctgccacacacatatggtctcatttcatctgtacaatggaaatcaaaatcaatctagtttatgctgtgtgaagcatcaaagataagatgcataatgcagggtaacagggacgtgctgaataatttattactaagctgctctgtagtgtgcaaaaccgggtaaagttacattacaaggtcgtttgttgttgttattcacctccgtaccacgaggagcgcagtcgcctccaggctggctagcctgaggttctgatggcggaagtccgtcaagctgcagcagcacccgcgacctggggccgagcccgcctgttctcccactcgtgtccgctccgagagttctcataggcagattcggtcacagcaacacgtagcaccggcttcttttataggccaacttccgtaccggcggttttagcttcgctggaaaccgtgatggaggtttcttccggaagcctgcccctctctcagtgacctcagagatacacttccggaagacggaagtgacccgtccgcccgccccttccgcctctctctttccggtggaggagtctggagacgacgatcaggtagggaggcttgggccttgagaatcgtgcggcatcctttggccagggccgtctgcgggatcggggccggcgtctgtgcgcagtagccgagccaagtgcgtggtggagacgagcaggcgcccgcccggcccgacccatccggacccagggctccgccgtgtcccggtggcggcctctggcctgagatggaggaaatcgggagtggggttgggaatgggtgcgggtcctgccctgggcctctcgccacagccgtcgcacggagtggttcgggggagccggtccttgatcgcgtgcgggcaatcgccggcctgcaccgaacctcgttcctctcgtgaaaaccccgaaccgatcccctctgtaaatcaaaattaaattaaaagggataccataaaacctcggtcctgtgtggagtgcttctaatcctaacccatgacggctactcccgagtcggacacatttgccggtcggcttcctccgtggtggagtaggatggatgccatatgtttgtattctcgtggatattcactcccaccgagcagagcgaagatacattgagtagccatcatggcccagacgatttgaaccctaccgaatctgtgtttgcctagtttgaggatgagatcgggtgactgtacgttcgagacctgcccttgtgcttctggcgattggaccctatgaggaaggcacaagagggagggagagagatgccagggacacttgaaacctacttctaaggcctgtggtgcttggggctttgtgtgtgtgtgtgtgtgtcgagtagggatatcttggtaccaggaagagaatacaaggcaggtatcttagactgttctgcttaatagtcttagttgctgggagatgacctaatttattgagtgctgctcaatagctagtttgttctgaaagtggtgatagtgtgttctacttcacctcaggttagtcaaaggactgcctgggactttggcaagaaaaaataaatcagccgccttgtgcctttttcctagttcccacgagtgtactttgattgcaggctagagttgggtgatctcaacgcaggtgtgtagcccttttccgttagacttcctggaaggcatgccctggctgtcttagaacttgttacagtagatgttcctgcctctgacccccgccccaccccccatatgctggagttacacacaccacactctgcttttaatgtttggtactagaaaacggttgaaaggattgcttctagacaggctgtgaggctgtgttggggaggcatctggtggcaaggataagctggaaagttctttgacttgtctttttaggctgctttgggcctaaactgttaagttatctggggcccaggaaagttgggtttaagtattgtgtatggacagagaacgccctaatttagttgtggtgtctactattcaactgcctgctgggtcaccctgaacgaatagaacttccaagtttaagggaagagttagagtgctgactcaggcttgagacccgacttccatgctgttacacatagcaacttgtgcatgtggttcgttgctgggccgtgggctcgtcctaaaggcgcgttcggcacctttttaaacttgataaatgccaagaacagagacgggctattaggagcaaggcttaggttttcccttagtaggtaaagaaaatgtttggggggaccctttgcctgttgctaacattgaggttccttacctagaaatggcgccacgcaaggggaaggaaaagaaggaagagcaggtcatcagcctgggacctcaggtggctgagggagagaatgtgtttggtgtctgccacatctttgcatccttcaatgacacctttgtccatgttaccgatctttctggcaagtgagtatttctgcagaaaggcataaaactggcctcagggggaccagttgatgggatttgccctaaagaattactgttttacttaatttcccactaattataagaaaacactgtgttttacggagctgaggataaacttgaacttaggatgctcctgtctctgcccccttgctgggattttatcaaccagagcttgctgactcaaaggagtttagctatgtaggggtctttgaaccccataaacacaacttacagctgtcttgttcagacccagcatatatatatatgcttaagatgctgttagactgctcattggggttcagtaagtgttctgtgtacccttgttgaaaaatgacacggttctgcctttgtccccagggaaaccatctgccgagtgactggtgggatgaaggtgaaggctgaccgagatgagtcctctccatatgcagccatgttggctgcccaggatgtggcccagaggtgcaaggagttgggcatcactgccctgcacatcaaactccgggccacaggaggaaacaggtacagaagatggggggtggatttgcgatctcatctggtctgtctgaggcatgtatgtatgttcctagttagggatagcagggaatagattaggaggagctagggtttggggctagcctgggctaaacagtgagttcctcctcaaaaaaatgggtaatgtgttcctttgtgtttattgaataaccacggcttacccaggtagtaagcaagactgagatagccttgggtggcacctcactttgcaggaaactcgggcttttaatcaacatgcaggaggttacatggtttcagtctgtggtaaatactaggaagtatggagttggtggtaggggtgacttaaatgggggcctgggatcccagcatgtttctgccctgtcccctcccccctaccaccaccaaaataaaggtagaaaaaaaattacatgagtgtgtgtaccatgtgcatacctggggtcaaaaagggcaatgaatctcttggcactggtgttgcagatggttgtaagccaccgtgtgggcagtaagaagagtccaggcccactgctaagatggcagtactattaagccgtctctttgccctcatttagcaattttgaaaaggattttgtgttgtgaagttggagatttaagtatggctccctcaagtatttaactgttggcttctccatttagaagtgaattaaaattaagttgctgactaggccaacaatccttcattttctaggaccaagacccctggacctggagcccagtcagccctcagagctcttgctcgctctgggatgaagattgggcggattggtaagtgtcccctctggttacacttggggttgctttcaagcattgaccccttccaaaccctgcaatgtgcctaatgggtcagctttgtctggttacttttgtaaggagtacgtaaaaggcattatgagaggcgtatctctgtagtggatacaatttttccctatgttggggtaacttaatgttccgactctgatttcagagccttctgtggcttaccaggtgactccactgattgccctcagtctctgctgaccttcataacagtggctcctgtcacgtggtgtaaagagcaaacagccacacttgctcactgtagggtctcttctactacagtcggtaggctctgagttaaactcggtgtttttcacctttgattgtccaccttctcagagcctgtgtccacttccaaatggggttgggatgagaaattggcaggtggggcaccccgtgattgctgaccattggagatacatttgggggaaaataaagtctactgctagttagacttgtggctacaatgatatttttttttttctcacagaggatgtcacccccattccctctgatagcactcgaagaaaagggggtcgtcgtggtcgccgtctgtgaacaggacttctcattattttctgttaataaattgctttgtgtaagctattttggttctggtgttgtgttttatgcactttgatgtttcacctgcatgtatgtgagggcctggaactctggagttagagacagttgtgagctgtcaatgtgggtgctgggaattgaaccagggtcttcctgctaatccatctctccaggtgtttttcttcattactgtttttttttttttttttggttttttttttttggttttttgagacagggtttctctgtgtagccctggctgtcgtggaactcactttgtagaccaggctggcctcgaactcagaaatccgcctgcctctgcctcctgagtgctgggattaaaggcgtgggccaccacgcccagctctccaggtgtttttttgtttgttttttttttaacgttaaaatcctaggatgtttattacaaaggtaaaccctgatccttgagatgagcttatcggtaggatttctggtatcgggcacgggcaccaggacctccaaactttggattcgcagtgacgggggtcagctacaagcagggtctgatcgtattggatgaggatatctttgatctccttagaggcttcatccacatatttttggtaataagctaccagggcctttgagatggactgtcggatggcataaatttgggccacatgcccaccacccttcacacagacctggatatccacaccagcaaatcgctccttgcccagaagcaaaacaggctccggtaacttgtactgcagcgtgcgcggctcgatcatctccaggggccgtcccttcaccttgatgagcccatttcctcatttgcagtgggccacagcggtagctgttttcttgcgtccgaagacctgcacggactgcagcatagctctgagcacaagcacgagctcctcaccgcgcagcgccgtgaccggaaaaggctccaggtggttttgagacagggttttaacatagccctggctacccttaaactcatgtagatgaggctggtctcaaactaaaaagagatccggctgcctctgccttccaagtgctgagattgaaggtgcatgtgaccatgcctagcagttttggtgttgtttcttgtcaccagggtacacagcaagggaaatgtatactgtttgagaggacttgcagactatataggaccatagccgggttgtctcgagttctgctgtaggttgggcaagcctgggttctataaactggttttctgggaaggggcacctgagatgctgaggctgcagctctctggcatctgccagcccgtctccaaattgttcatagcccaggcatcatgggacactctaaccccagcaggctggggccagtggatcacaagttggaagccagtatggtctacatagggacctctaggccagggtcacatggggaaataaaaacaccagagaagtggaaatgttcgtattgtctacacatgagccaattcctcttgactggtttcattgtacgtcaggctggcctcaaatttaatgattctcttgactgtagttttggggctacaggtgtaaattagcagccagtttggttttttcaaatggtcaaatgtagttctagctgtcctgggataaatcctgtatatcaggctggcccacagagatctgcctgataggtggaagttaaaggcacatgccacccctaaacttcatgttttgttcttaaagggccagagcaggggcatcttgatccaagtgtagcctgagctgaagaggagccttccaggcctgagccatatataaagctgtgtgggtgtgctgcttccccccacaccggctgtgcaagatggctagcttgtgcttctgttgctttccttagcagttctttgaggttgttctacattggtacataaagtacccaagactcagtcaccccacaaatgccaagtcctatttaaaacagataacggttcttgctttgtaaaagcttgcatcgaactccaaggacaccgtgctatcagatggtactgagtgttctgggaaggcttgcttttctatttctttgagacggcctcactgtgtccctggctggcctggatctcaatatagatccaactgcctccctctgccgatttagttctgggattaaaggcatgtgccaccatggatgcactgagtcttttgaaatgtggattggtgtcttgcctgcgagtatgtcagtgtgagggtgctgagtcccctggaactggagttagacatagttctgagctgccatgtaggtgctgggaattgaacccaggtcctttggaagagcagccagtgctcagccactgagctgtgtccgtctgtgtcgctccccaccatcccccaacgtactgagatataaagatctgtcttaaaccgttttaagtgctattattcctaaaacacaagtaagaaagccattatgagaagtaatttggcagagttgttcttggttcacatgtaatcctagtaaagttagggttgctacccacctggggctatcctgggttacaatttgaaatctgcctcaaaaacagcaaggtgtgggagcatgcttttaaccccagcactttgggagacaagggcaggcagaactatgtatacactgagaccctgtctcagataaatgcccctagcacattggcaaaggcggtttggttttgtctttgttttgagtgtctgtgtgtgtgtgtgtgtgtgtgtgtgtgtgtgtgtgtgtgtgtgtgtgttggaagaggagattgctagattggagctgaccaggtggttgtgagccacctgacctgagtgctggcgactgaactcatggtcctctggaagagcaacaagcactctcaactgctgagttctcttgagcccattgccaaatatgtgattcctgagttgtacgttgttttcttttggtttgggggacaggattccctatgtagcacaggctggtctggattttcctgcttggcccctcggtgctgggattactggagtgtcctgccatatgcaggtgacatagtatcctaagatacatccatattgtgacacgtgcatatgccccattcctttgttgggtaatactgagttgtctagatgcataaactactacaccttttacttaagtggaggctggggagatggctcagtggttaagagcactgactgctctttaagaagacccaggttcaattccaaccctgccagggcggctctcagctgtctgcaacttcagtttcaggggatctgatgtctctctgccctccaagggcactgcacacatactgagtgcagacataaattctggcaaaacacacattaaaaaatttcaaaatataagttaaaaaaaataatcaaatggaataaagatggctaagggttaagaacacagagctgttcctgtgacgaaccaaagttcacagtatttagagggtgccgagggctcagaagccttgctgcttgcatctccagctctagagtctgatgctctccgatacttgtgcatgcagacacacaaaataaaaatctttaaaattggagagtgttggaaatgactcagcagttaagagtacttgctcttacaaaggacccagcttcaattcctagcatccacatggcagctcagtgcccaggacggttgacaccgtcttctggtctccacagacagtagcacgtggatgtataagtaggtacatacatgaaaataaaaataaatgaatagttaaatgtttaaaaatgttaaattcggtgtgggttggcaagatggcacaagcaagttaaggcactggtgttctgccgacttgaattcagtccctgcgactctcatggtggaaagagcccagcttgcacaaattgtcctttgacctccagaagaatactgtgggacatgtgcaccctgacacatacacacataaatcaatgtgatagcacattaaaaaaaaatagtgtgtggctaaacccaggtcataaaataaatccatgctgaatttaagttttcaaaagtaggggtgactgggcatgaatctttcttaattaaagaattgaaagtaatttaagatcagttcactgggaagaacttccttctactgtgctggtgactcacatccaggtgagaatagaatatgatagagggatattagaagtaaccaaggagacctgtagtacctgggaagtcatgtcatgcatgggtgggtcctctggtctgacagaagagcacctcactcaccacataattcctagttatatccacgaacatcaaagacaagaccggaggagattgaggacatgtaccggtgtctttttttttttttttttttttgataaatatatcagggcagtggcagatggaagtggcaggagtgtcatagacgagaacactcaagttatctttaactgactaccaaacgaagtgactgaagggatgtggtctcatcccgtccatcggtccggcttctaggtgtatgcggcacgcagtcaggaggtggccattttccaccgcttcagtctgcaatgttgggactaagaacttcagctcagccttttagtgaaaactgctggggatgctgtgtctcggaagggatcacaggatgaagtgtttagcaccagacaagctgctgctattcttaagcctcttgggttcttgtgccaagcgtataaaggacagctggctgggagcctggtggaaacacgctggcggttcctggagcactctccttacttcctgagatggaacattgcgactcctcctgttcccctggtaacgggggatgcggtcagctgggtcactgagcactcttttggggttgattagtttctgaattggtattttgagttttttgtttttgtttttgttttttgttttttgtttttccccccaaggacagctaagctgtggtcagcttggaccctagcagcctatgggcttctgaggcagatgagacgagccatatgctgttaccgacctgacctctgcagagcacgggaacccaacttcagaagctcagccctaagctggcactcctatcatccctctggaggtggccaccgcccagcattgccttgcatctgactacctactcactggatttcagggaatggtctctctcctgagcagtcaccccgtttttcctgtaacacgtggaaacgaaactgaggggttggggtgctcagtgaggggtttaatacgacagttcatctctcagctctgcaaaataaactgtcttgtcccatttagttatccctttggcttttccccaggatagaatctcttctcttcagggaatctcccaggcttttgatatagcatggccacacccatgttctcttcctctgcccaagccaagcctagccccttttaccttctaattttccactcccgcattcagcagtcatgaagtagcaacactaataattctatggtccggggtcaccacatcatgaggtgtatgaaagggtcacagccttaggaaggttaagaacccctggtctagaggctcctcagggtactcctcccttgaaatcccatagtacctttttgttcctgagtggatttctggccacctatttattctaataacccatttccccactactgtgttgtctctggaagcagagatagaccctgcgctgggttcgccacctcagcttccaacctagtgtgcacaaagcaggggcttgacagagactggtaagccatggaaagaatagaggaagggtctcccacctttgttctcacccagtcagtactttgaaggacttccctagatctccagtaaaatgaaagaaaacaaacaaacaaaaaaccctatgcatttcataactccagggaagtagaggaaaccttcaagcactttgaagaaatcaaagcaggacatccaagccagtcacgttggcacacgcctttaatcccagcacttgtaaggcagaggcaggcggatttctgagttcgaggccagcctggtctacaaagtgagttccaggacagacagggctatacagagaaaccctgtctcgaaaaacaaaaacaaaaacaaaaacaaaaaaaagatttatttagtattatatttatgtacagtgtagctatcttcagacacaccagaagagggtgtcagatctcattgcggatggttgtaagtcaccatgtggttgctgggatttgaactcaggaccttcaaaagagcagtcagtgctctaaaccactgagccatctctccagcccaacactgtcttaagaagaaggaagaggaggaggaaaaggagaagaaggagtagaggaagaagaggaaggggaggagaaggaaggaggaggagaagagaaagaagaggaagaagaaaagaaaaaaaagaccatcaaagtatatttgaaaaagaccaaaaggaatgtctcagaacaatatttgattgagattaaatatacacacatacaaaaaattaaacgcatggatgagttgaatggtagattagagctagccaaaagaagaatagcttaactgaaaataaaatagcagaagattgcaacggaattggaatgggctttgtttctgcgtggcttgctgactgcaccaggctttcacgcagcctccataaagccccctgtaatcccgaaaaatactaccaaagctgtctgtctttctgcacaggatggatatgggatggaaacagccctgaagaaatgcagcagcttgcagcatgtggttctaaagtggtagaagcctgcatagacaggagcttatagaggaatggacttaaacattgatactcttggaagaaaatcacttcatgagatagtcaccaccattgcagcaatacaagcgtagtccagatcaccaaaggctagtgatatcacaaatagttttgtggcagagacaatcctttatcttctgttgtagataggtcctccctctccttccctctcacccctccattcgcccccccctttgttttgttttgttttgttttgttttgttttgttttgagacggggtctcattttgtagccctggttggcctgaacctcacagattggcctcaaactcagagacccatctaccactgtctctgaagtgctgggattagaaaaacatgcactgttcctaacaagaatctcaattttttttaagatttattttatttatatgaggacatataaataggacatagctgtctttagacatgccagaggagggtatcagattacagacagttcagacagaggttacagacagacaggttgtgagccaccatgtggttgctgggaattgaactcagggacaaagcagtcagggctcttaaccactgagccatctctctagcccaagaatctcagtttttaactggatctatggctaatatgaaagactgcaggttgggatataactcacttatatagcactgggtttgatcactatatccctcctccaaatgctaaaatataaagactgcagttctcaatctctccaagcagttaggtatagcttatatgatataagccgttgttggactagggagatggatacagtgcttattacacaagcatgaagaccaaagttcaaatccccacataagctgtaatcacagcacctgtgatcacagcactgagcagggcagagacagaatcactgagatttgctgaccaccagcccagacctcctacgttcaggagaataaggcagagagtgacagaacagaacacctgatgtcctctaaatttttgtggctgcgtatacacacacacacacacacacacacacacacacacacacacacacacacacctctttgaccatcacaccaggtcatcattagtaccccttccccatgatgtcattcttttttttttgtttgtttgttttgttttgttgttttttgtttttcgagacagggtttctctgtatagccctggctgtcctggaactcactttgtagatcaggctggcctcgaactcagaaatctgcctgcctctgcctcccaagtgctgggattaaatgcgtgcgccaccacgcttcttgtacaagaacctatctacaatcctgatacttgagcctcagccatagcttctatcttcagaattctgagagaaaggcttgaagatgtgcctgtcttccttccttccttccttccttccttccttccttccttccttccttccttccttctttcattccatcctttctctctttcttctcctttctttccttccttatttcttctcctttctttttctttgttcttttgtttgttttgttttgttttgttttgtttttcaaggcagtagtggcgtgcaacatttatctcagcacttgggaaacagaggccagcctagtctacaaagcaagttccaggacagctaagactatacatagaaaccctgtcttgaagcaaaacaaaacaaaacaaaacaaaacaaaacaaaacaaaacaaaacaaaaccaacaaaaaaacctcaaaccaaaaacaagacaaaacaaaaccccaaacaaacaaaaagaaatatgagcaatagaaatggactgagccagaattcaaacctctgtgttcatagtcatggatcgtaccagctcatgtctagcaggcggggctcagtgaagaaattctgccatggaattaatggaagaggaagacttttggtgacgcagcctctgaggggtttgagaggcaaagggagtgaagttctaagtctgaaggaggagccccagttgctcggtgcaggtagccggtttttgcgaatgaccaccagggggcagcattgttccgacaggaaacagtctacagtgcagcacagcactgtggcgcagattctgtggggcacagccatttctctgggcctcagtttcctgtcttttcagagaggaggttggggctgtgtaatatacaaagagcccctttggttgagctgtaaaatcagcaagaagggtttggagagatgcttcagtagttaacgagtatttgctgtttctagcacctacagtggcaattcgcatctgtcgataattccagttccagggaaatctacctcctcttctgacttccacaatacagacaggcaggcaagtcactcatacacatactataacataaaatcgtttgaaaagggggttgatggagagatggctcagtgggggcggggtgggggctggagagatgattcagtgggaagagcactgactgcttttacgaaggtcctgagttcaaatcccagaaaccaaccacatggtggctcacagtcatcgataatgagatctgatgccctcttctggagtgtctgaagacagctacagtgtacttacatataataaataaataaatcttaaaaaaaaaacacttaaaatgcaaatataaaagtaaataagtgtgtgcctgtaatctcagctcagtaagcagaggctggacagaggtcgaggccggtctcagctacacagtacattcacctgtgtacgtaccagaccctgtgttatgaaggcctaaatatgggccttgggtatagctcagtgggtgagggtgttccctgccacgtccataacctgagttcaatccctgggaaccacatggtggaaagaaaggaccaactcctgcaagctgtcttctgacctccacagtatgtagccaatatagtgtattgagtttaagttgtgtgtctgtatgtgtgtctttgagatggtgggggtggggcgggtctctctattctagtcctgatcatcctggaactctgtgtagaccaggttggcttcagactcagttatccgcttgcctctgcttgccaagtgcaactgaaggcatgtattaccacgtgaagctgagtcttgagttgtttatttaattttatttattatcatccaagcatggtcttgcccccacagtagatgcttagggtatgcagtcaatggggcagagagctggcagagagcctaagcagggattgcaggtgctgggaacagacaggcaggcttgtgagggcaggaaggaggccttgaggctgctctttacccccctcatgtatctggcaaagttgagcttgcctggcagacaaccagagactccataaggaagaaatcatgatcccagggaaatcatgcttgtgtgataaagaacagcttagggcctggggagatagccggggtgtaaagttgccttgcgagcacgaaggcaattttaatcggaacccacagaggagacaagctctgtggtagcctctgtctccactgtcttcctgaaaagctggacttcctctgctgtgaggctcgctgtctcacggaatatgagaggggatgtcatggacaagtgatgagagccattttagagacttgtgggcctgattcctttcttctccctcccaagtatctccccaactctaggggggcctcggagggggatgcctggagaaacggtcagtagctgggagttggctgatctcccggaggacctaggctcaattcctagaacccaggcaactcatcaccatctctagttccaggagatctgatctgaaaccctcttctagctgccccgggcactcggcacacatgtggtgtctaaatacatgtgcaaacaaagcatccgcacacacaaaataaatggatgaaaaaggaagaaatccctaaagaaatcacaaagggagacaacactggacatagaaaagcctagaaaagagaccaggagtcatagatgcaagcatcaccaacagaataaagaattacaggaacacacaaccaaacagctgaaggaactgagcaaaaccatccaggatctaaaaatggaaatagaaacaataaagaaagaaattccctattctcagagaggataaggggcctatgcaaggcagtgtgcaccgtgggttccacaatgagcccagcagacgacctggcctcagatgcctgcttctctgcttcctgcccttagctggataccgctgacagcctcagggctgtggtgatgggaaaggaagagagcacaaggaggaagttcgtgcctccaaggagcaggcatgagctccccagaagggaacaacagccaaagctagcctgcgtgagcccacggttctgcctgtcccttcaacatgggcagcacggggaatgagtcacagagatgttttgagtcttgggatcaggaatgtggagggtggcaggcatcttggttggatgctgggaaagacactccagggcccaactagagctgttcctgtgccctcctagctgggtctatgatctacctgtgagccccccacttttagctgccatccaatccattggtgtattccaaacagacaagcacaccacacacctgagttcctttccatcacccctgtacctcccatccctcacccctgctcctcccatccctcacccctgtacctcccatccctcacccctgctcctcccacccctcacccctgctcctcccatccctcacccctgtacctcccatccctcacccctgctcctcccacccctcacccctgctcctcccatccctcacccctgctcctcccatccctcacccctgctcctcccatccctcacccctgctcctcccatccctcacccctgctcctcccatccctcacccctgctcctcccatccctcacccctgctcctcccatccctcacccctgctcctcccatccctcacccctgtacctcccatccctcacccctgctcctcccacccctcacccctgctcctcccatccctcacccctgctcctcccatccctcacccctgctcctcccatccctcacccctgtacctcccatccctcacccctgctcctcccatccctcacccctgtacctcccatccctcacccctgctcctcccacccctcacccctgctcctcccatccctcacccctgtacctcccatccctcacccctgctcctcccacccctcacccctgctcctcccatccctcacccctgctcctcccatccctcacccctgctcctcccatccctcaccccttctcctcccatccctcaccccttctcctcccatccctcacccctgctcctcccatccctcacccctgctcctcccatccctcacccctg

SEQ ID NO: 98 - DNA, 27951 bp, Mus musculus
caggggtgagggatgggaggagcaggggtgagggatgggaggagcaggggtgagggatgggaggagaaggggtgagggatgggaggagaaggggtgagggatgggaggagcaggggtgagggatgggaggagcaggggtgagggatgggaggagcaggggtgaggggtgggaggagcaggggtgagggatgggaggtacaggggtgagggatgggaggagcaggggtgaggggtgggaggagcaggggtgagggatgggaggtacaggggtgagggatgggaggagcaggggtgagggatgggaggtacaggggtgagggatgggaggagcaggggtgagggatgggaggagcaggggtgagggatgggaggagcaggggtgaggggtgggaggagcaggggtgagggatgggaggtacaggggtgagggatgggaggagcaggggtgagggatgggaggagcaggggtgagggatgggaggagcaggggtgagggatgggaggagcaggggtgagggatgggaggagcaggggtgagggatgggaggagcaggggtgagggatgggaggagcaggggtgagggatgggaggagcaggggtgaggggtgggaggagcaggggtgagggatgggaggtacaggggtgagggatgggaggagcaggggtgaggggtgggaggagcaggggtgagggatgggaggtacaggggtgagggatgggaggagcaggggtgagggatgggaggtacaggggtgatggaaaggaactcaggtgtgtggtgtgcttgtctgtttggaatacaccaatggattggatggcagctaaaagtggggggctcacaggtagatcatagacccagctaggagggcacaggaacagctctagttgggccctggagtgtctttcccagcatccaaccaagatgcctgccaccctccacattcctgatcccaagactcaaaacatctctgtgactcattccccgtgctgcccatgttgaagggacaggcagaaccgtgggctcacgcaggctagctttggctgttgttcccttctggggagctcatgcctgctccttggaggcacgaacttcctccttgtgctctcttcctttcccatcaccacagccctgaggctgtcagcggtatccagctaagggcaggaagcagagaagcaggcatctgaggccaggtcgtctgctgggctcattgtggaacccacggtgcacactgccttgcataggccccttatcctctctgagaatagggaatttctttctttattgtttctatttccatttttagatcctggatggttttgctcagttccttcagctgtttggttgtgtgttcctgtaattctttattctgttggtgatgcttgcatctatgactcctggtctcttttctaggcttttctatgtccagtgttgtctccctttgtgatttctttagggatttcttcctttttcatccatttattttgtgtgtgcggatgctttgtttgcacatgtatttagacaccacatgtgtgccgagtgcccggggcagctagaagagggtttcagatcagatctcctggaactagagatggtgatgagttgcctgggttctaggaattgagcctaggtcctccgggagatcagccaactcccagctactgaccgtttctccaggcatccccctccgaggcccccctagagttggggagatacttgggagggagaagaaaggaatcaggcccacaagtctctaaaatggctctcatcacttgtccatgacatcccctctcatattccgtgagacagcgagcctcacagcagaggaagtccagcttttcaggaagacagtggagacagaggctaccacagagcttgtctcctctgtgggttccgattaaaattgccttcgtgctcgcaaggcaactttacaccccggctatctccccaggccctaagctgttctttatcacacaagcatgatttccctgggatcatgatttcttccttatggagtctctggttgtctgccaggcaagctcaactttgccagatacatgaggggggtaaagagcagcctcaaggcctccttcctgccctcacaagcctgcctgtctgttcccagcacctgcaatccctgcttaggctctctgccagctctctgccccattgactgcataccctaagcatctactgtgggggcaagaccatgcttggatgataataaataaaattaaataaacaactcaagactcagcttcacgtggtaatacatgccttcagttgcacttggcaagcagaggcaagcggataactgagtctgaagccaacctggtctacacagagttccaggatgatcaggactagaatagagagacccgccccacccccaccatctcaaagacacacatacagacacacaacttaaactcaatacactatattggctacatactgtggaggtcagaagacagcttgcaggagttggtcctttctttccaccatgtggttcccagggattgaactcaggttatggacgtggcagggaacaccctcacccactgagctatacccaaggcccatatttaggccttcataacacagggtctggtacgtacacaggtgaatgtactgtgtagctgagaccggcctcgacctctgtccagcctctgcttactgagctgagattacaggcacacacttatttacttttatatttgcattttaagtgttttttttttaagatttatttatttattatatgtaagtacactgtagctgtcttcagacactccagaagagggcatcagatctcattatcgatgactgtgagccaccatgtggttggtttctgggatttgaactcaggaccttcgtaaaagcagtcagtgctcttcccactgaatcatctctccagcccccaccccgcccccactgagccatctctccatcaacccccttttcaaacgattttatgttatagtatgtgtatgagtgacttgcctgcctgtctgtattgtggaagtcagaagaggaggtagatttccctggaactggaattatcgacagatgcgaattgccactgtaggtgctagaaacagcaaatactcgttaactactgaagcatctctccaaacccttcttgctgattttacagctcaaccaaaggggctctttgtatattacacagccccaacctcctctctgaaaagacaggaaactgaggcccagagaaatggctgtgccccacagaatctgcgccacagtgctgtgctgcactgtagactgtttcctgtcggaacaatgctgccccctggtggtcattcgcaaaaaccggctacctgcaccgagcaactggggctcctccttcagacttagaacttcactccctttgcctctcaaacccctcagaggctgcgtcaccaaaagtcttcctcttccattaattccatggcagaatttcttcactgagccccgcctgctagacatgagctggtacgatccatgactatgaacacagaggtttgaattctggctcagtccatttctattgctcatatttctttttgtttgtttggggttttgttttgtcttgtttttggtttgaggtttttttgttggttttgttttgttttgttttgttttgttttgttttgttttgttttgttttgcttcaagacagggtttctatgtatagtcttagctgtcctggaacttgctttgtagactaggctggcctctgtttcccaagtgctgagataaatgttgcacgccactactgccttgaaaaacaaaacaaaacaaaacaaaacaaacaaaagaacaaagaaaaagaaaggagaagaaataaggaaggaaagaaaggagaagaaagagagaaaggatggaatgaaagaaggaaggaaggaaggaaggaaggaaggaaggaaggaaggaaggaaggaaggaagacaggcacatcttcaagcctttctctcagaattctgaagatagaagctatggctgaggctcaagtatcaggattgtagataggttcttgtacaagaagcgtggtggcgcacgcatttaatcccagcacttgggaggcagaggcaggcagatttctgagttcgaggccagcctgatctacaaagtgagttccaggacagccagggctatacagagaaaccctgtctcgaaaaacaaaaaacaacaaaacaaaacaaacaaacaaaaaaaaaagaatgacatcatggggaaggggtactaatgatgacctggtgtgatggtcaaagaggtgtgtgtgtgtgtgtgtgtgtgtgtgtgtgtgtgtgtgtgtgtgtgtgtatacgcagccacaaaaatttagaggacatcaggtgttctgttctgtcactctctgccttattctcctgaacgtaggaggtctgggctggtggtcagcaaatctcagtgattctgtctctgccctgctcagtgctgtgatcacaggtgctgtgattacagcttatgtggggatttgaactttggtcttcatgcttgtgtaataagcactgtatccatctccctagtccaacaacggcttatatcatataagctatacctaactgcttggagagattgagaactgcagtctttatattttagcatttggaggagggatatagtgatcaaacccagtgctatataagtgagttatatcccaacctgcagtctttcatattagccatagatccagttaaaaactgagattcttgggctagagagatggctcagtggttaagagccctgactgctttgtccctgagttcaattcccagcaaccacatggtggctcacaacctgtctgtctgtaacctctgtctgaactgtctgtaatctgataccctcctctggcatgtctaaagacagctatgtcctatttatatgtcctcatataaataaaataaatcttaaaaaaaattgagattcttgttaggaacagtgcatgtttttctaatcccagcacttcagagacagtggtagatgggtctctgagtttgaggccaatctgtgaggttcaggccaaccagggctacaaaatgagaccccgtctcaaaacaaaacaaaacaaaacaaaacaaaacaaaacaaaggggggggcgaatggaggggtgagagggaaggagagggaggacctatctacaacagaagataaaggattgtctctgccacaaaactatttgtgatatcactagcctttggtgatctggactacgcttgtattgctgcaatggtggtgactatctcatgaagtgattttcttccaagagtatcaatgtttaagtccattcctctataagctcctgtctatgcaggcttctaccactttagaaccacatgctgcaagctgctgcatttcttcagggctgtttccatcccatatccatcctgtgcagaaagacagacagctttggtagtatttttcgggattacagggggctttatggaggctgcgtgaaagcctggtgcagtcagcaagccacgcagaaacaaagcccattccaattccgttgcaatcttctgctattttattttcagttaagctattcttcttttggctagctctaatctaccattcaactcatccatgcgtttaattttttgtatgtgtgtatatttaatctcaatcaaatattgttctgagacattccttttggtctttttcaaatatactttgatggtcttttttttcttttcttcttcctcttctttctcttctcctcctccttccttctcctccccttcctcttcttcctctactccttcttctccttttcctcctcctcttccttcttcttaagacagtgttgggctggagagatggctcagtggtttagagcactgactgctcttttgaaggtcctgagttcaaatcccagcaaccacatggtgacttacaaccatccgcaatgagatctgacaccctcttctggtgtgtctgaagatagctacactgtacataaatataatactaaataaatcttttttttgtttttgtttttgtttttgtttttcgagacagggtttctctgtatagccctgtctgtcctggaactcactttgtagaccaggctggcctcgaactcagaaatccgcctgcctctgccttacaagtgctgggattaaaggcgtgtgccaacgtgactggcttggatgtcctgctttgatttcttcaaagtgcttgaaggtttcctctacttccctggagttatgaaatgcatagggttttttgtttgtttgttttctttcattttactggagatctagggaagtccttcaaagtactgactgggtgagaacaaaggtgggagacccttcctctattctttccatggcttaccagtctctgtcaagcccctgctttgtgcacactaggttggaagctgaggtggcgaacccagcgcagggtctatctctgcttccagagacaacacagtagtggggaaatgggttattagaataaataggtggccagaaatccactcaggaacaaaaaggtactatgggatttcaagggaggagtaccctgaggagcctctagaccaggggttcttaaccttcctaaggctgtgaccctttcatacacctcatgatgtggtgaccccggaccatagaattattagtgttgctacttcatgactgctgaatgcgggagtggaaaattagaaggtaaaaggggctaggcttggcttgggcagaggaagagaacatgggtgtggccatgctatatcaaaagcctgggagattccctgaagagaagagattctatcctggggaaaagccaaagggataactaaatgggacaagacagtttattttgcagagctgagagatgaactgtcgtattaaacccctcactgagcaccccaacccctcagtttcgtttccacgtgttacaggaaaaacggggtgactgctcaggagagagaccattccctgaaatccagtgagtaggtagtcagatgcaaggcaatgctgggcggtggccacctccagagggatgataggagtgccagcttagggctgagcttctgaagttgggttcccgtgctctgcagaggtcaggtcggtaacagcatatggctcgtctcatctgcctcagaagcccataggctgctagggtccaagctgaccacagcttagctgtccttggggggaaaaacaaaaaacaaaaaacaaaaacaaaaacaaaaaactcaaaataccaattcagaaactaatcaaccccaaaagagtgctcagtgacccagctgaccgcatcccccgttaccaggggaacaggaggagtcgcaatgttccatctcaggaagtaaggagagtgctccaggaaccgccagcgtgtttccaccaggctcccagccagctgtcctttatacgcttggcacaagaacccaagaggcttaagaatagcagcagcttgtctggtgctaaacacttcatcctgtgatcccttccgagacacagcatccccagcagttttcactaaaaggctgagctgaagttcttagtcccaacattgcagactgaagcggtggaaaatggccacctcctgactgcgtgccgcatacacctagaagccggaccgatggacgggatgagaccacatcccttcagtcacttcgtttggtagtcagttaaagataacttgagtgttctcgtctatgacactcctgccacttccatctgccactgccctgatatatttatcaaaaaaaaaaaaaaaaaaaaagacaccggtacatgtcctcaatctcctccggtcttgtctttgatgttcgtggatataactaggaattatgtggtgagtgaggtgctcttctgtcagaccagaggacccacccatgcatgacatgacttcccaggtactacaggtctccttggttacttctaatatccctctatcatattctattctcacctggatgtgagtcaccagcacagtagaaggaagttcttcccagtgaactgatcttaaattactttcaattctttaattaagaaagattcatgcccagtcacccctacttttgaaaacttaaattcagcatggatttattttatgacctgggtttagccacacactatttttttttaatgtgctatcacattgatttatgtgtgtatgtgtcagggtgcacatgtcccacagtattcttctggaggtcaaaggacaatttgtgcaagctgggctctttccaccatgagagtcgcagggactgaattcaagtcggcagaacaccagtgccttaacttgcttgtgccatcttgccaacccacaccgaatttaacatttttaaacatttaactattcatttatttttattttcatgtatgtacctacttatacatccacgtgctactgtctgtggagaccagaagacggtgtcaaccgtcctgggcactgagctgccatgtggatgctaggaattgaagctgggtcctttgtaagagcaagtactcttaactgctgagtcatttccaacactctccaattttaaagatttttattttgtgtgtctgcatgcacaagtatcggagagcatcagactctagagctggagatgcaagcagcaaggcttctgagccctcggcaccctctaaatactgtgaactttggttcgtcacaggaacagctctgtgttcttaacccttagccatctttattccatttgattattttttttaacttatattttgaaattttttaatgtgtgttttgccagaatttatgtctgcactcagtatgtgtgcagtgcccttggagggcagagagacatcagatcccctgaaactgaagttgcagacagctgagagccgccctggcagggttggaattgaacctgggtcttcttaaagagcagtcagtgctcttaaccactgagccatctccccagcctccacttaagtaaaaggtgtagtagtttatgcatctagacaactcagtattacccaacaaaggaatggggcatatgcacgtgtcacaatatggatgtatcttaggatactatgtcacctgcatatggcaggacactccagtaatcccagcaccgaggggccaagcaggaaaatccagaccagcctgtgctacatagggaatcctgtcccccaaaccaaaagaaaacaacgtacaactcaggaatcacatatttggcaatgggctcaagagaactcagcagttgagagtgcttgttgctcttccagaggaccatgagttcagtcgccagcactcaggtcaggtggctcacaaccacctggtcagctccaatctagcaatctcctcttccaacacacacacacacacacacacacacacacacacacacacacacacacagacactcaaaacaaagacaaaaccaaaccgcctttgccaatgtgctaggggcatttatctgagacagggtctcagtgtatacatagttctgcctgcccttgtctcccaaagtgctggggttaaaagcatgctcccacaccttgctgtttttgaggcagatttcaaattgtaacccaggatagccccaggtgggtagcaaccctaactttactaggattacatgtgaaccaagaacaactctgccaaattacttctcataatggctttcttacttgtgttttaggaataatagcacttaaaacggtttaagacagatctttatatctcagtacgttgggggatggtggggagcgacacagacggacacagctcagtggctgagcactggctgctcttccaaaggacctgggttcaattcccagcacctacatggcagctcagaactatgtctaactccagttccaggggactcagcaccctcacactgacatactcgcaggcaagacaccaatccacatttcaaaagactcagtgcatccatggtggcacatgcctttaatcccagaactaaatcggcagagggaggcagttggatctatattgagatccaggccagccagggacacagtgaggccgtctcaaagaaatagaaaagcaagccttcccagaacactcagtaccatctgatagcacggtgtccttggagttcgatgcaagcttttacaaagcaagaaccgttatctgttttaaataggacttggcatttgtggggtgactgagtcttgggtactttatgtaccaatgtagaacaacctcaaagaactgctaaggaaagcaacagaagcacaagctagccatcttgcacagccggtgtggggggaagcagcacacccacacagctttatatatggctcaggcctggaaggctcctcttcagctcaggctacacttggatcaagatgcccctgctctggccctttaagaacaaaacatgaagtttaggggtggcatgtgcctttaacttccacctatcaggcagatctctgtgggccagcctgatatacaggatttatcccaggacagctagaactacatttgaccatttgaaaaaaccaaactggctgctaatttacacctgtagccccaaaactacagtcaagagaatcattaaatttgaggccagcctgacgtacaatgaaaccagtcaagaggaattggctcatgtgtagacaatacgaacatttccacttctctggtgtttttatttccccatgtgaccctggcctagaggtccctatgtagaccatactggcttccaacttgtgatccactggccccagcctgctggggttagagtgtcccatgatgcctgggctatgaacaatttggagacgggctggcagatgccagagagctgcagcctcagcatctcaggtgccccttcccagaaaaccagtttatagaacccaggcttgcccaacctacagcagaactcgagacaacccggctatggtcctatatagtctgcaagtcctctcaaacagtatacatttcccttgctgtgtaccctggtgacaagaaacaacaccaaaactgctaggcatggtcacatgcaccttcaatctcagcacttggaaggcagaggcagccggatctctttttagtttgagaccagcctcatctacatgagtttaagggtagccagggctatgttaaaaccctgtctcaaaaccacctggagccttttccggtcacggcgctgcgcggtgaggagctcgtgcttgtgctcagagctatgctgcagtccgtgcaggtcttcggacgcaagaaaacagctaccgctgtggcccactgcaaatgaggaaatgggctcatcaaggtgaagggacggcccctggagatgatcgagccgcgcacgctgcagtacaagttaccggagcctgttttgcttctgggcaaggagcgatttgctggtgtggatatccaggtctgtgtgaagggtggtgggcatgtggcccaaatttatgccatccgacagtccatctcaaaggccctggtagcttattaccaaaaatatgtggatgaagcctctaaggagatcaaagatatcctcatccaatacgatcagaccctgcttgtagctgacccccgtcactgcgaatccaaagtttggaggtcctggtgcccgtgcccgataccagaaatcctaccgataagctcatctcaaggatcagggtttacctttgtaataaacatcctaggattttaacgttaaaaaaaaaacaaacaaaaaaacacctggagagctgggcgtggtggcccacgcctttaatcccagcactcaggaggcagaggcaggcggatttctgagttcgaggccagcctggtctacaaagtgagttccacgacagccagggctacacagagaaaccctgtctcaaaaaaccaaaaaaaaaaaaccaaaaaaaaaaaaaaaaacagtaatgaagaaaaacacctggagagatggattagcaggaagaccctggttcaattcccagcacccacattgacagctcacaactgtctctaactccagagttccaggccctcacatacatgcaggtgaaacatcaaagtgcataaaacacaacaccagaaccaaaatagcttacacaaagcaatttattaacagaaaataatgagaagtcctgttcacagacggcgaccacgacgacccccttttcttcgagtgctatcagagggaatgggggtgacatcctctgtgagaaaaaaaaaaatatcattgtagccacaagtctaactagcagtagactttattttcccccaaatgtatctccaatggtcagcaatcacggggtgccccacctgccaatttctcatcccaaccccatttggaagtggacacaggctctgagaaggtggacaatcaaaggtgaaaaacaccgagtttaactcagagcctaccgactgtagtagaagagaccctacagtgagcaagtgtggctgtttgctctttacaccacgtgacaggagccactgttatgaaggtcagcagagactgagggcaatcagtggagtcacctggtaagccacagaaggctctgaaatcagagtcggaacattaagttaccccaacatagggaaaaattgtatccactacagagatacgcctctcataatgccttttacgtactccttacaaaagtaaccagacaaagctgacccattaggcacattgcagggtttggaaggggtcaatgcttgaaagcaaccccaagtgtaaccagaggggacacttaccaatccgcccaatcttcatcccagagcgagcaagagctctgagggctgactgggctccaggtccaggggtcttggtcctagaaaatgaaggattgttggcctagtcagcaacttaattttaattcacttctaaatggagaagccaacagttaaatacttgagggagccatacttaaatctccaacttcacaacacaaaatccttttcaaaattgctaaatgagggcaaagagacggcttaatagtactgccatcttagcagtgggcctggactcttcttactgcccacacggtggcttacaaccatctgcaacaccagtgccaagagattcattgccctttttgaccccaggtatgcacatggtacacacactcatgtaattttttttctacctttattttggtggtggtaggggggaggggacagggcagaaacatgctgggatcccaggcccccatttaagtcacccctaccaccaactccatacttcctagtatttaccacagactgaaaccatgtaacctcctgcatgttgattaaaagcccgagtttcctgcaaagtgaggtgccacccaaggctatctcagtcttgcttactacctgggtaagccgtggttattcaataaacacaaaggaacacattacccatttttttgaggaggaactcactgtttagcccaggctagccccaaaccctagctcctcctaatctattccctgctatccctaactaggaacatacatacatgcctcagacagaccagatgagatcgcaaatccaccccccatcttctgtacctgtttcctcctgtggcccggagtttgatgtgcagggcagtgatgcccaactccttgcacctctgggccacatcctgggcagccaacatggctgcatatggagaggactcatctcggtcagccttcaccttcatcccaccagtcactcggcagatggtttccctggggacaaaggcagaaccgtgtcatttttcaacaagggtacacagaacacttactgaaccccaatgagcagtctaacagcatcttaagcatatatatatatgctgggtctgaacaagacagctgtaagttgtgtttatggggttcaaagacccctacatagctaaactcctttgagtcagcaagctctggttgataaaatcccagcaagggggcagagacaggagcatcctaagttcaagtttatcctcagctccgtaaaacacagtgttttcttataattagtgggaaattaagtaaaacagtaattctttagggcaaatcccatcaactggtccccctgaggccagttttatgcctttctgcagaaatactcacttgccagaaagatcggtaacatggacaaaggtgtcattgaaggatgcaaagatgtggcagacaccaaacacattctctccctcagccacctgaggtcccaggctgatgacctgctcttccttcttttccttccccttgcgtggcgccatttctaggtaaggaacctcaatgttagcaacaggcaaagggtccccccaaacattttctttacctactaagggaaaacctaagccttgctcctaatagcccgtctctgttcttggcatttatcaagtttaaaaaggtgccgaacgcgcctttaggacgagcccacggcccagcaacgaaccacatgcacaagttgctatgtgtaacagcatggaagtcgggtctcaagcctgagtcagcactctaactcttcccttaaacttggaagttctattcgttcagggtgacccagcaggcagttgaatagtagacaccacaactaaattagggcgttctctgtccatacacaatacttaaacccaactttcctgggccccagataacttaacagtttaggcccaaagcagcctaaaaagacaagtcaaagaactttccagcttatccttgccaccagatgcctccccaacacagcctcacagcctgtctagaagcaatcctttcaaccgttttctagtaccaaacattaaaagcagagtgtggtgtgtgtaactccagcatatggggggtggggcgggggtcagaggcaggaacatctactgtaacaagttctaagacagccagggcatgccttccaggaagtctaacggaaaagggctacacacctgcgttgagatcacccaactctagcctgcaatcaaagtacactcgtgggaactaggaaaaaggcacaaggcggctgatttattttttcttgccaaagtcccaggcagtcctttgactaacctgaggtgaagtagaacacactatcaccactttcagaacaaactagctattgagcagcactcaataaattaggtcatctcccagcaactaagactattaagcagaacagtctaagatacctgccttgtattctcttcctggtaccaagatatccctactcgacacacacacacacacacaaagccccaagcaccacaggccttagaagtaggtttcaagtgtccctggcatctctctccctccctcttgtgccttcctcatagggtccaatcgccagaagcacaagggcaggtctcgaacgtacagtcacccgatctcatcctcaaactaggcaaacacagattcggtagggttcaaatcgtctgggccatgatggctactcaatgtatcttcgctctgctcggtgggagtgaatatccacgagaatacaaacatatggcatccatcctactccaccacggaggaagccgaccggcaaatgtgtccgactcgggagtagccgtcatgggttaggattagaagcactccacacaggaccgaggttttatggtatcccttttaatttaattttgatttacagaggggatcggttcggggttttcacgagaggaacgaggttcggtgcaggccggcgattgcccgcacgcgatcaaggaccggctcccccgaaccactccgtgcgacggctgtggcgagaggcccagggcaggacccgcacccattcccaaccccactcccgatttcctccatctcaggccagaggccgccaccgggacacggcggagccctgggtccggatgggtcgggccgggcgggcgcctgctcgtctccaccacgcacttggctcggctactgcgcacagacgccggccccgatcccgcagacggccctggccaaaggatgccgcacgattctcaaggcccaagcctccctacctgatcgtcgtctccagactcctccaccggaaagagagaggcggaaggggcgggcggacgggtcacttccgtcttccggaagtgtatctctgaggtcactgagagaggggcaggcttccggaagaaacctccatcacggtttccagcgaagctaaaaccgccggtacggaagttggcctataaaagaagccggtgctacgtgttgctgtgaccgaatctgcctatgagaactctcggagcggacacgagtgggagaacaggcgggctcggccccaggtcgcgggtgctgctgcagcttgacggacttccgccatcagaacctcaggctagccagcctggaggcgactgcgctcctcgtggtacggaggtgaataacaacaacaaacgaccttgtaatgtaactttacccggttttgcacactacagagcagcttagtaataaattattcagcacgtccctgttaccctgcattatgcatcttatctttgatgcttcacacagcataaactagattgattttgatttccattgtacagatgaaatgagaccatatgtgtgtggcagatttggggctatgacataaaacccttatatctaatagtcatttcatataaccttctaataacaatactgcaggacattgaataattgggaaactttgtagatggaaacacggatgtatacttagtagaacttgaaaaacatgggtacagtattcacacacatacactggtatgtatatacatctctagattcatattacatatatcatgacctgtatatctctcagagcatggcgaacagtagagctacacgtatatactatatattgcatatagctctctgtgtactggaattgataccattccaaaagacttaggctaaatttaaggaaaatttattctttgttgttgttgttttctattcaggtttctctgtgtagccctggctgtcctggaactcactctgtagaccaggctggcttcaagttgttgttttagattcagagtttcagggtttcactgggtaccactggctgccctagaactcaccctgtaggccagactgatctcgtacttggagatctgcctgcctctacttcctcagtgctgggatgaaagacatcgtgcaccaacacctcccagctaaacttttattttttatttttttggtttttcaagacagggtttctctgtatagccctggctgtcctggaacacactttgtagaccaggctggcctcgaactcagaaatcggcctgcctctgcctcccgagtgctgggattaaaggcgtgcgccaccacgcccggctactaaacttttatttttttgagacagagcctcaccgtgttaccattcctggcctggaacttgctatgtttaccaagatggcctggaactcctagagatcccagccacctctgcccctagaccactaggatctaaggcatgtattaccatacctgaaggaaactttccttaaaaaaaaaaaaaaaagtattgttttccttgtgctttataaaagcagctacagaagccgggcatggtggcgcacgcctttaatcccagcactcaggaggcagaggcaggcggatctctgagttcaaagccagccagggctgtcagagaaaccctgtctcaaaaaacaaaacaagaagtttagatttattactttatttttcatatctgagtattttgcctgcatgtgtgcacaccgcatgtgggtctggtgcctgtgagagtcagaagggggagtcagagcccatggaactgaagttatggatggttgtgaggcaccatctgggtcctgggagccaaactgagttctccgatagagctagaacaagagcaaatgcagtaagcactcttgtctgttttgtctaagatttatttatttattattatatgtaagtacactgtagctgtgttcagatgcaccagaagagggcgtcagatcccattacggatggctgtgagtcaccatgtggttgctgggaattgaacttgagaccttcagaagggtagtcagtgctctagagaaccactgagccagtctcgccagcctcccagcctgagactcagaaatggagtgaggagaggacacagcaagtgtgtgtgcgtggcttctcaggagtcagtcttttgtagtttggtttgggttgcattttgttttgtttggatgtttgtttaagacaatgtctttttttccattttttgcttgtttctttgtttgttctctgagtaaccccgcctgctctggaactctgtttgtagaccaggctggccttgaactcaagagacccacctgcccctgcctcaggagtgctgggattaaaggggcgtgccctcacccacaaggtctgaagtagctgaactcctcattttacctctggctctcaatgttgtaatcgcagctgtgggcctcctggtgtgtagctgagccttctctgtaaagactggtttatcttggtttatctgttttcatcttctctgagctgttcctattcgagacagggtttctctgtatagccctggctgtcctggaactcactctgtagaccaggctggcctcgaactcagaaatcggcctgcctctgcctcccaggggctgggattaaaggcatgcgccaccactgtccggctgttcctattctttaacggttaggattctttgttctgtggtagtgtgttgctctgtagaaggaggatattagcagggatgagagccagggagtgagctcctgctttgagtctaaactgaaagcgtgctgtaaacaccagggagagagagaaggcttcctggagggagcagcctacgcggtcacccaaagtggcctccacctcccgcttctcccgcctcagctccctgagagctggggtcacatgcgtgcaccactatgcttggttcttaacctcttcttactaactagctggccatcttgcccaccgaggccacttaacttccgtgttgtcaacagtcacgacctgttagtcttctccaaaccaccatcacactcttggcccctagaccctgatggaaaccaacaggcagtgtgttgactttaaccgtcccttggtgagtatattccacttaaattcgaaatccgttcttcccactctctccatgttgtccctcgtgccccgacattcctccaacttcccagcatgctcagtcgctctcaccatttccttactctcactttctgttcccttgtctcctcttgagaaaaaccatggcctccaaaatctatgagctgaggagataggcagatctgagggatagactgcagagggcctgccagggcgccccggggactagcatgtgggcaggtaaaggtgccatgagatgagtgagtgtgtttagtgggtagtagtggggactgctggactaccatcacagccagtgacttgcttactcatctaattgaactttcctggtgactggtagaggcaggctgtttcagtcccctcattttacaacttaagaaacacagaagccgggctggtggcgcacgcctttaatcccagcacttgggaggcagaggcaggcggatttctgagttcgaggccagcctggtctacagagtgagttccaggacagccagggctacacagagaaaccctgtctcgaaaaaccaaaaaaaagaaaaagaaacacagaaaatgccgtgagggtgtggtggcacatgcctgttggtccaagtacttggaaggctgagggaagaggattgctatgagtctaaggccagcctaccctccacagtgagctccaggccagccagaactacatagcagtccctgtcagaacagtaaaaaacaagagtcttagcttccctctgtgtttctgggattaaatatcctgacgggccaggcagtgatcacacacgcctttacctttaatcccaatactcaggagacagaagcagggggatttctgagtttgaggccagcctgttctacagagagagttctaggacagccagggctacacagagaaaccctgtgtcaaaaaaccaaaccaagacaaaacaaaaacaaacaaacaaaaccaaaacaaaaagcagcccaaggaggaagggtttatttcagtccacagtccataaatgtgtggaagtcccagctgcaggagctggaaatcacaggtcacatcgcatctgtgtcaggaagcagaaagcagtcaatgaacgaatgctgcagcccatccgctctccgctcttatccagcccaaggtccctgagcccagagaaggaagccacccactgaggagggcttcccaactaatgtaattaagaaatctctcacaaccaggtctgctggtgcacacctttaattccagcatttgatgcgcagaggcaggcagacatttgagagttcaaggccaacttggtcttcatgtgagagtcaggccaactagaaccatatagtgagaccctgtctttaaaaagaaagcaagctttaacagacactctctggcctctctctcaggtgatgctaggtggtgtcaaattgatgattaaaagtaaccatccctactccaccccttatcaacctgtcatgccaccatatcttttgtccagataagctcaaaggtcaccttctaatacaaaatacaccaagcaaagttctagagttcaatcgtttaatatcataattattaacagtaaaagtccaaagtctcccgagttccgataaagcaccatttccgtcctcacaagattacactttgctgcccctcagcgaaagaaccaagatatagggacagtccgagcacagcaaatgcacagggtgtaaggcaggcacaaaggcctaaagctctgtgctctggatgtgggccgtgtaatataaacacctgggctctgaaaaggcttctgttgcctgccacctccatctcctctgcccttggcacactcagcgtctctccttagcacacggtgccgtggtcctggcatctccagtattctggggttaccaatgcagccttaggctttaactttatggcttcacacaatagcttcttagggcccatccccaaatcttgcagcttttgtgcctttgaaaccagtaacacttggacaacagacgtagcccagtaagcacccttggatcacagctgcatcatcctatgtgtgctgaccccaaggaaatgctttcttatctccttaaaaaaaaaaaaatccattgaggacaagctggtgcacaagtctttaatcccatcccttaggaggcagaggcagaggatctctgtgacttcgaggccacccaggtctcaatagcaagctcaaggacagtcaatagctacgacatagagagaccctgtcgagaaacatttatattgctatacttgtgtgcttgtgtgtgcatcaacaaatactgttgtgtagatgtggtgatcagaggacagcttgtgggagttggttcagttctctcctctcacagtgtggatcctgggaagtgaactgaggtagtgtggctttgaccttgtcccactgagctctcctgtcagccctaggtttttctttaatggtgctaatatctctctctgtctctctctgtctgtctctctctctctgtctctctctctgtctctctctctgtctgtctctgtctgtatctgtgtctctctctgtatctctgtctgtctgtctctgtctgtctctgtctctctgtctctctctgtctctctctctcctcatccctctctgagatagatacttactatgtagccctggctggcctggaatttgctatgtaaatcaggccaggctcaaactcacagagaaccatctgtctttcctgtcaagtgctgggattaaagcatgcgccaccacacttggctaatttcttatttaatagttacagctgttttgttgcctacatgtaccttgtttgaaacgttgaacttgcctatgctacatctccttttgttgaacaaattaattcattatttttctattcaacttcactcaattctcaggacataggcaaaatacagtcacggttttccccaaaacatcacacacagatcgcctctcactcggttcctgatgccattcctcgtctcctctgacaccttgtgagccaggaactcactatccgaatttatgtcataagttttgatgtacattggtatttttcctgaatgtccatctgtgtgtatgagattgtcagatcccttggacctggagttacagacagttgtgaactgccatgtgggtacagggatttgaacctgggtcctctggaagagtagccagtgctcttaaccacccaggcatatctccagccctctgtcaggattcatatcttccagacttctaccagagtggtcccctaagccttgcattagctgttttcctagcccagtgttgcaaaatgatccttattccatccccaaacagttccaaaggcctaacagcccatgaacaggtttatcacaatacccactcctagtaccagtttctgtcttagtttattttcctgttaacctgacaaaggcaatgtaagggagaacagattcatttcttctcacagttcaaggggtggtgaaaatgtcaggaaagcatgagcttgaagcaactgatcacaccaaatctacagcaggaagtagagaacaatgaatatgtgcatgctagccttcagccccttctctacacttagacaaccccaaatccccaagcctagggaatggtgccacccacagtagataagtcttcccatatcaactggtttaactaaggcattcccttacagacactctcagaggcccttcttttaagtgactctagattgtctcaagttgatgattaaaattaacccccataaaaataaagcaaaacaaaatacaaataactgtaagttgggcctgggatcagatctttcagtgattgaagatgtgaggccaaagactggaggtctcgaagccacagaagcagggcttcttgcagggctcttagctgcaactctgagagctgaaactcagagcagtgactcttgttgctgtgtcctgcctagcacctaggagtttctgggttcgatctctggcaacaaaacaaacaaaaacccaaatggagcctggcatagcaggacgtacttgtaatctcagcacttgggaagtagaggaaaggccaggagaatcagttcaaggcctgtctgagatacatagtgggcagctgaggctacatgagattctgtttcaaacaaaacaaaagattatcaatgagtaggactggcataagattagatgaaaggaagctaggacattggggtaggaaagtcctgttcttactcgagcatcgctagatggcgcctggctccacgatgctggtagttggacccggtgctggttttagctctggagtttgtttatcccacttaagacatgtgatgtgaccagggctgtagcaaaactgaagcagcgcccaattctacttgccagcttcagagttgagcaagtggagacgtttttgcatctgtgcctttgtgcactcagtcaagtcgtaggctaatttacaaaggaaccagcctcctttgctctttcaaagggaagaaccacacccattgggttgtctgtcctaggatctatagcctgtatggcgtgctcaatctacatattcagtgaaccctctttctgtgatgaatgacgaagccgtggatagggaagttgtacatctctctccccgtggaaagagctgtctaatgtgagtggtaacagggcattgtgtaagtagcctgccgataatcagatcattacagatcgtgggaagtgctgggaaggaagacgactggacaggcctgggccactgttggagaagtggacaaggactgccagggcaaggaaagccttgcaaaagacttggaagagggagagggagttagggaagggggagatctgggagggatggtactgagaaaactgaggagcaaacccaggcactctgcaagagaaacaagtgttcttaacccctgggccatctcttcagcgccccctccccccccccaaatgatatctttataggtctgttctagaggctggagatgaagttcagtagaaggaatgcatagaacatatgaaaccttgggttcagtctcaagtggcaacataatccagccatgaaaggcagggctgtaatctcagcacttcagaggtgcaggcaagaaaagcctgaagttcatgatcacccctagctggtgagtttgagggcagcaagaggtacttgaaaccctctttcaaaaatagatagatagacagacagacagacagacaatgaagtaaatcctggctttgtttggagaatgagtgtcagtagaaggaacaagagtggagacaataagtgaagaagatgagctggagagcactgactgctcttccagaggtcctgagttcaattcccagcaaccacatggtggctcacaaccatctgtaatggaatccgatgccttcttctttcatgaagacatacttgcaaatagagtactcatatacgtaaaataaattaataaatcttaaaaaagaaaaagagaaggaggaggagaggaagatgtgaaggctgctgtataaatgggagaccacagtggcttagaccatgacaatagctatggagagaaataatagattttagggggaggtagaggtgccacagtgcttggagcaaatccagagcctcagaggcaagtgctccatcatgaagctacaacaccagggcaatatccttatctgaggccaattttggaagcaggctctaaccttttaagattagttgggctgagctggagagatggctcagcagttaagagcactcactgatttcttccagaggggtcctgatttcaactcccagcaaccacatggtggctcacaaccatctgcaatgggatccagtgccctcctctggtgtgtccaaagagaatagcaatgtacacacatacataaaattaataaatcttaaagaacaacccaaaaaaaaaaaaaaagattagttgggctactccagggctgagaaggattcaggcttgagggatgggcgaagctgagaccttgtgccaaggaggaggcctaggtgaggtgctccctgaggcctaggtgaggtgctccctgaggcctaggcgaggtgctccctgaggcctaggtgaggtgctccctgaggcctaggtgaggtgctccctgaggcctaggtgaggtgctccctgggtaaagctgggcattgagctaggccctgccatgcttggagtaactctgacaccttagcagaaagacagcggccgagcatttgaagcttactggaaagactaaggctgctgaaatgtatcagcagcctctcgattatactccatatcaggagtatatggtgctggaggagacctcactcagcaagtagcaggggatggctgatattggtcaaggctgctggagagaggaggcttcttggacaggaagtagaaggaagccacccaaaggatggcagaaactccgtgactgtgactctagggcaatgtgtgtgtgtgtgtgtgtgggggggtggccatacttactctatctctttgtctggttacatcttccttttttggtggtacccttcccccattgccatatggcagggcccagctgctcacagattctggggagggatggagagaggggcagcctcagggatggggctgtaatttcagctggagacaaaactcctccgtttcagccgtctggttcctgctctttccagcatttctcatgcgactctctgggctgtggggctcccacccttcacccccaccgcaccagaagctttcttcacctttctccaaggagggccaggcccagggggcgccaactgctaactcccacccggaaaggaaggcacccgagtcaggtggcacagtatccctagggaccaggggctaattggagggggctgccacgtttaattagtggttatgaggtgttgggacctgcatctgaaagtacccccacagtgtctttcatcttcaaaacctccccaccaggctggatgaaagggccaagcagaggccaggtattaataataattattagtttcactaataaagtgaagaagaggaattatcagcaaagctccttccttctcctccctgtcttttctctcctccctgttggctcctcctcctctccctcttgtttttctcaacacttgagtttgttctctttctgtttcagggcctggggctctggctcttggtctcattagtattggggtgcgcgaggacaaatggagactactcctgtgctagtctgggtggtagaacaagaaagtaggagatatgaggcagagggatgtgtccttttgagtatcatgttcctgcacgcatcgggtcccattgcaagtggttgtgagccaccatgtggttgctgggagttgaattcaggacctctaaggggagcagtcagttctcttaaccgctgagccacccctccagccctcctgctgttaatagagcttatatgaaatagtcctgctatgtggggctgactgttactcgctatgcagcctaggttggccttgaacttgcccagtccttctgctctgcctccttcctcagtgctgggattaggtgtgtgccaacaggctcagccacagtcattaaaggagtaatatgccaagtgctagattaggcaccaggggactgactcagtctgagcaggacagacatgggctttgctgtcaggagttaacattctagtagggagggggggacaataaacagtaactggcaggcacagatgatgtcatagatcaggacgcactcctggaagggactgaagtgcgaggttgtgtggcatgatttgatttggagtggtttttccattttgggtgtgtttgtttttttttttttttttttttttaactattatttgttttgttggtttggagttttttgagacagggtttctctgtgtagctctgactgtcctggagctcgctctgtagagccaggctggccttgaactcaagatccacctgcccctgcctctgcctcctgagtgctgccattaaaggtgtgcattcccaggcttggttcccccccccccccagttctgagacttgaactcaaggccttaagtgaatgctaggtaagtacactaatactgagccaaactccaggctcttaaatagaaattccgaggagagctatgtgggtggctactttaaattagggaaccatgttggtgacatttaggcagagtcttgaatgataagagagatcagttatgggaggagtaattgggaaaagcggtaggcaagcactcagcatgagagtgtgagccagtagttctcaaccttcctgatgctgcgaccctctcatacagttcctcatgttgtgataacttccctccaaaccacaaaattattttttgttgtgacttcataactgcaatttgctactgttatgaatcataatgtaaatatttttggagataggtttgccaaagggatgtggacctgaaggttgagaagtgtcactgtgaaagaagggggagggcaggagagatggctcagcggttaagagccagcactgctcttgcatagagccagagttcagctcccaagaagtcacacggggcatttcacaaccactgacaactttggctgcagggatgtgatgccttcctctggctcattaggaacttgaacacatgttcacacacatgaataaaaataaaatacttccttttttgtttgttttaaagatttttaagaagtacgtgttggtggaggctgtgcacattgtatcttatagcagttttaggtggttgagttcgttctaaacttcttagctttttgaataagaaaaggccttcttccctttatttttcaggagtgacgattttgagttagggtctctctcggtaacagtagtgcaggttcacctgatgcttgagtgagatgatttcctgcctttcttgtgcttgggtttatataccttattatagttcctggcttgaactgggttctgcaaattactgagttggccatagtaggaaaagctggcaaaaggagtgggtgtccatgcatggaagtgtgtgggccagttggctggtgtttgatgaatgaatgagc

SEQ ID NO: 99 - DNA, 35497 bp, Homo sapiens
tacaggaggcaggtatgggaaaaagaggcccagtcctgctgctgaattggtgtacgaccttgaactaagggtttctactccctcggcctcagctgtcccagcgttgagagaatgcagcgagttctgtgggtcaaaaatgggctagaggccgggcacagtggctcacgcctgtaatccgagcactttgggaggctgaggcaggcagaccacgaggtcaagagatcgagaccatcctggccaacatggtgaaaccccgtctctactaaaaatacaaaaattagctgggcttggtggcgcatgcctgtagtcccagctactcgggaagctgaggcaggagaatcacttgaacccaggaggcggaggttgtagtgagccaagatcacgccactgcactccagcctgggcgacacagcaagactccatctcaaaaaaaaaaaatgagctagatgggggagatgagaactgtctggggttggggtaggataggggtcaggagaaagggctcattagagctctccctggtccttcacagctggaaaggagaacatagcaccccagcctcagaccccccatggggcagtcctgctggcaccgacaccccccgggaaggtaaggagaggctggggcctgagaaagtgtcccccaccctagttcctacccagaccctttcttctgtgccctcaacacctgggttctagccccagccctggtttgctatgtaatctagtcaaatcactgctcttctctaggcaaaatgaggggaaaacgagggcctcccagccccaaagttttggggttctgcccgtatcccagaatacactcaatccttttccagccttgtacccaactccagcctgtgccctctgcccctgcagaactcctgtgggcctctgctgctcagccatcccccggaagcctcgcccttgtcctggactccggtgcctcctggcccttgggtccctggacactggctgcctccaggcttctccatgccaccaccagtggtgtgccgcctgctgtaccaagaacctgctgtctctctgcctcccttccctggtaagatgataattcaacattcattcaacatatatttgagtgccaatctgccacatattggagagggaagaggaagaaagcataggtggggagagggaggaaagaaactatgaccttggcccctatacactctgcattcttttattcttattaggctttgaccctggcacctccctccagctgcccactcatgggcccttcaccacctgcccaggatctcacccagtactgacagctcctctttctggagagccccaagggccccctagccagccccgcacgtgagtagggagagaaggatgtgtatcataagcctaagcctgtgctgtgtccaaccacagtgctggtgtccaaccacagtggataatgaagatgaaaaggtctctgactaataggcaaggcagagctctcctagtactgccatttcctagctgtgatgctttggacaattatctttacctctctgagcctgtttttctatcagtaaattggagacactattacttacctctctgattgttgtaagaattagcaataatgtatggaatagacctagcacagactctttaatggtagctgttatatctgcttagacagatttgatggggtaagattgcctgctgatatggggggcagagatgatgagagcctcagagacccaggagaggggccagaggccattaggaaaagcttcccaaaggtgagccaagctctccttcaagttctatggtgactggggaactgggggaatgggacccagactctgataggtcagggacagtaatctcagtcttctaggtgtttttttaaaaaccggcatcaggtggggcctggtggctcacacctgtaatcccaacactttgggaggctgaggtgggaggattacttgaggccaagagtttgagaccacctgagtaactgagcgagacttcgtctctacaaaaaaattaaaacagccaggaatggtggtgcacacctgttttcctggctacttaggaggctgaggtgggaagatggtgtaggcccaggagttcaagcttatggtgagccatgatcacaccgccactgcactccagcctaggtgacagagcaagagcctgtctcaaaaaaaaaaaagacactagtgatttcccataatcctcacagtagccctgggaggaaaaactggcaaggatttttactttactgaaaacaaaataagtcaagacacagcttaatggcccagcaggctctcagattcccagatcaaaacatggcaaaatcctgcccctctttcaatgtgtgcatgtctgttcatctgtttaaccaccctggcatcttctctccttgtttctagacactcaactctgatactccagccctgtggcaccccagaccctcttcagctacagccacaggtcctgggaaagaagtgggatctagggccctgggaggaggttgagcctggggaaggaaaaagcaggaaactgaaggaagcaggggctgaggaacacttagagggtgggcagaagcgggggttcccagtctgcttgtctccctttcccttgcaggcctctggagcctcgtgcctggcccggacatctggtccctcagagtggcagctgcagcaagaggcagctgaagccctcgtggggctgaaagattcatcccaggctcctcgtgtgaccccttctgtgccccccaaccctgcctggatctccctgcttcacccctgtggcccaccaggtgggccatgaaaggagaggatggatagggatggctgggaaatggagatcactgaagtacacagggactaaccaaggagatgagggggtcgacaggttgaacgtcttcaggcccaggaccccaagctcctcagcctggcccctgggattgcagttgagagttattcagtgaatccattttatcagtttggcactcgacagcaaatttcttgatatcaaggaaagtggggcactgagaaaggcagggacttgcccaagggcatatagtgagacagtggcagggaacccaatgctctgtctctggacccaggctgcctgctgaagtctgaagtggggtctggcctgggaggaggtctgataagtgccttcaaggagcttacgttctagttagggaaattggatgccttcacaaggctcagtgacaaacctgaagaagattggaggaaccttgaagagtgagaaacacctagggggacagacagggaaagctgcgaattctcttgtccaaatagtggattgggcagactggcctggaggaaatgctagaacagagggaaaggaggctggagaggcttctgatggtggagatctggcatgccaggcttaggtgtctagaacagcaactgtatgtgaaggggagccagggaacgtttctgaactaagcaaggacaaattcagagaccctgagctttagaaagacaagtgggtggctttgatggacggtttggaggaggcaagactggaggtgggaaaattagcaaggaggtctgtgaaataatccaggagaacaatgatgaggcctggattggattcggtaaaaagagggggttgctagaaggaaaaacaggtgtgacctgatcctgccccttccttcttgcctgtagctcctgctggaggaagaggattccagcctgttggcccctgtcttcgacccagcccagccccctctgttgctctgcatattggccgtctggggtccatctccctcctgagctagaaacccagagatggaggctgtcttgctatggcagggaggtgacagcctgctggcactgtatatttagtgtcttacttaaggatttatgcatggaatttaatgtagtacaagcttcgggcttttttgtttgtttgtttgtttgtttgtttaagctttcaggtgcttcattagctttcagttcctttggtagtgtgggcatttccttggctgacagtggatattcttgtacccttcttgggtcctgggatctcttgaaatccccaataaagagagagttgtgctatttaagctgaccagtatctataaacgtgtttgcatgagtttacatcccaggattccatgattctgtaaatgcctatgcattcatgtctgtctccatgcatgtgaaaacaggagagtgttttcattttgtgtctaggtttgtgtgagtaagcaagaaataaacctttgttgttgtaagccactgagatttggagagtgttaccacagcctaacctagtctatcctgactgacagaaaggacttgttcatttcgcttctcaaagtgaaaaatctgttatccaatagctaccatagatgaaaacaaacttggatttttttctttgtccaaataaaaaaaaatgatgtaaagaaataatgggggattcactgattaattgcccgctctgtgccaggcatagacagtttccagctgtctagaggggctacaaatcgaaatgcctacagggctgagcagatcaaataaatgagtaaagaaggccagatggaccctggcaaactgagaatggatgccttgcctaaggagcagcctccttttggccctagcagattactgccaggcgggaatgtggactcagtgttgctccatcttctgattttttaagagaaactggaaaactagatttccatgtaaaacatcttaattttcaaatgttggctcagttttcttctttaaattctatacgtgccaaataaaacatattttcaggctagctttggccagtggaataccaatttgatacattttccagatggggaaattgaggctaaccagaatagaaagaatcgagttagtctttatcacaagtttttcctcaactagggaggttcacgtgtctgagtttcgaaggatccataaaaggttaagaaacatttattaccatttattgagtgcccactccatttgattcacatatcttcacagcaaccctggaagttatgcaggatggttcccattttacaagtgaagaaacaagcttaaagaggtaaagtaacttgcccaagtgttttaggggaaatttctaggcagagatcagaggagggttccttctctttgccaggctccaaattagttaataatgtttataaagcattgggccgggtgtgatagctcacacctgtaatcccagcactttgggaggccaaggcaggaggatcgcttgagcccaggagtttgagaccagcctgagtaacacggggagaccctgtctctataaaaacaaataaataaaagcatagaatgaaagatgcaccactcctttccccaatcaggactccagaagatacatacaagtcaagagtttttcaaaaaagtcttttatttttctcctcaagatatcattaagaataagatcttacctgcatttgtttctcagtcctctggtgtcaagtccttctccttgaaccattcagtacataggaaaacctgttgagctattccaaagacatgaagcctggagacccccttcccattcccacccttagaaggggctcaagggatgtgcttgatcactgattctttttcctgatgttacctacaccccttgttttactcaagatgattgatggtgatgacatccaattacaacttgttatttcttatttgggattttgagagggtgggtttcttctcctccctagcagagtacagagtaacaaacctgcagcacttctcaggagatactgagatatcaggagaccaaagtcggcttcacacccttcttccctccccttagctataacttagatatatgattgctccttaatagacctgcctaagacttggtgtgccatgctttcctagtgacagatgaccagggccacaaagtcacagagaaaggaagcactgcaacatgcaacatggctgagattctgctactcagcactgaccaagggtcctctgtacaccaaggtcacagagctgagaagggtaaaagagaaagtataatttggggttaaaggatggcatgaaaaggggaggaaaagaggaagtgatggagattgggggaaggagtagactagaggtcacctctccttcacctctcctccagtacccggccttcagtacccagcctgggcaaggcttttcacaccagttggccaggccaactttgtctttcaaatcgttagggccccccattagtgcctgagggaaagggccagagcttctgcagatgtcagtcttagggaaaagagcagatttaagagttgctcatgctcctaagttgttgcctgttcaggtgcagcactcttcacctgtggttgtagggagccagtaggctcctggcctcttcttggctctgagagattacagataatagactgtgagcactgtttcctatactgccccctttcccacttcccagtgccaggtagggaaaggtattgccatggtccaataaagtactgagtaaatcatctcccttctaaaccttctttgtgtaccctcttggcactctgcagacttaaccaatgaggtcccaactatgaagcaccgtccctgttcctctctctcctcacaagactcctccccacagtcacccaggttttatttcaggagcttatttcacattctgccctttgggaatccatgctcctttcgcttcagccctacattaacttgctccactcctgacctcaattctcgtccaacgtagaactgacatcatacacttatcccatccagcctatacgcagaccctcattgcttcgtccacataggcctcattctgcacccctgttccattgtgtagctggctttgcagccctgacacgtttgcataaatacagtcctataacccctaccctgcatgggccttcacaagatcctgaactcttcacaaaaccaaagttcatccttttcatccaactcaaaataatatgttaagcctctcaggcagagttccctatgttcccaaggggccactggtctctacttcatagtcctgatcaccctgagctgtgcctatctatgtccatctatgtctccccctcagagaataagcactctcagagcacaggacttgcctgcagctcctccttgggagctcagaataaatgactgagtaaaatacgttctgtctgattccttaggaattgttttttcctactgagttaacacactccaatgctgcccctctcctcatcaaaatgtgaactttctgacctcaaaccattttttctaagacagcctctgtcacccaagctggagtacagtggcacagtcatggctcacggcagcctcaacctcccaggctcaagtgaccctccagcctcagcctcctgagtagctgggactacaggcatacacctccatgtgagactaatttttattttttgtagagacagtgtctcactatgttgcccaggctggtcttgaatgtctgagctcaaccgatcctcctgtctcagcctcccaaagtgctgggattagagttgttttgtttgtatgtgtgtatttttgtttcttcttattattttgggattagagttgtgagccaccgtacccagcaaaaaaaccttcaggggccagatacagtggctcacacctctgatctcggaactttgggaggccaaggtgggaggattgcttgagctcaggagttcgggaccagcctgggcaacatggcaaaaccccctttctgcaaaaaatacaaaatttagccaggcatggtggcgtgcacctgtagtcccagctactcaggaggctgaggtgggagaatagcttgagcccaggaggtcaaggctgcagtgagccatgattacaccactgcactccagcctgggtgacagagcaagactgtctcatatatatgtgtgtgtgtatatacatgcaacacacatatatacacacatatacatatacatatgtgtatatatatatatatattatatatgttcatagcaaaatttagtggaaagtacagaattcccatagtccccttgccaacacacagggatggcctcccttttgtatcaacattccacaccagagtggtacctttgctacaatcaaggaacaccgtattatcacccaaagtctgcagtttacatcagtgttcactcttgttgtatgttctgcaagttttggcaaatgtgtaatgacacgtatccaccattacagtttcatagagaatagtttcattgccctaaacaacacccattcatccctccatccctccaagccgacaaccaattatcattttatcattttattgtcatcacaattttgcctttttccagaatgtcatatagttggaatcatacatttggattggcttctttcagttagtaaggcatttaaggttccaccgtatctttcttttggcggggtggaggggagggggaggcagacagggtcctgctgcggagtgcagtggtgctggaacgcagtgcacttggctcactgcaacctccgcctcccaggttcaagcgattctcatgcctcatcttcctgagtagctgggattacaggcgtgcaccaccacacctagctaatttttgtatttttttagtagagacgggatttcgtttttttgttttgtttttgttttgagacggagtctcgctctgtctcccaggctagagtgcagtggcgcaatctcggctcactgcaaactccgcctcccgggttcaggccattctcctgcctcagcctcccgagtagctgggactacaggcgcccaccacctgccccagctaatgttttgtatttttagtagagacggggtttcaccatgttagccaggatggtctccatctcctgacctcgtgatccgcccgcctcggcctcccaaagtgctgggattacaggcgtgagccaccgcgcccggcctaattttttgtattttagtagagagggggtttcaccgtgttgcccaggctggtcaagaacttctaaactcaggcaatctgcccatctcagcctcccaaagtgctgggattacaggcatgagccaccgctcccggccagctcatttctttttagggctgaataatatcccactgtttttaggtactacagcctcaacccatttttaaaactgtgtttaaagagtttattgaggccgggtgcggtggctcacgcctgtaatcccagcactccagtgccactgcactccagagcaggaccctgtctgcctccccctcccctccaccccgccaaaagaaagatacgggggaaccttaaatgccttactaactgaaagaagccaatccaaatgtatgattccaactatgtgacattctggaaaaaggcaaaattgtgatgacaataaaatgataaaatgataattggttgtcggcttggagggatggagggataaatgggtgttgtttagggcaatgaagctattctctatgaaactgtaatggtggatacgtgtcattacacatttgccaaaacttgcagaacatacaacaagagtgaacactgatgtaaactgcggactttgggtgataatattgtgttccttgattgtagcaaaggtaccactctggtgtggaatgttgatagaaagggaggccatccctgtgtgtcagcatggggactatgggaattctgtacttatacactaaatttacaggcatgagcctgtaatcccagcactctgggagaccaaggcgggtggatcacaaggtcaggagatcaagaccatcctggctaacacgatgaaaccccgtctctactaaaaatacaaaaaattacccaggcgtggtggcgggaaactgtagtaccagctactcgacaggctgaggtaggagaatggtgtgaacccgggaggtggagcttgcatgagcagagatcacaccactgcactccagcctgggcgacagagcgagactccgtctcaaaaaaaaaaaaagtttattgcaaaagcttgagtatcttcagttgtggcttcaaatccgggctcaggctttaaccttatgtgaccctggacaaatgacttgactctaaggctcagttgactggtctataaccacctcacagagttgtcaattatgaacctgtaaaaactaacatgtacaaaaattaacaccagggacacagtgctgagaaactgtgttctctaaaatcacagactgccagaatttttaaaaatctttaaaatcataacaatagtgaaaatgggacatctcattcttacctggaaagtctaagtcactttgacacagagaagcagtcatgatctcagagaagcggtttttagagacaacattgtacatttatctaaactttctaatgtccaaggaagcagaatcctgggtctgctcctcgcccaggcatgatgttagctccgttgcataaatacatgcctgctttgccttatgtccatcaaaactctgctttatataaattttacctaagcttcactcttcccaaaatcctatattcaccctgtctcttcctttggtcaggcactccagagttcctctggagagctttaaaaaaaaaaattaaattcaatgaaatgacttaaatgaattaagtgtaaatgattcagaactggtattagaaattattaaaagtgggggccaggcacggtggctcacacctgtaatcccagcattttgggaggccaacgcaggtggatcacctgaggtcaggagttcgagaccagcctggccaacgtggtgaaaacccgtctctataaaaatacaaaaattagccaggtgtggtggcaggcacctgtaatcccagctacctgggagcctgaggccggagaatcgcttgaacccgggaggtggaggttgcagtgaaccaagatcacatcattgcactcccgcctgggcgacaaagcgagactccaactcaaaaaaaattaaataataattacttaaattataaaaagtgaatataaattacccaagtacctggagatttccagttagacatgcatatattacccactttgaatacatatggaaatatgtatgtgttggttctggaaaaacaattgagataatgaaaatattttctcaagttttagaaacagtatgagataggtttcaacaacattctacatgaatgtaaaaccttgatttaaatatatgatcttatgctagaagcatggttggttttaatttttctaacagatacgagtcttggcttattaataattaacacattttgcagccacagtatcagtgtggggtaaaattctaatatttgctcttatgttttaaattctcagtctttccaacataagaaaatagctacacacatttcagtgtttcctttttgcaacaagttaacataattttattggaccacgttatttagttgttgggccttgtaaggattaaatgagatcatgcatgtaacactacagtaacagccacatgataaatgtccaaataatatttacctgtgcctggcacagagcaggcactcaaaaaatattttttagagcatgtgacgcgccatgaaccagaggagccactttaaatggacaaacggggatctcatttttttttttttttttaatggtgagacaagccctgagaaggcaaatggactgcctaaagctacacaggtcagcggggcaggtaaatctaaattggcaaagtaagggctgagcgaacagactccgacactagaaggcagagctgaactaacttctgctaaggtcccgcctctgccgctttgtcccgcccttatcttctcccctcctccagcgcctcattcccttttcgctcgccccggccgtgctgaagcaacttccgccctgagaagggtggggcttccgtctcccgctctcgcgactcctggcggtgaaggacggaagatgatagccacatttcttcctcgcccttcccctaggttccctgtcacagttccgcccttactactcccacttccggccagggaacagccacttccacccggaaaaggggttgttccgccgtggggcgccagctgtggcccacccatcctgccccgtactttcgccatcatagtattctccaccactgttccttccagccacgaacgacgcaaacgaagccaagttcccccagctccgaacaggagctctctatcctctctctattacactccgggagaaggaaacgcgggaggaaacccaggcctccacgcgcgaccccttggccctcccctttacctctccacccctcactagacaccctcccctctaggcggggacgaactttcgccctgagagaggcggagcctcagcgtctaccctcgctctcgcgagctttcggaactctcgcgagaccctacgcccgacttgtgcgcccgggaaaccccgtcgttccctttcccctggctggcagcgcggaggccgcacggtaagcgggggctccgagctggaccgggcgcgaggtggcagggccggacgccgaagcctcagagcgcgtgcctgagggccccgaggcgcccggcgcgggcccgtcccgccccctagagccgcggccacgtgcgagcggcaggcccggacatgcccggtcagcgccgtccgggaaccgagcgtgggccccggggggcagcggcggggtgcgtggggcgtccggagtcccggggctggggagtggggtcgcgcaggatcctcacacgcaggggccgggctctgttagtgcgatccagagaggccgtgggcgtcggtgagctccttcagacccgcaggagccggagcccggcgttgaaggggccgtgggaagtaacggggggtaccacggtttaggatgcgctggagcgaaaggattggggtggggtccgtgctcttggcagtcgtctctgccaggcctgtgttcacatgcttgactttctccctcagatgcctggagttactgtaaaagacgtgaaccagcaggagttcgtcagagctctggcagccttcctcaaaaagtgagtttggggactgaggttcaaaacgggtggaggctgtcgccttggcctgcccatctgagccccagtgtttgccggtcctggcaggggaggcttgtttggggcctccgtggctcctttcagcgtgaggcctggcttgtgttccggttccagcctctctttgtactctgggcacagcatagttgtgttgaggggagggcatttgggatatggggtagtttgtggagatgactgaatcgtgcttttcccactgttttggtcttaggtccgggaagctgaaagtccccgaatgggtggataccgtcaagctggccaagcacaaagagcttgctccctacgatgagaactggttctacacgcgagctggtgaggaacttaggtctttggctggagagtggggagctgggtgacccctggcacaaaccatacttccctgtctcctctgagctctttcccgccccaagagggagagaaacccttggttgtgtcaccacttgctttgtgtgatgtgacattcgataacttggtactccaagtttttatgacattctaagagctttgtgagaggaggacctgtggctttgagcctcaggggaaaccagagacagatgaatgttcatattttgcttacaggtggtttaatcctttctatatacacggaggcagactccctgggtttggatccatcttttacatctggctgtgtgtcctctggcaagttggttaacctgcctgtgcactctctcatccccaaaatgggactaattattgtaccagtactagagtattgcaaggattgaatgaatttaaagcagagtgtttagaacgtgtctgttgcacagtagttattcaggaaaaagccagttgtctttactattgctcagatcatcaagttagccttctccatatctctaacaggctgtttctaactaaatggttggagatctggccaggtcagtccctgctttaaatcttgacttctgatcttatggacaccctgcaacctcgtgccagccccgtctcttttcgatcttccaataataatttacgtacagtccctgactagtgttagttctcacgtgtcttaatatttcagtactcactaaatcttcactttcaggaagatgtaacagggtgggcggtggcagtgccgtgttatgtcaaggtgacagccttagcaccgaccttcactaactaaggggcctcggcctctccaatcttaaaccttctctctctgtgaagtggggactccatcctgaccacaacttgtctccagataagaagtaggtgggaagcagggtttggaaatcggcaaagctcctccatgaccctgaaaagagttggccttggtacaggttgcttggcccttcagaatatgaagcattttgtagatttgtggtacacttgtgcctcaaatgtctattggggcccactctttcaggccatggagtgagcacagaggaccagcataactcagccgcggcctctgaggactgaaagatgaacttgctgaggtgggtcgggttgctggcataccacctacccaccgtttgttttagacagaaaatggggcggatgaagagaagctgacttccctgggcgcacagcagtgacaagccctggaagttacatatctcctccacctgtccccccatcttgctttggcagtgcctcaagggtcagttggtcagagcagctttggatctgggattagcctttctcatttgctggggtgaagacacgttctgcacataccaaatacctccaaagtaggactgtatgtgtcttgtacattttttttttttttttaacatggggagggattaacaagagatggcattaagaccttggataataaacctagttgcatctgctggtcatggtagagctgctgtggtcccttgcagcccacagtggccctgcctggaaacctcaagcaggatgtgcatcttctgcctgcctactgatctccatcacttggagtaccccaaaggcctctttttcacctcacttgcccagctgtcctagcggcataggatggttgtgtggtagaccagaggcctgttgtgtatatttttgttgggttatagccacccctgtgtatctacatgcacaagggcagagttgtagttgtggcagaagctgtagcctacaaagcctgaaatatttcctacctgaccctttattatttattttcagggacagggtctaggcctgtcacccaggttggagtgcagtggcacaattatagctcactgcagcttcttgggctcaagtgatcctcctgccccaccctcctaagtagctgggactacaggtgcctatcagtcaccatgcctagctaattttttttatttgtagagatggagtctcactatgttgaactcccaagctcaagcggtcctcccgcctcagccttccaaagcactgggattacaggcaaagttgaccagcctctattctagagtttaacatgttccacccagtttggcagtcagcttatactgatcatgggagtgatcttgttttaccaaagaggaagctgtggtgcagacgggcgaagggacttgctgcaagttaccctgggagggcttggcagggtggctctgtccaaaactaggttccctgctatattcccttttttctactcataagagtctggcctattttgcctcctcagatttgaggctaaagtgtgctaaagctgcgcccttgctgagcagggccaaattgtggagacctataggaatgagtgtgaggtagacaggtcttaatcctggggtttgggggtaaagaggcccatggtagaagatggggccctcttgagggtggtctggaaatggagcagagctgtaggagtaagcagtcccaaggcagtggtgtaggaggcagggcaaggtagaggaagaacccgcaaagacttgctctcactggacgttcaagggatggccgccatgggtctttatgaagggggtggtgcagtgtagccctggacaggcttttttttttttttttttttaaacagagttgcactgtcaccaggctggagtacactggtgccgtctcggctaactgcaacctctgcctgccgggttcaagcgattctcctacctcagcctcccaagtacctgggactacaggtgcccgccaccacgcccagctaatttttctatttttagtagagacgggttttcaccatgttggctgggatgctctcgatctcttgacctcgtgatccgcccgcctcggcctcccaaagtgctgggattacaggcatgagctcccgcacccagctggacaagcctcttgctgtcttaattctttaaaggacctgctgaagatggagatgtgggagtccagtttggtgtcctggtgtgcgtctgagagcagctgctgaattgggatgtctggaaacacttcttgtaggttggaggctgctccatctctggctcctgcatggggctgggcacccacttgtgctatgatagtagaaagaatgagatctgggaggcatcacagaagtgagttaagggatgaatcaaggtcaggagagtggtttcttacaagttcggcagagaagggtcagctagagtgtgctggggaagttcttccctgcctttgactcagtaggtcaggatgggaccaccggtctggactttgctgagctgtgatgactcctaaggagccgtgcttggttggtctgccccgtgctcggatccagagggaccctccctctcggtctagcaggaacacagctgccctcccttgaccatgaactcacagtagagtggagaggggtggcctcctttacagttccaggtaaggggtgattcctggacaggggttcctgagaggagtgggttgccatcccaagaatgcacacagcagaggagcagaaggcctctagcatggaggaactggaggagaacccatttgtgacagcaacttgctcgcaattggccctcatgagtaccagctacggcggtctgcatttgtgcagctccacatcaaaagctggggctggaaccttggtctccagggggtgaggaaaaaggtcagtgttttaatagaacgcggtatttcaactcttagcattttccaatttgtgaagttaataacccttcctctcccttctagtgggtcagaaaaaaataattagcatgaactgggatagcaagggaggagcttgtaatatctgaccaaggttctccatgccaaaaggtttttatacagccttaagaaaaatttaagcctccattgaagaacctaataggcctttgggaggccaaggcaggcggatcacctgaggtcaagagtttgagaccatcctgaccaatgtggtgaaaccccgtctctactaaaaataaaaattagccaggcgtggtagcaggcgcctgtagtcccagctactggggaggctgagacagaagaattgcttgaaccccggaggcagaggttgcagtgagtctgagatcacaccactgcactccagcctgggcaacagagtgagactgtctcaaaaaaaaaaaaaagcacctaataggccttatgggagcttgttctctaccagtcactgtgctcaaggtttaagtaaagtgtctcctttagtaccgcagcacaaaccacctggaggataggtgggtcctgtgtccctcctgaggaggaacggtgtcaggattcaagctcctgtctgactgctctgggcgctagtcccaacccaacaagactgaggttgagtgtcccatttctggtgtacagccgctttgggcatctctgcgcttaggagtgtgtgccttattcttaaaaagcaagataacagaggcccggtgcggtggctcacacctgtaatcccagcactttcggaggccgaggcgggcggatcatgaggtcaagagatcgagaccatcctggctaacatggtgaaaccccatgtctactaaaaatacgaaaaaattagccgggcgtggtggcgggcgcctgtagtcccagttactgtagaggctgaggcaggagaatagcatgaacccgggaggcggagcttgcagtgagctgagatcacgccactgcactccagcctgggcgacagagtgagactccgtctttaaaaaaaaaaaaaaaaaaaaaaaggccgggcgcggtggctcatgcctgtaatcccagcactttgggaggccgaggcgggcggatcaggaggtcaggagtttgagaccagcctggccagcatggtgaaaccccatctctactaaaaatacaaaacattagccaggtgtggtggcgtgtgcctgtagtcccagctactcgggaggctgagacaggagaattgcttgaacctgggaggcggagctagcagtgagcccagatggcaccactgcactccaacctaggcaacagagaaagactccgtctcaaaaaaaaaataaagcaggataacaggaaaagctattctgcgttccccagtcctgggtactgtagttcaaatgggagagcaggtctccacccagagccccagggcacaaccagctacagggcccagagggatggcagcagctgctgggtatttgagctggtctgaaagggtggaggtttccagtgatgtcactctctggcaggattgtggggggtggcttacgccaggtgagtctgtctattggtcctggttatgggcacttattaccaggcagtggcgtagggggtagggcctggagtgaggtggggattttaaagtgagcagatgccagaggtagtgagccaacagcagggctgtgctcttggcccccagcagagcatggttgtatagtatcagctgaggattggttccaggatgaaccccaatacccaagtccacagatgctcacccttactataaaatggtgtaatatcggggccaggggccgggtgcggtggctcaaccctgtaatcccagcactttgggaggccaaggcaggtggattacgaggtcaggagattgagaccatcctcgctaacacggtgaaaccccgtctctactaaaaatacaaaaaaattagccaggcgtggtggcgggcccctgtagtcccagctactctggaggctgaggcaggagaatggagtgaacccggaaggcagagcttgcagtgaaccgagattgcgccactgcactccagcctgggcgacagagcgagagactccatctcagaaaaaaaaaatatcggggccagcacagtggcacacacctgtaatcccagcactttgggaggccaagatgggtggttcacttcactccaggagttcagccagagcaacatggcaaaaccgggtctcttcagaaattatctgggcgtggtggcttgcacctgtagtcccaactattcaggaggtcaaagctgcagtgagctgttaccactgcactccagcctgggtgacagaatgatgccctgtctccaaaaaaaaaaaaaagtataatatttgcatatatcctatgtagatgttttacttttgagacagagtctcactctgtcacccagtctggagtgcagtggcatgatcttggctaactgcaacctctgcctcccaggttcaagtgattctcctgccctgcctcagcctcccaggtagctggggttacagggggtgtgccaccacacctggctaattttcttgtaatttcagtagagatggggtttcaccatgttggccaggctggtctcaaactcctgacctcaggtgattctcccgcctcagcctcccaaagtggtgggattacaggcgtgagccactgcgcccggcctgatcccatatattttaaatcatctgtagattacttatagattaatacaggccagacatggcacatacttatagtcccagctacttaggaggctgaggcaagaggattgcttaagcccaggagttcgaggctgcagtgagctatgatcacaccacagcactccagcctgggtgacagaatgaggccctttttttgtgttttaagaaaaaagaaaaagcactaatacggtgtaaataattgttacactgttttgaattgtagtttttttcccctaaatatttttgatccacccttggttgagtctgtggatatgaagggctggctgtatctggacctgatctcagggcaggagtgggctgggaacaagcggtgtgtaagaactgtttctgggcagaagcagcccaccccacacagactactgcctggcacttggcagttatggaagaacccccaattcccccacttgatctttagaactagaggaaagaaatcactagagcagactcagaccaacttgctgatctctgggtcccaggaacaaaccagactctgctctgagctccagagctaggcaggaccatgtgatggctgaaatctgggtgcttcctgcatgtgggccccggtgccatcacagtggcaggacagggcagttcctccagagctgtgtgacacggagccagtgagtaccctctggcacctcagtttcactctttaaaggagagtagcacttgacacacctgttgagtcctcagagtaacccggccctcaggtgaagcagggtggagagatcgaaaagcatttggcacagggcctggcagatgtgtgctccagttaatagaagcgtgcaagcgtttctggggaggctggtgtgtcgactggattttacggagctttttttgcaggcaaggaggctggctggggtggaccagggacttgcccaagccagccttccctgtgtctgcagaggggctggtacacattccaagcagggggcacccactgcacagagtgtctgccctgcccttgttatcctgagctctccagactgaggtggcccggagagtggcaataggtcccttcactcctgcttctctggggcccatggagatggtcacagctaggctccacccctacataacctcaggttcaattcaacagcagtgctgctgggatagtaaccactaaagaagttggccctggagatggtgggagtgcccacccagggtgcagggctgtttgtcaaggaagagctagccgggggggtgggtgaggagagggggctgtcagtttctgggtgttagtgtgtgttttcagtttcccttcttataaaacagtgagaattagctgtttacacacaaggaattgtttacctgagaccttgatcaagacccttaaatctccctctcacactacccccagcttccacagcgcggcacctgtacctccggggtggcgctggggttggctccatgaccaagatctatgggggacgtcagagaaacggcgtcatgcccagccacttcagccgaggctccaagagtgtggcccgccgggtcctccaagccctggaggggctgaaaatggtggaaaaggaccaagatgggtaagcagggtagggggggctgcattgatggagtagccttgaggcccggtcatcaattccccaacgaatggtcctgcatagtctgcccagcccctcaggcccctcctatcagaggcaggcaggaggggattctgcagaaaagcaaacagcacggggcctcaccccgacctctctggctgactagcccaggctccaggagggtaatttagcgactatctgctttcattagcctgctcgttaacttttcccaattgatttttcggggcttttgatctaaatgcttgcacaaacaacaccccgtcagctcccaggggggctcccactactgcccccagctcgttagaatgcacctgactagggccctcagtgggacttggctggcggcaggtggcttcttgagaagcctggctcacagccaggagggaaggggctgagaacaggacctgtgctcactggggcctgcatgacccttccctccccacagcggccgcaaactgacacctcagggacaaagagatctggacagaatcgccggacaggtaaggcctgcgtttggggtggggctgggtcccttagtcgctgcccaagcatttccaaagcccatacttcgtcaggtagacttatttccttctctggagggcacagcccagggtgctggtggggtcagaggagggctgcccagagacaggagaaaggacagtcctgtctgacttttcctgttggtgctgcttagaaatttggaggcaggctggctgtggtgtctcacccctgtaatcccagcactttgggatgccgaggcaggcgaattatctgaggtcaggagttcaagaccattctgaccaacatggagaaaccctgtctctactaaaaatacaaaattagccgggtgtggtggcacattcctgtaatctcagctactggggaggctgaggcacaaaaatcacttgaacccgggaggtggaggctgcggtgagccaagatcatgccattgcaccccagcctgggcaacaagagtgaaactccatctcaaaaaaaaaaaaattggagggaactccagcccaggtgccactgggcatctatccacagagcacatagctgtacccgtagatgactccccctccccaggtcagcctgcgatgtttccccttagtcctcatgcgtactgagcatcacatgggctgcttgggagaggtggagataagggaggggggctggttcagaacccaggtctccattcagatcctggctggccaacaccctggggcagagtggccacacccctggtgccacagtctcctgtcttggcctccctgtggccaaaatctacccttggccacctcaagcatggtagtgaggagtcagtgagctatagtacagcaggagcacccagggcctggcatgagctcaattctgtatcactgactcaggcctcctaggagccttggagcatttagtcagtcaagtgtcacaaaagaatggaaagtgtcagccctctaggagttgggggtggtctggaaggagaaagctcttccaggcagagtggggcttggctcacacatcattgctggtggttggatgttggccttctcacatggcagtgggcggaatttggactccactccgccactcccttcttttttttttttttttttttttttttttttgagacagagtcttgctctgtcgcccaggctggagtgcagtggtgcaatgtcagctcactgcaacctctgccacctgggttcaagcaattctcctatctcagcttcccgagtagctgggactacaggcacacaccaccacacctggctagtttttatatttttagtagagacagggtttcaccatattggtcaggctggtctcgaactcttgacctcaggtgatccacctgcctcggccttccagagtgctgggattaaaggtgtgagccactgtgcctggccactcccttgagacccagtttccacgtctgtgaaatgggggaatacccacagtgagaattagatgagatagatgcatttgaaaccacaaatcggggtgcccacctgtggtgggtagttaggtagctgttacaaagtgccccagcagagacccccttgactaacttttattcttccatcttttcccacaggtggcagctgccaacaagaagcattagaacaaaccatgctgggttaataaattgcctcattcgtaatcctggtctgggtctcttttttgagtctcttgctctgtcgcccaggctggagtgcagtggcgccatctcagctcactgcaatctccgccttctgggttcaaatgattctcctgcctcagcctcccaaagtgctgggattacaagtgtgagccactgtgcctggtctggtttgggtctcttgattgttcttcaggggcatgaggaagaggcgcttcctcccttcccttgggtgagggggcccagggtgattgggtggctgtttacccggcagccagtcgggccttcccaggtcaaacagttcccatctgggtttggaggaaggacccaggggcccttgtggctcactcccccacatcctgtctttgcaattgtcagaaagtgagaaacgaaaggatggctgtgagctgtgacctcagctgggcctgggctgcagaggtggcttccgctggagtaaagcaagagggcccagggttcatgctcttccctggaaggtagaaaaggacagaccaccagggagcctccaccgcaaactgacctgtgctgcctacacactaactttcctgggcctggggcctgcacaggctgaatggtccttgagccttcactctgcatctgagcggtcttgggcccgctgagtggcagtggcaggaagtcggtggaagcagatccctgtgcagaagttgaattaccagggcggccacacacgggctgcacaacctttgcagtcgtgcacggcaagtgggatgtggcctccgcccatgattgggcacctggtcaggctgggagatccaaatagcacccagtgggcagctgtccgacccctggaggggcaagccaggaaagaaacttagggcccgctgtgaccagatgtccctcccagttgggaagactaaactggtttggccaatatctcccaggattcccctgtccaaattattcctgggatctgacccatttcctggaaaggggcgagcctgggttttgaagttcaaactagagtttaaatcacaactctgcccctaatcccacgtaaccctgtgcaccttatcctctgagccttcgtctcctcgtgtgtaagcctgctaactcctgagagactggacaagatgccgtggagagccttggctctgagtagctctgctgctggacagttcagttggcagtccccaaacgtaaggcgtaagagtttaagaagtatcggccaggcacagtggctcacacctgtaatctcaacactttgggaggccgagacgggctgatcacctgaggttgggagcttgagaacagcctgaccaacatggagaaaccctgtctctaaaaataccaaaattagttgggcatggtggcgcgcacctgtaatcccagctactcaggaggctgaggcagaagaatcgctcgaaccccggaggcggaggttgcagtgggttgagatcgagcaattgcaatccagcctgggcaacagagcgagactccatttcaaaaaaagaatcaataaaaatgttaaaagcaccgttgtttacactcagcaactctgtgaagtaagtgccgaaaagtgctttggaggtaggtaaagtaagccataggctgggtaacttgccagatatcccacagctggagccatcatatgaacccaagcaacccagctgcatcctggacctagccactccaagggctctgtgcctcagaaaagaggcccaaagggttgcactctagctgcaggccagtcactccccattctgggctctagtttcctcttttggccattaatgaaaacatttcccagagctgacatgagaactcaatgccaagcgtccggtttgcacagcagcaggcattgcgcttcccaggtaggaagcaaggtctaggtgtcccgagcaggcctgcaatcccgcagccgcgccgctccagccactggggagcagtagagggcctagaaagaagctcagccaccgaaggctcttgaaggtgaattcctagggcttccaggtctggagccaggcttattcctgggagggggttgtaacggggaattgaagtgcagaggggctagtgaccccagcagaacacctggggtcctggttcccagggctacagaactgtcctagatactgtgccaaatgcactgcagaatattcttgcagtcttatcaagtggggggtttgtacccatgttataggagaaaaaactgagtttcagatgaccagtcagttggcagagctgagttgtaaaagaatcctggactcttgaggcccaggctcttctgcgtggatgggaattgcccttttcccatctcctgggttcacgccattctgcctcagcctccccagcagctgggactacaggcacacgccgccatgcccggctaatttttgtatttttagtagagacggggtttcactgtgttagccaggatggttttgatctcctgaccttctgatccgcccgcctcagcctcccaaagtgttgggattacaggcgtgagccaccgcgcccagctggcaattgcacttttttaaaattctgcactctaggaggcagaggtgggcagatcacttgaggtcaagagtttgagaccttggcctggagtggtggctcacacctgtaatcccaacacttggagaggccgaggcaggtggatcacctgaggtcagaagttcgagaccagcctggccaacatgatggaaccctgtctctactaaaaaatacaaaaattagctggacgtggaggcaggagaatcgcttgaatgcaggaagtggaggtcacagtgagccaagattgcaccattgtactccagtctgggcgacaagagtgaaacaccgtctcaaaaaaaaaaaaaaaaaagagtttgagaccagcctggccaacatggtgaaaccctgtgtctatgaaaaaaaaaattggctgggcatggtggtgcacacctgtaattccagctacttgggaggctgagacaggagaacagcttgaacccaggaggtggaggctgcagtgagccaagattgtgccgccactgcacttcagcctgggcaacagagcaagactccatctcaaaaaacaaaatctgaaatacttcaggcatgcaagtatttagcattcagtattcataatgtaagaaaaacctatgaagcacaacccagtttaagtaacacaggcagggcagggtgcagtgcctataatcccagcacttcgggaggccaagctgggagaatcacttgaggtcaggacttccaggccagcctgggcaacacagtgagaccctgtctttacaaaaaatttaaaaaataggcccagtgcggtggatcatgcctgtaatcccagcactttgggaggccgaggcgagtggatcatcaggtcaggagattgagaccatcctggctaacacggtgaaaccccatctctactaaaaaaatacaaaaaattagccggtcatggtggcatctgcttgtagtcccagctactcaggaggctgaggcaggagaatcacttgaacccgggaggcggaggttgcagtgagccaagatcacaccatcgcactccagcctgggctacacagcgagactctgtctcaaaagaaaaaaaaaattaaaaatagccaggcatggtgtgtgcacctgtaatcccagctacttgggaagctgaggcaagagaatcacttgagcccaggagtttgacgttatgattatgccactggacaccagccttggtgacagagagaggccctatctctaaaaaagaaaaaaaaaaaagtggccagccacggtggctcccgcctgtaatcccagcactttgggaggctgaggtgggtggattacctgaggtcaggagtgtgagaccagcctgcccaacatggtgaaacctggtctctactaaaaatacaaaaatatagccaggcgtggtggtggccgcctgtaatcccagctactgaggaggctgaggcaggagaatcacttgaacctgggaggcagaggttgcagtgagccaagatcacgccactgcacttcagcctgggtgacaaagcgagactccgtctcaaaaaaaaaaaaaaaaaaaaagtaacacaggaaataaaaccaagacaagatgagctctctgtgtctctgtgtgtccctccccagacccaaccctggcgtcccccagaggtaacccctcccaggaactgggcgtttgccactcccctgcacgggtctacacctctgctacaaacgtgtgtccctaagcagcggacgccttttgaaaacaagtcaactgtatcatgctacgatattttttctgatgtttgtgctgtttctgagacggccttatgacaccttcccctattctgtagcattctgttggctcactttgccacagtgtatgcacccattctcccacaaatggacttttcatttgcttctcaatgtttgctaccaaaaatctccctgcaataaatttattttatatatccccttgtatgtgtgtgagggtcccctaactgctcacaaatatctcagcaactccgccctccccactcagacctcatttccctcctaccagacatgctcaaaggaaactgggagcaacacaaagatgactttgaatctctgtccaccacccctagactgtatgacacccgcaagtgacaacctcccctctctggcctcggtttccccctctgtaaaatgggggatggcctaccttgccagtcatggcaggtcaatataaaacaacttctggctgtgcacagtggcacatgcctgtaatcccagcactttgggaagctgaggcaggaggattgcttgaggccaggagttcaagaccagcctgggcaatatagcaagatcccatccctcttaaaaaaaaaaaagaagaaaaatatatgttgttgttgttattattgttattattagagacagagtttcgcttttgtcacccaggctggagtgcaatggtgtgatctcagctcactgcaacctccacctcctgggttcaactgattctcctgcctcagcctcctgagtagctggaataataggcatgtgccacaacatctggctaattttgtatttttagtagagatggggtttcgccatgttggccaggctggtctcaaactcgacctcaggtgattctcctgtctcagcctcccaaagggctgggattacaggcataagccaccatagctggcctgtttttttaaaaaaagaattccagtaaagagctgatcatggttctcactccttgaataccaggaacaccatctcgtatcacataatgagacagggagacattctggtcctcatctcacagatgaaaaatgtcaagcttcgaaggatcaaagtgcccacctagtcacacgggtagtcagccacaggtcagcctgccttatttattcttcatgagtatttatagtgactaacatttactgggcgcctactgtgggccatttctgtgcatgtgacaacccctttaagtccttgtttctaatcccaagaagcaaggaaatggggtcagggaagggacaaggtttgcccaagtccaggcagggggagaggtcaagctcagaaccatcacctgcccatgacacatgcccaggactcaggttccctaggcttccttccaaaggctcagcagtgacgagccagcccttgaaccagcctcttcccccacccaagcagccacctctcaggggaattgtggccaccacaggtgcagggagcagtttctctccactcacagcctgaagcatacccggcaggggctgtccccaggcccaacaagcaaagggcccagtagcgagggccactggagcccatctccggggggctgggcaggaagtagggtggggtttggggtagggatctggtaccctgggactgctgcaactcaaactaaccaacccactgggagaagatgcctgggggtccaggagtcctccaagctctgcctgccaccatcttcctcctcttcctgctgtctgctgtctacctgggtatgtggccaaagggcaggaactggcgggaggtgggggaagctgtggaggctgcagagagggcacaggcagagggaagggggctcagggaaaggggaagaggaggcagaggataggggacccagggaagatgcctatagaaatcgtatctgtgccaagatgggccaaggtggggctggagggagcccagcgaaggagaaggggcgtccacagtctcacacagggaggcaggagcaagagtcacctcccccacctcctgttccccacaggccaaaataaggaactaaagttgctcttgactgagcaccagggctgggggcaggaaggggacttaggggtagcagcattcagcgtctgtcaaggggagaaaaagctttctctgccttaaacctcaggtgcctctctctgttgggagtcccttctcagcactgggggaatgggtgtctcatggactccccctcacctgctcaaggacagctggcaggggctgtggccacgctaacccaggagttcagagaaaaaggttccccacccaaggggacactgggagcaaggattggagttcacgtctgagtcttaagcccgtgacgatgagggtgctcggcccctctccccatctcttcctccttctctcttcctcacctccctcctccacctacctccagaagaggggactggccatgtgggaggcctggctgagagctggggcttcccagaggagcccggattggacactgcagccagcctgagccgcctcgtctcactcagagacacccccagtctccaccccgctctgagccccttcaatcaccagcagcccagcccaaggactgaactcacccctgacccctaggttgacacatacaacttacagagaatgagggccaggcacagggtcacaggccagggcaggccacagactggctcctcagcccaggcagggagaggccagggagccaagagtttgaacccagtgccactcctgactgcctggtgatgctggcaacccgcctgccctcccagagcctcagccatccctcctgtaaaatggggctaaggagagaacctacttctagggttctgtgaatgattacacaagaaaaagcgccaggtgctgggcctggctgaggctggggtgcaaaaatggaccgggaaggctgcgggaggaggggacgcctgcactgcttctggaaggagctgtctggacagcggtcctccagtgcctggaacaaacatccaaaatccagagagttcacagggccagagtacaaagtgcgtatgcgggagggggacaagagatggcgctgcagaggtgagaagggcctcccaggggtcttaccatcccagggagtctcattctcctctcccaggatatcctcacccaccccaaccaggtatgtcctctctccttcccaggggcttcttcactttcccgcatcccccctctccccaggatgtatcagcccctgtcaggggctctctctctccctccccacccaggagagtcctcaccctcttcccaggagtgctggaactgcaggggccagggctggggaaatgtgtcaccatccccagtccctgacccacccaccctgtctctccacaggccctgggtgccaggccctgtggatgcacaaggtcccagcatcattgatggtgagcctgggggaagacgcccacttccaatgcccgcacaatagcagcaacaacgccaacgtcacctggtggcgcgtcctccatggcaactacacgtggccccctgagttcttgggcccgggcgaggaccccaatggtacgctgatcatccagaatgtgaacaagagccatgggggcatatacgtgtgccgggtccaggagggcaacgagtcataccagcagtcctgcggcacctacctccgcgtgcgccgtgagtggcccagccctggcccctactcccactgtcccgctggggacactcggtttatctttgaagtggggatagagccagtaccttcaatgtgggtttcaaaccggcttggacagagggacggacattctcctctgcagagtggggtctctggggggtctggggccttgcaggaggtgggcggggccaggaggctagggagggcaagaggggccagggctctgagccatactacctccttgcagagccgccccccaggcccttcctggacatgggggagggcaccaagaaccgaatcatcacagccgaggggatcatcctcctgttctgcgcggtggtgcctgggacgctgctgctgttcagggtgagccccctcggacctctgagtcagccgggcgagggcctgggccgagggacccccaatacccaggtagccctctagagcctgaggttccccatccaaaacttgggagaatgaaagcacccaccatataggggctgtgggagttaaatgaatgaatataaagaagggacttgaactggcgctgagcccagggggtgtcttcaatttagtttccccttctgggctgtcctcacgtccacctccccccaagaagagtctcattcttctccctaagagtgtcctcactcccctcctgccctcacccaggagtgtggttaccctccaggtgtagccaagaccagggaaggtggggcctggtcctcccagaatctctgatctgtaccagcctctccttaggcactacagaaagtgtgactgttattgttattattcatggagaatagtaagggagtggagactcaagaagacgctagcttgggaggccgaggcaagaggatcacttgaggccacaagtttgagaccagcctgggcaacacagcaagaccctatctctacacacacaaagtcttaaaaaaaaattagccaggcatggtggcacacacctatagtcccagctactcaggaggctgaggtgggaggattgcttgagcccaggagttcaaggctgcagtgaaatatgatgttgccacagcacttcagcctgggcaactgagggagaagaaagagagagagagagaaagagagagagagagagagagagagagagagggcgagagggagggagggaaggaagggaagggaagggaaggaaggaaggaaggaaggaaggaaggaaggaaggaaggaaggagaacactggttgtagactcagagagaactgttacataaccagtatgtggccttggggacatctcttaccctttctggaaaagtacttcctggcatccaggagggtctgaaagatattcacctccccctgctcactgaggcacccaccccacccacccctacagaaacgatggcagaacgagaagctcgggttggatgccggggatgaatatgaagatgaaaacctttatgaagtgagtgaagggtggggatggggtaggggcagttgtgttaggggtgggggtgttccctctgggggtggctgggggcagggaccccaggtgtcagggtgctgatgttcgctgcctcatttccatcccagggcctgaacctggacgactgctccatgtatgaggacatctcccggggcctccagggcacctaccaggatgtgggcagcctcaacataggagatgtccagctggagaagccgtgacacccctactcctgccaggctgcccccgcctgctgtgcacccagctccagtgtctcagctcacttccctgggacattctcctttcagcccttctgggggcttccttagtcatattcccccagtggggggtgggagggtaacctcactcttctccaggccaggcctccttggactcccctgggggtgtcccactcttcttccctctaaactgccccacctcctaacctaatccccccgccccgctgcctttcccaggctcccctcaccccagcgggtaatgagcccttaatcgctgcctctaggggagctgattgtagcagcctcgttagtgtcaccccctcctccctgatctgtcagggccacttagtgataataaattcttcccaactgcagaccttggcaggagtcgtggatcttacggaaaccgcctctcccacatgtccctcagacccaggagtcccagcccaagccactccctgcccactccccacacctgggaccaggtagccagtctgggctgccctcctgggagaacaagatgtctcttgggaaggtccccagaccaactgaaggactggtttggccctctttgcagggcctcaccctagggtcatatccttaagcaagaagggggacaagatcaagatggctgtggctaccaaattacttacactttttttttttttttttttttttgagacagagtctcactctgttgcccaggttggagtgctcactgcaacctctgcctcctgggttcaagcgattctcctgcctcagcctcccaagtagctgggattacaggcgcctgccaccatgcccagctaatttttgtatttttagtagaggcggggtttcaccatgttggccagactggtcttgaacctctgacctcaggtgatccacctaccttggcctcccaaagtgctgggattacaggcgcctgccaccacgcccggccgctttttttttttttttttttttttgaggcagagtctgactctgtcgcccaggctggagtgcagtggcgcaatctcagcccacttcaacctccacctcaagcgattcttgtacctcaggctcccgagtagctgggatgacaggcatgtgctaccacacccagctaatttttgttttagtagagacagggtttcgccatgttggccgggctggtctcgaactcctgacctcaagtgatccaccatgcttcggcctcccaaagtgctgggattacaggcatgagccactttatgcgtatttaagccttggaaacacagggactatcttgtggattggggctagtacagaattcagactgcagccttttcccgatgcgttgacttacagaaggggcattttggagggtctgtggtcctaacctggggatagcagggagatcccggggcaatgacagagaggcacagagacacggatttcctgagaaagggagaggagagaggctgagacccagggatcatgaaggggacgagcaagggaaggaagagatgatgagaccctgggaatccgggagagagacagggacgtggagagaaagggacagagagagagcgagaaggaaaggaagagacagaagggagaaggggcaaccgaaaatgggcacgaagaggcccaggcacagcaacagctggggaaatgacagagactgagacggagatgcagaaagatacagagagagctggagagggtagagaagggctttcggggagaaagtgatggagggacagagaggagaggtggaggccaaggagggaaagaccccagtagagaaagacagagggacagagaaggggatgcagacgcaggcgggagcacacccacagaggcgaaggaagggcgcaagaccatgagaaccacagacgcggaaagccggggaggtcgtggctcggtctagggcgcacggggagcagggcttgccccccagcacctccggggaggtgaccccagccgggagatgcgagtcccgcggagcccgcgcccggcggacggaccgatggacaaagccggggagagctcgggcgcggccggggcgggggccggtgcccgcagggacccgggcgcagcggggaaaggaggggcgggcaagcggcgagaaggggaaggaagcggaggtgccgggcgggcgcggggcgcgggcaggaagcggggaggggcggcggggcgggggcctccggaaaaacgccccgacttcctgccccgccagagccaggaagcgggagccgggacccagggcccgggatcgccgagcccgacctcgggcgccccgccggtcacctccgcgcggacaccaggtactcggtccccggccccgcccggcctcctcccctcggctgttgggggaagtggggaggaggagggaggggctggggcgctgccggcagcggaggggcccccttcggaccccacggaaccagcggcc

SEQ ID NO: 100 - DNA, 35497 bp, Homo sapiens
ggccgctggttccgtggggtccgaagggggcccctccgctgccggcagcgccccagcccctccctcctcctccccacttcccccaacagccgaggggaggaggccgggcggggccggggaccgagtacctggtgtccgcgcggaggtgaccggcggggcgcccgaggtcgggctcggcgatcccgggccctgggtcccggctcccgcttcctggctctggcggggcaggaagtcggggcgtttttccggaggcccccgccccgccgcccctccccgcttcctgcccgcgccccgcgcccgcccggcacctccgcttccttccccttctcgccgcttgcccgcccctcctttccccgctgcgcccgggtccctgcgggcaccggcccccgccccggccgcgcccgagctctccccggctttgtccatcggtccgtccgccgggcgcgggctccgcgggactcgcatctcccggctggggtcacctccccggaggtgctggggggcaagccctgctccccgtgcgccctagaccgagccacgacctccccggctttccgcgtctgtggttctcatggtcttgcgcccttccttcgcctctgtgggtgtgctcccgcctgcgtctgcatccccttctctgtccctctgtctttctctactggggtctttccctccttggcctccacctctcctctctgtccctccatcactttctccccgaaagcccttctctaccctctccagctctctctgtatctttctgcatctccgtctcagtctctgtcatttccccagctgttgctgtgcctgggcctcttcgtgcccattttcggttgccccttctcccttctgtctcttcctttccttctcgctctctctctgtccctttctctccacgtccctgtctctctcccggattcccagggtctcatcatctcttccttcccttgctcgtccccttcatgatccctgggtctcagcctctctcctctccctttctcaggaaatccgtgtctctgtgcctctctgtcattgccccgggatctccctgctatccccaggttaggaccacagaccctccaaaatgccccttctgtaagtcaacgcatcgggaaaaggctgcagtctgaattctgtactagccccaatccacaagatagtccctgtgtttccaaggcttaaatacgcataaagtggctcatgcctgtaatcccagcactttgggaggccgaagcatggtggatcacttgaggtcaggagttcgagaccagcccggccaacatggcgaaaccctgtctctactaaaacaaaaattagctgggtgtggtagcacatgcctgtcatcccagctactcgggagcctgaggtacaagaatcgcttgaggtggaggttgaagtgggctgagattgcgccactgcactccagcctgggcgacagagtcagactctgcctcaaaaaaaaaaaaaaaaaaaaaaagcggccgggcgtggtggcaggcgcctgtaatcccagcactttgggaggccaaggtaggtggatcacctgaggtcagaggttcaagaccagtctggccaacatggtgaaaccccgcctctactaaaaatacaaaaattagctgggcatggtggcaggcgcctgtaatcccagctacttgggaggctgaggcaggagaatcgcttgaacccaggaggcagaggttgcagtgagcactccaacctgggcaacagagtgagactctgtctcaaaaaaaaaaaaaaaaaaaaaaagtgtaagtaatttggtagccacagccatcttgatcttgtcccccttcttgcttaaggatatgaccctagggtgaggccctgcaaagagggccaaaccagtccttcagttggtctggggaccttcccaagagacatcttgttctcccaggagggcagcccagactggctacctggtcccaggtgtggggagtgggcagggagtggcttgggctgggactcctgggtctgagggacatgtgggagaggcggtttccgtaagatccacgactcctgccaaggtctgcagttgggaagaatttattatcactaagtggccctgacagatcagggaggagggggtgacactaacgaggctgctacaatcagctcccctagaggcagcgattaagggctcattacccgctggggtgaggggagcctgggaaaggcagcggggcggggggattaggttaggaggtggggcagtttagagggaagaagagtgggacacccccaggggagtccaaggaggcctggcctggagaagagtgaggttaccctcccaccccccactgggggaatatgactaaggaagcccccagaagggctgaaaggagaatgtcccagggaagtgagctgagacactggagctgggtgcacagcaggcgggggcagcctggcaggagtaggggtgtcacggcttctccagctggacatctcctatgttgaggctgcccacatcctggtaggtgccctggaggccccgggagatgtcctcatacatggagcagtcgtccaggttcaggccctgggatggaaatgaggcagcgaacatcagcaccctgacacctggggtccctgcccccagccacccccagagggaacacccccacccctaacacaactgcccctaccccatccccacccttcactcacttcataaaggttttcatcttcatattcatccccggcatccaacccgagcttctcgttctgccatcgtttctgtaggggtgggtggggtgggtgcctcagtgagcagggggaggtgaatatctttcagaccctcctggatgccaggaagtacttttccagaaagggtaagagatgtccccaaggccacatactggttatgtaacagttctctctgagtctacaaccagtgttctccttccttccttccttccttccttccttccttccttccttccttcccttcccttcccttccttccctccctccctctcgccctctctctctctctctctctctctctctctttctctctctctctctttcttctccctcagttgcccaggctgaagtgctgtggcaacatcatatttcactgcagccttgaactcctgggctcaagcaatcctcccacctcagcctcctgagtagctgggactataggtgtgtgccaccatgcctggctaatttttttttaagactttgtgtgtgtagagatagggtcttgctgtgttgcccaggctggtctcaaacttgtggcctcaagtgatcctcttgcctcggcctcccaagctagcgtcttcttgagtctccactcccttactattctccatgaataataacaataacagtcacactttctgtagtgcctaaggagaggctggtacagatcagagattctgggaggaccaggccccaccttccctggtcttggctacacctggagggtaaccacactcctgggtgagggcaggaggggagtgaggacactcttagggagaagaatgagactcttcttggggggaggtggacgtgaggacagcccagaaggggaaactaaattgaagacaccccctgggctcagcgccagttcaagtcccttctttatattcattcatttaactcccacagcccctatatggtgggtgctttcattctcccaagttttggatggggaacctcaggctctagagggctacctgggtattgggggtccctcggcccaggccctcgcccggctgactcagaggtccgagggggctcaccctgaacagcagcagcgtcccaggcaccaccgcgcagaacaggaggatgatcccctcggctgtgatgattcggttcttggtgccctcccccatgtccaggaagggcctggggggcggctctgcaaggaggtagtatggctcagagccctggcccctcttgccctccctagcctcctggccccgcccacctcctgcaaggccccagaccccccagagaccccactctgcagaggagaatgtccgtccctctgtccaagccggtttgaaacccacattgaaggtactggctctatccccacttcaaagataaaccgagtgtccccagcgggacagtgggagtaggggccagggctgggccactcacggcgcacgcggaggtaggtgccgcaggactgctggtatgactcgttgccctcctggacccggcacacgtatatgcccccatggctcttgttcacattctggatgatcagcgtaccattggggtcctcgcccgggcccaagaactcagggggccacgtgtagttgccatggaggacgcgccaccaggtgacgttggcgttgttgctgctattgtgcgggcattggaagtgggcgtcttcccccaggctcaccatcaatgatgctgggaccttgtgcatccacagggcctggcacccagggcctgtggagagacagggtgggtgggtcagggactggggatggtgacacatttccccagccctggcccctgcagttccagcactcctgggaagagggtgaggactctcctgggtggggagggagagagagagcccctgacaggggctgatacatcctggggagaggggggatgcgggaaagtgaagaagcccctgggaaggagagaggacatacctggttggggtgggtgaggatatcctgggagaggagaatgagactccctgggatggtaagacccctgggaggcccttctcacctctgcagcgccatctcttgtccccctcccgcatacgcactttgtactctggccctgtgaactctctggattttggatgtttgttccaggcactggaggaccgctgtccagacagctccttccagaagcagtgcaggcgtcccctcctcccgcagccttcccggtccatttttgcaccccagcctcagccaggcccagcacctggcgctttttcttgtgtaatcattcacagaaccctagaagtaggttctctccttagccccattttacaggagggatggctgaggctctgggagggcaggcgggttgccagcatcaccaggcagtcaggagtggcactgggttcaaactcttggctccctggcctctccctgcctgggctgaggagccagtctgtggcctgccctggcctgtgaccctgtgcctggccctcattctctgtaagttgtatgtgtcaacctaggggtcaggggtgagttcagtccttgggctgggctgctggtgattgaaggggctcagagcggggtggagactgggggtgtctctgagtgagacgaggcggctcaggctggctgcagtgtccaatccgggctcctctgggaagccccagctctcagccaggcctcccacatggccagtcccctcttctggaggtaggtggaggagggaggtgaggaagagagaaggaggaagagatggggagaggggccgagcaccctcatcgtcacgggcttaagactcagacgtgaactccaatccttgctcccagtgtccccttgggtggggaacctttttctctgaactcctgggttagcgtggccacagcccctgccagctgtccttgagcaggtgagggggagtccatgagacacccattcccccagtgctgagaagggactcccaacagagagaggcacctgaggtttaaggcagagaaagctttttctccccttgacagacgctgaatgctgctacccctaagtccccttcctgcccccagccctggtgctcagtcaagagcaactttagttccttattttggcctgtggggaacaggaggtgggggaggtgactcttgctcctgcctccctgtgtgagactgtggacgccccttctccttcgctgggctccctccagccccaccttggcccatcttggcacagatacgatttctataggcatcttccctgggtcccctatcctctgcctcctcttcccctttccctgagcccccttccctctgcctgtgccctctctgcagcctccacagcttcccccacctcccgccagttcctgccctttggccacatacccaggtagacagcagacagcaggaagaggaggaagatggtggcaggcagagcttggaggactcctggacccccaggcatcttctcccagtgggttggttagtttgagttgcagcagtcccagggtaccagatccctaccccaaaccccaccctacttcctgcccagccccccggagatgggctccagtggccctcgctactgggccctttgcttgttgggcctggggacagcccctgccgggtatgcttcaggctgtgagtggagagaaactgctccctgcacctgtggtggccacaattcccctgagaggtggctgcttgggtgggggaagaggctggttcaagggctggctcgtcactgctgagcctttggaaggaagcctagggaacctgagtcctgggcatgtgtcatgggcaggtgatggttctgagcttgacctctccccctgcctggacttgggcaaaccttgtcccttccctgaccccatttccttgcttcttgggattagaaacaaggacttaaaggggttgtcacatgcacagaaatggcccacagtaggcgcccagtaaatgttagtcactataaatactcatgaagaataaataaggcaggctgacctgtggctgactacccgtgtgactaggtgggcactttgatccttcgaagcttgacatttttcatctgtgagatgaggaccagaatgtctccctgtctcattatgtgatacgagatggtgttcctggtattcaaggagtgagaaccatgatcagctctttactggaattctttttttaaaaaaacaggccagctatggtggcttatgcctgtaatcccagccctttgggaggctgagacaggagaatcacctgaggtcgagtttgagaccagcctggccaacatggcgaaaccccatctctactaaaaatacaaaattagccagatgttgtggcacatgcctattattccagctactcaggaggctgaggcaggagaatcagttgaacccaggaggtggaggttgcagtgagctgagatcacaccattgcactccagcctgggtgacaaaagcgaaactctgtctctaataataacaataataacaacaacaacatatatttttcttcttttttttttttaagagggatgggatcttgctatattgcccaggctggtcttgaactcctggcctcaagcaatcctcctgcctcagcttcccaaagtgctgggattacaggcatgtgccactgtgcacagccagaagttgttttatattgacctgccatgactggcaaggtaggccatcccccattttacagagggggaaaccgaggccagagaggggaggttgtcacttgcgggtgtcatacagtctaggggtggtggacagagattcaaagtcatctttgtgttgctcccagtttcctttgagcatgtctggtaggagggaaatgaggtctgagtggggagggcggagttgctgagatatttgtgagcagttaggggaccctcacacacatacaaggggatatataaaataaatttattgcagggagatttttggtagcaaacattgagaagcaaatgaaaagtccatttgtgggagaatgggtgcatacactgtggcaaagtgagccaacagaatgctacagaataggggaaggtgtcataaggccgtctcagaaacagcacaaacatcagaaaaaatatcgtagcatgatacagttgacttgttttcaaaaggcgtccgctgcttagggacacacgtttgtagcagaggtgtagacccgtgcaggggagtggcaaacgcccagttcctgggaggggttacctctgggggacgccagggttgggtctggggagggacacacagagacacagagagctcatcttgtcttggttttatttcctgtgttactttttttttttttttttttttgagacggagtctcgctttgtcacccaggctgaagtgcagtggcgtgatcttggctcactgcaacctctgcctcccaggttcaagtgattctcctgcctcagcctcctcagtagctgggattacaggcggccaccaccacgcctggctatatttttgtatttttagtagagaccaggtttcaccatgttgggcaggctggtctcacactcctgacctcaggtaatccacccacctcagcctcccaaagtgctgggattacaggcgggagccaccgtggctggccacttttttttttttcttttttagagatagggcctctctctgtcaccaaggctggtgtccagtggcataatcataacgtcaaactcctgggctcaagtgattctcttgcctcagcttcccaagtagctgggattacaggtgcacacaccatgcctggctatttttaattttttttttcttttgagacagagtctcgctgtgtagcccaggctggagtgcgatggtgtgatcttggctcactgcaacctccgcctcccgggttcaagtgattctcctgcctcagcctcctgagtagctgggactacaagcagatgccaccatgaccggctaattttttgtatttttttagtagagatggggtttcaccgtgttagccaggatggtctcaatctcctgacctgatgatccactcgcctcggcctcccaaagtgctgggattacaggcatgatccaccgcactgggcctattttttaaattttttgtaaagacagggtctcactgtgttgcccaggctggcctggaagtcctgacctcaagtgattctcccagcttggcctcccgaagtgctgggattataggcactgcaccctgccctgcctgtgttacttaaactgggttgtgcttcataggtttttcttacattatgaatactgaatgctaaatacttgcatgcctgaagtatttcagattttgttttttgagatggagtcttgctctgttgcccaggctgaagtgcagtggcggcacaatcttggctcactgcagcctccacctcctgggttcaagctgttctcctgtctcagcctcccaagtagctggaattacaggtgtgcaccaccatgcccagccaattttttttttcatagacacagggtttcaccatgttggccaggctggtctcaaactcttttttttttttttttttgagacggtgtttcactcttgtcgcccagactggagtacaatggtgcaatcttggctcactgtgacctccacttcctgcattcaagcgattctcctgcctccacgtccagctaatttttgtattttttagtagagacagggttccatcatgttggccaggctggtctcgaacttctgacctcaggtgatccacctgcctcggcctctccaagtgttgggattacaggtgtgagccaccactccaggccaaggtctcaaactcttgacctcaagtgatctgcccacctctgcctcctagagtgcagaattttaaaaaagtgcaattgccagctgggcgcggtggctcacgcctgtaatcccaacactttgggaggctgaggcgggcggatcagaaggtcaggagatcaaaaccatcctggctaacacagtgaaaccccgtctctactaaaaatacaaaaattagccgggcatggcggcgtgtgcctgtagtcccagctgctggggaggctgaggcagaatggcgtgaacccaggagatgggaaaagggcaattcccatccacgcagaagagcctgggcctcaagagtccaggattcttttacaactcagctctgccaactgactggtcatctgaaactcagttttttctcctataacatgggtacaaaccccccacttgataagactgcaagaatattctgcagtgcatttggcacagtatctaggacagttctgtagccctgggaaccaggaccccaggtgttctgctggggtcactagcccctctgcacttcaattccccgttacaaccccctcccaggaataagcctggctccagacctggaagccctaggaattcaccttcaagagccttcggtggctgagcttctttctaggccctctactgctccccagtggctggagcggcgcggctgcgggattgcaggcctgctcgggacacctagaccttgcttcctacctgggaagcgcaatgcctgctgctgtgcaaaccggacgcttggcattgagttctcatgtcagctctgggaaatgttttcattaatggccaaaagaggaaactagagcccagaatggggagtgactggcctgcagctagagtgcaaccctttgggcctcttttctgaggcacagagcccttggagtggctaggtccaggatgcagctgggttgcttgggttcatatgatggctccagctgtgggatatctggcaagttacccagcctatggcttactttacctacctccaaagcacttttcggcacttacttcacagagttgctgagtgtaaacaacggtgcttttaacatttttattgattctttttttgaaatggagtctcgctctgttgcccaggctggattgcaattgctcgatctcaacccactgcaacctccgcctccggggttcgagcgattcttctgcctcagcctcctgagtagctgggattacaggtgcgcgccaccatgcccaactaattttggtatttttagagacagggtttctccatgttggtcaggctgttctcaagctcccaacctcaggtgatcagcccgtctcggcctcccaaagtgttgagattacaggtgtgagccactgtgcctggccgatacttcttaaactcttacgccttacgtttggggactgccaactgaactgtccagcagcagagctactcagagccaaggctctccacggcatcttgtccagtctctcaggagttagcaggcttacacacgaggagacgaaggctcagaggataaggtgcacagggttacgtgggattaggggcagagttgtgatttaaactctagtttgaacttcaaaacccaggctcgcccctttccaggaaatgggtcagatcccaggaataatttggacaggggaatcctgggagatattggccaaaccagtttagtcttcccaactgggagggacatctggtcacagcgggccctaagtttctttcctggcttgcccctccaggggtcggacagctgcccactgggtgctatttggatctcccagcctgaccaggtgcccaatcatgggcggaggccacatcccacttgccgtgcacgactgcaaaggttgtgcagcccgtgtgtggccgccctggtaattcaacttctgcacagggatctgcttccaccgacttcctgccactgccactcagcgggcccaagaccgctcagatgcagagtgaaggctcaaggaccattcagcctgtgcaggccccaggcccaggaaagttagtgtgtaggcagcacaggtcagtttgcggtggaggctccctggtggtctgtccttttctaccttccagggaagagcatgaaccctgggccctcttgctttactccagcggaagccacctctgcagcccaggcccagctgaggtcacagctcacagccatcctttcgtttctcactttctgacaattgcaaagacaggatgtgggggagtgagccacaagggcccctgggtccttcctccaaacccagatgggaactgtttgacctgggaaggcccgactggctgccgggtaaacagccacccaatcaccctgggccccctcacccaagggaagggaggaagcgcctcttcctcatgcccctgaagaacaatcaagagacccaaaccagaccaggcacagtggctcacacttgtaatcccagcactttgggaggctgaggcaggagaatcatttgaacccagaaggcggagattgcagtgagctgagatggcgccactgcactccagcctgggcgacagagcaagagactcaaaaaagagacccagaccaggattacgaatgaggcaatttattaacccagcatggtttgttctaatgcttcttgttggcagctgccacctgtgggaaaagatggaagaataaaagttagtcaagggggtctctgctggggcactttgtaacagctacctaactacccaccacaggtgggcaccccgatttgtggtttcaaatgcatctatctcatctaattctcactgtgggtattcccccatttcacagacgtggaaactgggtctcaagggagtggccaggcacagtggctcacacctttaatcccagcactctggaaggccgaggcaggtggatcacctgaggtcaagagttcgagaccagcctgaccaatatggtgaaaccctgtctctactaaaaatataaaaactagccaggtgtggtggtgtgtgcctgtagtcccagctactcgggaagctgagataggagaattgcttgaacccaggtggcagaggttgcagtgagctgacattgcaccactgcactccagcctgggcgacagagcaagactctgtctcaaaaaaaaaaaaaaaaaaaaaaaaaaaaaagaagggagtggcggagtggagtccaaattccgcccactgccatgtgagaaggccaacatccaaccaccagcaatgatgtgtgagccaagccccactctgcctggaagagctttctccttccagaccacccccaactcctagagggctgacactttccattcttttgtgacacttgactgactaaatgctccaaggctcctaggaggcctgagtcagtgatacagaattgagctcatgccaggccctgggtgctcctgctgtactatagctcactgactcctcactaccatgcttgaggtggccaagggtagattttggccacagggaggccaagacaggagactgtggcaccaggggtgtggccactctgccccagggtgttggccagccaggatctgaatggagacctgggttctgaaccagcccccctcccttatctccacctctcccaagcagcccatgtgatgctcagtacgcatgaggactaaggggaaacatcgcaggctgacctggggagggggagtcatctacgggtacagctatgtgctctgtggatagatgcccagtggcacctgggctggagttccctccaatttttttttttttgagatggagtttcactcttgttgcccaggctggggtgcaatggcatgatcttggctcaccgcagcctccacctcccgggttcaagtgatttttgtgcctcagcctccccagtagctgagattacaggaatgtgccaccacacccggctaattttgtatttttagtagagacagggtttctccatgttggtcagaatggtcttgaactcctgacctcagataattcgcctgcctcggcatcccaaagtgctgggattacaggggtgagacaccacagccagcctgcctccaaatttctaagcagcaccaacaggaaaagtcagacaggactgtcctttctcctgtctctgggcagccctcctctgaccccaccagcaccctgggctgtgccctccagagaaggaaataagtctacctgacgaagtatgggctttggaaatgcttgggcagcgactaagggacccagccccaccccaaacgcaggccttacctgtccggcgattctgtccagatctctttgtccctgaggtgtcagtttgcggccgctgtggggagggaagggtcatgcaggccccagtgagcacaggtcctgttctcagccccttccctcctggctgtgagccaggcttctcaagaagccacctgccgccagccaagtcccactgagggccctagtcaggtgcattctaacgagctgggggcagtagtgggagcccccctgggagctgacggggtgttgtttgtgcaagcatttagatcaaaagccccgaaaaatcaattgggaaaagttaacgagcaggctaatgaaagcagatagtcgctaaattaccctcctggagcctgggctagtcagccagagaggtcggggtgaggccccgtgctgtttgcttttctgcagaatcccctcctgcctgcctctgataggaggggcctgaggggctgggcagactatgcaggaccattcgttggggaattgatgaccgggcctcaaggctactccatcaatgcagccccccctaccctgcttacccatcttggtccttttccaccattttcagcccctccagggcttggaggacccggcgggccacactcttggagcctcggctgaagtggctgggcatgacgccgtttctctgacgtcccccatagatcttggtcatggagccaaccccagcgccaccccggaggtacaggtgccgcgctgtggaagctgggggtagtgtgagagggagatttaagggtcttgatcaaggtctcaggtaaacaattccttgtgtgtaaacagctaattctcactgttttataagaagggaaactgaaaacacacactaacacccagaaactgacagccccctctcctcacccacccccccggctagctcttccttgacaaacagccctgcaccctgggtgggcactcccaccatctccagggccaacttctttagtggttactatcccagcagcactgctgttgaattgaacctgaggttatgtaggggtggagcctagctgtgaccatctccatgggccccagagaagcaggagtgaagggacctattgccactctccgggccacctcagtctggagagctcaggataacaagggcagggcagacactctgtgcagtgggtgccccctgcttggaatgtgtaccagcccctctgcagacacagggaaggctggcttgggcaagtccctggtccaccccagccagcctccttgcctgcaaaaaaagctccgtaaaatccagtcgacacaccagcctccccagaaacgcttgcacgcttctattaactggagcacacatctgccaggccctgtgccaaatgcttttcgatctctccaccctgcttcacctgagggccgggttactctgaggactcaacaggtgtgtcaagtgctactctcctttaaagagtgaaactgaggtgccagagggtactcactggctccgtgtcacacagctctggaggaactgccctgtcctgccactgtgatggcaccggggcccacatgcaggaagcacccagatttcagccatcacatggtcctgcctagctctggagctcagagcagagtctggtttgttcctgggacccagagatcagcaagttggtctgagtctgctctagtgatttctttcctctagttctaaagatcaagtgggggaattgggggttcttccataactgccaagtgccaggcagtagtctgtgtggggtgggctgcttctgcccagaaacagttcttacacaccgcttgttcccagcccactcctgccctgagatcaggtccagatacagccagcccttcatatccacagactcaaccaagggtggatcaaaaatatttaggggaaaaaaactacaattcaaaacagtgtaacaattatttacaccgtattagtgctttttcttttttcttaaaacacaaaaaaagggcctcattctgtcacccaggctggagtgctgtggtgtgatcatagctcactgcagcctcgaactcctgggcttaagcaatcctcttgcctcagcctcctaagtagctgggactataagtatgtgccatgtctggcctgtattaatctataagtaatctacagatgatttaaaatatatgggatcaggccgggcgcagtggctcacgcctgtaatcccaccactttgggaggctgaggcgggagaatcacctgaggtcaggagtttgagaccagcctggccaacatggtgaaaccccatctctactgaaattacaagaaaattagccaggtgtggtggcacaccccctgtaaccccagctacctgggaggctgaggcagggcaggagaatcacttgaacctgggaggcagaggttgcagttagccaagatcatgccactgcactccagactgggtgacagagtgagactctgtctcaaaagtaaaacatctacataggatatatgcaaatattatacttttttttttttttggagacagggcatcattctgtcacccaggctggagtgcagtggtaacagctcactgcagctttgacctcctgaatagttgggactacaggtgcaagccaccacgcccagataatttctgaagagacccggttttgccatgttgctctggctgaactcctggagtgaagtgaaccacccatcttggcctcccaaagtgctgggattacaggtgtgtgccactgtgctggccccgatattttttttttctgagatggagtctctcgctctgtcgcccaggctggagtgcagtggcgcaatctcggttcactgcaagctctgccttccgggttcactccattctcctgcctcagcctccagagtagctgggactacaggggcccgccaccacgcctggctaatttttttgtatttttagtagagacggggtttcaccgtgttagcgaggatggtctcaatctcctgacctcgtaatccacctgccttggcctcccaaagtgctgggattacagggttgagccaccgcacccggcccctggccccgatattacaccattttatagtaagggtgagcatctgtggacttgggtattggggttcatcctggaaccaatcctcagctgatactatacaaccatgctctgctgggggccaagagcacagccctgctgttggctcactacctctggcatctgctcactttaaaatccccacctcactccaggccctaccccctacgccactgcctggtaataagtgcccataaccaggaccaatagacagactcacctggcgtaagccaccccccacaatcctgccagagagtgacatcactggaaacctccaccctttcagaccagctcaaatacccagcagctgctgccatccctctgggccctgtagctggttgtgccctggggctctgggtggagacctgctctcccatttgaactacagtacccaggactggggaacgcagaatagcttttcctgttatcctgctttattttttttttgagacggagtctttctctgttgcctaggttggagtgcagtggtgccatctgggctcactgctagctccgcctcccaggttcaagcaattctcctgtctcagcctcccgagtagctgggactacaggcacacgccaccacacctggctaatgttttgtatttttagtagagatggggtttcaccatgctggccaggctggtctcaaactcctgacctcctgatccgcccgcctcggcctcccaaagtgctgggattacaggcatgagccaccgcgcccggcctttttttttttttttttttttttaaagacggagtctcactctgtcgcccaggctggagtgcagtggcgtgatctcagctcactgcaagctccgcctcccgggttcatgctattctcctgcctcagcctctacagtaactgggactacaggcgcccgccaccacgcccggctaattttttcgtatttttagtagacatggggtttcaccatgttagccaggatggtctcgatctcttgacctcatgatccgcccgcctcggcctccgaaagtgctgggattacaggtgtgagccaccgcaccgggcctctgttatcttgctttttaagaataaggcacacactcctaagcgcagagatgcccaaagcggctgtacaccagaaatgggacactcaacctcagtcttgttgggttgggactagcgcccagagcagtcagacaggagcttgaatcctgacaccgttcctcctcaggagggacacaggacccacctatcctccaggtggtttgtgctgcggtactaaaggagacactttacttaaaccttgagcacagtgactggtagagaacaagctcccataaggcctattaggtgcttttttttttttttgagacagtctcactctgttgcccaggctggagtgcagtggtgtgatctcagactcactgcaacctctgcctccggggttcaagcaattcttctgtctcagcctccccagtagctgggactacaggcgcctgctaccacgcctggctaatttttatttttagtagagacggggtttcaccacattggtcaggatggtctcaaactcttgacctcaggtgatccgcctgccttggcctcccaaaggcctattaggttcttcaatggaggcttaaatttttcttaaggctgtataaaaaccttttggcatggagaaccttggtcagatattacaagctcctcccttgctatcccagttcatgctaattatttttttctgacccactagaagggagaggaagggttattaacttcacaaattggaaaatgctaagagttgaaataccgcgttctattaaaacactgacctttttcctcaccccctggagaccaaggttccagccccagcttttgatgtggagctgcacaaatgcagaccgccgtagctggtactcatgagggccaattgcgagcaagttgctgtcacaaatgggttctcctccagttcctccatgctagaggccttctgctcctctgctgtgtgcattcttgggatggcaacccactcctctcaggaacccctgtccaggaatcaccccttacctggaactgtaaaggaggccacccctctccactctactgtgagttcatggtcaagggagggcagctgtgttcctgctagaccgagagggagggtccctctggatccgagcacggggcagaccaaccaagcacggctccttaggagtcatcacagctcagcaaagtccagaccggtggtcccatcctgacctactgagtcaaaggcagggaagaacttccccagcacactctagctgacccttctctgccgaacttgtaagaaaccactctcctgaccttgattcatcccttaactcacttctgtgatgcctcccagatctcattctttctactatcatagcacaagtgggtgcccagccccatgcaggagccagagatggagcagcctccaacctacaagaagtgtttccagacatcccaattcagcagctgctctcagacgcacaccaggacaccaaactggactcccacatctccatcttcagcaggtcctttaaagaattaagacagcaagaggcttgtccagctgggtgcgggagctcatgcctgtaatcccagcactttgggaggccgaggcgggcggatcacgaggtcaagagatcgagagcatcccagccaacatggtgaaaacccgtctctactaaaaatagaaaaattagctgggcgtggtggcgggcacctgtagtcccaggtacttgggaggctgaggtaggagaatcgcttgaacccggcaggcagaggttgcagttagccgagacggcaccagtgtactccagcctggtgacagtgcaactctgtttaaaaaaaaaaaaaaaaaaaagcctgtccagggctacactgcaccacccccttcataaagacccatggcggccatcccttgaacgtccagtgagagcaagtctttgcgggttcttcctctaccttgccctgcctcctacaccactgccttgggactgcttactcctacagctctgctccatttccagaccaccctcaagagggccccatcttctaccatgggcctctttacccccaaaccccaggattaagacctgtctacctcacactcattcctataggtctccacaatttggccctgctcagcaagggcgcagctttagcacactttagcctcaaatctgaggaggcaaaataggccagactcttatgagtagaaaaaagggaatatagcagggaacctagttttggacagagccaccctgccaagccctcccagggtaacttgcagcaagtcccttcgcccgtctgcaccacagcttcctctttggtaaaacaagatcactcccatgatcagtataagctgactgccaaactgggtggaacatgttaaactctagaatagaggctggtcaactttgcctgtaatcccagtgctttggaaggctgaggcgggaggaccgcttgagcttgggagttcaacatagtgagactccatctctacaaataaaaaaaattagctaggcatggtgactgataggcacctgtagtcccagctacttaggagggtggggcaggaggatcacttgagcccaagaagctgcagtgagctataattgtgccactgcactccaacctgggtgacaggcctagaccctgtccctgaaaataaataataaagggtcaggtaggaaatatttcaggctttgtaggctacagcttctgccacaactacaactctgcccttgtgcatgtagatacacaggggtggctataacccaacaaaaatatacacaacaggcctctggtctaccacacaaccatcctatgccgctaggacagctgggcaagtgaggtgaaaaagaggcctttggggtactccaagtgatggagatcagtaggcaggcagaagatgcacatcctgcttgaggtttccaggcagggccactgtgggctgcaagggaccacagcagctctaccatgaccagcagatgcaactaggtttattatccaaggtcttaatgccatctcttgttaatccctccccatgttaaaaaaaaaaaaaaaatgtacaagacacatacagtcctactttggaggtatttggtatgtgcagaacgtgtcttcaccccagcaaatgagaaaggctaatcccagatccaaagctgctctgaccaactgacccttgaggcactgccaaagcaagatggggggacaggtggaggagatatgtaacttccagggcttgtcactgctgtgcgcccagggaagtcagcttctcttcatccgccccattttctgtctaaaacaaacggtgggtaggtggtatgccagcaacccgacccacctcagcaagttcatctttcagtcctcagaggccgcggctgagttatgctggtcctctgtgctcactccatggcctgaaagagtgggccccaatagacatttgaggcacaagtgtaccacaaatctacaaaatgcttcatattctgaagggccaagcaacctgtaccaaggccaactcttttcagggtcatggaggagctttgccgatttccaaaccctgcttcccacctacttcttatctggagacaagttgtggtcaggatggagtccccacttcacagagagagaaggtttaagattggagaggccgaggccccttagttagtgaaggtcggtgctaaggctgtcaccttgacataacacggcactgccaccgcccaccctgttacatcttcctgaaagtgaagatttagtgagtactgaaatattaagacacgtgagaactaacactagtcagggactgtacgtaaattattattggaagatcgaaaagagacggggctggcacgaggttgcagggtgtccataagatcagaagtcaagatttaaagcagggactgacctggccagatctccaaccatttagttagaaacagcctgttagagatatggagaaggctaacttgatgatctgagcaatagtaaagacaactggctttttcctgaataactactgtgcaacagacacgttctaaacactctgctttaaattcattcaatccttgcaatactctagtactggtacaataattagtcccattttggggatgagagagtgcacaggcaggttaaccaacttgccagaggacacacagccagatgtaaaagatggatccaaacccagggagtctgcctccgtgtatatagaaaggattaaaccacctgtaagcaaaatatgaacattcatctgtctctggtttcccctgaggctcaaagccacaggtcctcctctcacaaagctcttagaatgtcataaaaacttggagtaccaagttatcgaatgtcacatcacacaaagcaagtggtgacacaaccaagggtttctctccctcttggggcgggaaagagctcagaggagacagggaagtatggtttgtgccaggggtcacccagctccccactctccagccaaagacctaagttcctcaccagctcgcgtgtagaaccagttctcatcgtagggagcaagctctttgtgcttggccagcttgacggtatccacccattcggggactttcagcttcccggacctaagaccaaaacagtgggaaaagcacgattcagtcatctccacaaactaccccatatcccaaatgccctcccctcaacacaactatgctgtgcccagagtacaaagagaggctggaaccggaacacaagccaggcctcacgctgaaaggagccacggaggccccaaacaagcctcccctgccaggaccggcaaacactggggctcagatgggcaggccaaggcgacagcctccacccgttttgaacctcagtccccaaactcactttttgaggaaggctgccagagctctgacgaactcctgctggttcacgtcttttacagtaactccaggcatctgagggagaaagtcaagcatgtgaacacaggcctggcagagacgactgccaagagcacggaccccaccccaatcctttcgctccagcgcatcctaaaccgtggtaccccccgttacttcccacggccccttcaacgccgggctccggctcctgcgggtctgaaggagctcaccgacgcccacggcctctctggatcgcactaacagagcccggcccctgcgtgtgaggatcctgcgcgaccccactccccagccccgggactccggacgccccacgcaccccgccgctgccccccggggcccacgctcggttcccggacggcgctgaccgggcatgtccgggcctgccgctcgcacgtggccgcggctctagggggcgggacgggcccgcgccgggcgcctcggggccctcaggcacgcgctctgaggcttcggcgtccggccctgccacctcgcgcccggtccagctcggagcccccgcttaccgtgcggcctccgcgctgccagccaggggaaagggaacgacggggtttcccgggcgcacaagtcgggcgtagggtctcgcgagagttccgaaagctcgcgagagcgagggtagacgctgaggctccgcctctctcagggcgaaagttcgtccccgcctagaggggagggtgtctagtgaggggtggagaggtaaaggggagggccaaggggtcgcgcgtggaggcctgggtttcctcccgcgtttccttctcccggagtgtaatagagagaggatagagagctcctgttcggagctgggggaacttggcttcgtttgcgtcgttcgtggctggaaggaacagtggtggagaatactatgatggcgaaagtacggggcaggatgggtgggccacagctggcgccccacggcggaacaaccccttttccgggtggaagtggctgttccctggccggaagtgggagtagtaagggcggaactgtgacagggaacctaggggaagggcgaggaagaaatgtggctatcatcttccgtccttcaccgccaggagtcgcgagagcgggagacggaagccccacccttctcagggcggaagttgcttcagcacggccggggcgagcgaaaagggaatgaggcgctggaggaggggagaagataagggcgggacaaagcggcagaggcgggaccttagcagaagttagttcagctctgccttctagtgtcggagtctgttcgctcagcccttactttgccaatttagatttacctgccccgctgacctgtgtagctttaggcagtccatttgccttctcagggcttgtctcaccattaaaaaaaaaaaaaaaaatgagatccccgtttgtccatttaaagtggctcctctggttcatggcgcgtcacatgctctaaaaaatattttttgagtgcctgctctgtgccaggcacaggtaaatattatttggacatttatcatgtggctgttactgtagtgttacatgcatgatctcatttaatccttacaaggcccaacaactaaataacgtggtccaataaaattatgttaacttgttgcaaaaaggaaacactgaaatgtgtgtagctattttcttatgttggaaagactgagaatttaaaacataagagcaaatattagaattttaccccacactgatactgtggctgcaaaatgtgttaattattaataagccaagactcgtatctgttagaaaaattaaaaccaaccatgcttctagcataagatcatatatttaaatcaaggttttacattcatgtagaatgttgttgaaacctatctcatactgtttctaaaacttgagaaaatattttcattatctcaattgtttttccagaaccaacacatacatatttccatatgtattcaaagtgggtaatatatgcatgtctaactggaaatctccaggtacttgggtaatttatattcactttttataatttaagtaattattatttaattttttttgagttggagtctcgctttgtcgcccaggcgggagtgcaatgatgtgatcttggttcactgcaacctccacctcccgggttcaagcgattctccggcctcaggctcccaggtagctgggattacaggtgcctgccaccacacctggctaatttttgtatttttatagagacgggttttcaccacgttggccaggctggtctcgaactcctgacctcaggtgatccacctgcgttggcctcccaaaatgctgggattacaggtgtgagccaccgtgcctggcccccacttttaataatttctaataccagttctgaatcatttacacttaattcatttaagtcatttcattgaatttaatttttttttttaaagctctccagaggaactctggagtgcctgaccaaaggaagagacagggtgaatataggattttgggaagagtgaagcttaggtaaaatttatataaagcagagttttgatggacataaggcaaagcaggcatgtatttatgcaacggagctaacatcatgcctgggcgaggagcagacccaggattctgcttccttggacattagaaagtttagataaatgtacaatgttgtctctaaaaaccgcttctctgagatcatgactgcttctctgtgtcaaagtgacttagactttccaggtaagaatgagatgtcccattttcactattgttatgattttaaagatttttaaaaattctggcagtctgtgattttagagaacacagtttctcagcactgtgtccctggtgttaatttttgtacatgttagtttttacaggttcataattgacaactctgtgaggtggttatagaccagtcaactgagccttagagtcaagtcatttgtccagggtcacataaggttaaagcctgagcccggatttgaagccacaactgaagatactcaagcttttgcaataaactttttttttttttgagacggagtctcgctctgtcgcccaggctggagtgcagtggtgtgatctctgctcatgcaagctccacctcccgggttcacaccattctcctacctcagcctgtcgagtagctggtactacagtttcccgccaccacgcctgggtaattttttgtatttttagtagagacggggtttcatcgtgttagccaggatggtcttgatctcctgaccttgtgatccacccgccttggtctcccagagtgctgggattacaggctcatgcctgtaaatttagtgtataagtacagaattcccatagtccccatgctgacacacagggatggcctccctttctatcaacattccacaccagagtggtacctttgctacaatcaaggaacacaatattatcacccaaagtccgcagtttacatcagtgttcactcttgttgtatgttctgcaagttttggcaaatgtgtaatgacacgtatccaccattacagtttcatagagaatagcttcattgccctaaacaacacccatttatccctccatccctccaagccgacaaccaattatcattttatcattttattgtcatcacaattttgcctttttccagaatgtcacatagttggaatcatacatttggattggcttctttcagttagtaaggcatttaaggttcccccgtatctttcttttggcggggtggaggggagggggaggcagacagggtcctgctctggagtgcagtggcactggagtgctgggattacaggcgtgagccaccgcacccggcctcaataaactctttaaacacagttttaaaaatgggttgaggctgtagtacctaaaaacagtgggatattattcagccctaaaaagaaatgagctggccgggagcggtggctcatgcctgtaatcccagcactttgggaggctgagatgggcagattgcctgagtttagaagttcttgaccagcctgggcaacacggtgaaaccccctctctactaaaatacaaaaaattaggccgggcgcggtggctcacgcctgtaatcccagcactttgggaggccgaggcgggcggatcacgaggtcaggagatggagaccatcctggctaacatggtgaaaccccgtctctactaaaaatacaaaacattagctggggcaggtggtgggcgcctgtagtcccagctactcgggaggctgaggcaggagaatggcctgaacccgggaggcggagtttgcagtgagccgagattgcgccactgcactctagcctgggagacagagcgagactccgtctcaaaacaaaaacaaaacaaaaaaacgaaatcccgtctctactaaaaaaatacaaaaattagctaggtgtggtggtgcacgcctgtaatcccagctactcaggaagatgaggcatgagaatcgcttgaacctgggaggcggaggttgcagtgagccaagtgcactgcgttccagcaccactgcactccgcagcaggaccctgtctgcctccccctcccctccaccccgccaaaagaaagatacggtggaaccttaaatgccttactaactgaaagaagccaatccaaatgtatgattccaactatatgacattctggaaaaaggcaaaattgtgatgacaataaaatgataaaatgataattggttgtcggcttggagggatggagggatgaatgggtgttgtttagggcaatgaaactattctctatgaaactgtaatggtggatacgtgtcattacacatttgccaaaacttgcagaacatacaacaagagtgaacactgatgtaaactgcagactttgggtgataatacggtgttccttgattgtagcaaaggtaccactctggtgtggaatgttgatacaaaagggaggccatccctgtgtgttggcaaggggactatgggaattctgtactttccactaaattttgctatgaacatatataatatatatatatatatacacatatgtatatgtatatgtgtgtatatatgtgtgttgcatgtatatacacacacacatatatatgagacagtcttgctctgtcacccaggctggagtgcagtggtgtaatcatggctcactgcagccttgacctcctgggctcaagctattctcccacctcagcctcctgagtagctgggactacaggtgcacgccaccatgcctggctaaattttgtattttttgcagaaagggggttttgccatgttgcccaggctggtcccgaactcctgagctcaagcaatcctcccaccttggcctcccaaagttccgagatcagaggtgtgagccactgtatctggcccctgaaggtttttttgctgggtacggtggctcacaactctaatcccaaaataataagaagaaacaaaaatacacacatacaaacaaaacaactctaatcccagcactttgggaggctgagacaggaggatcggttgagctcagacattcaagaccagcctgggcaacatagtgagacactgtctctacaaaaaataaaaattagtctcacatggaggtgtatgcctgtagtcccagctactcaggaggctgaggctggagggtcacttgagcctgggaggttgaggctgccgtgagccatgactgtgccactgtactccagcttgggtgacagaggctgtcttagaaaaaatggtttgaggtcagaaagttcacattttgatgaggagaggggcagcattggagtgtgttaactcagtaggaaaaaacaattcctaaggaatcagacagaacgtattttactcagtcatttattctgagctcccaaggaggagctgcaggcaagtcctgtgctctgagagtgcttattctctgagggggagacatagatggacatagataggcacagctcagggtgatcaggactatgaagtagagaccagtggccccttgggaacatagggaactctgcctgagaggcttaacatattattttgagttggatgaaaaggatgaactttggttttgtgaagagttcaggatcttgtgaaggcccatgcagggtaggggttataggactgtatttatgcaaacgtgtcagggctgcaaagccagctacacaatggaacaggggtgcagaatgaggcctatgtggacgaagcaatgagggtctgcgtataggctggatgggataagtgtatgatgtcagttctacgttggacgagaattgaggtcaggagtggagcaagttaatgtagggctgaagcgaaaggagcatggattcccaaagggcagaatgtgaaataagctcctgaaataaaacctgggtgactgtggggaggagtcttgtgaggagagagaggaacagggacggtgcttcatagttgggacctcattggttaagtctgcagagtgccaagagggtacacaaagaaggtttagaagggagatgatttactcagtactttattggaccatggcaatacctttccctacctggcactgggaagtgggaaagggggcagtataggaaacagtgctcacagtctattatctgtaatctctcagagccaagaagaggccaggagcctactggctccctacaaccacaggtgaagagtgctgcacctgaacaggcaacaacttaggagcatgagcaactcttaaatctgctcttttccctaagactgacatctgcagaagctctggccctttccctcaggcactaatggggggccctaacgatttgaaagacaaagttggcctggccaactggtgtgaaaagccttgcccaggctgggtactgaaggccgggtactggaggagaggtgaaggagaggtgacctctagtctactccttcccccaatctccatcacttcctcttttcctccccttttcatgccatcctttaaccccaaattatactttctcttttacccttctcagctctgtgaccttggtgtacagaggacccttggtcagtgctgagtagcagaatctcagccatgttgcatgttgcagtgcttcctttctctgtgactttgtggccctggtcatctgtcactaggaaagcatggcacaccaagtcttaggcaggtctattaaggagcaatcatatatctaagttatagctaaggggagggaagaagggtgtgaagccgactttggtctcctgatatctcagtatctcctgagaagtgctgcaggtttgttactctgtactctgctagggaggagaagaaacccaccctctcaaaatcccaaataagaaataacaagttgtaattggatgtcatcaccatcaatcatcttgagtaaaacaaggggtgtaggtaacatcaggaaaaagaatcagtgatcaagcacatcccttgagccccttctaagggtgggaatgggaagggggtctccaggcttcatgtctttggaatagctcaacaggttttcctatgtactgaatggttcaaggagaaggacttgacaccagaggactgagaaacaaatgcaggtaagatcttattcttaatgatatcttgaggagaaaaataaaagacttttttgaaaaactcttgacttgtatgtatcttctggagtcctgattggggaaaggagtggtgcatctttcattctatgcttttatttatttgtttttatagagacagggtctccccgtgttactcaggctggtctcaaactcctgggctcaagcgatcctcctgccttggcctcccaaagtgctgggattacaggtgtgagctatcacacccggcccaatgctttataaacattattaactaatttggagcctggcaaagagaaggaaccctcctctgatctctgcctagaaatttcccctaaaacacttgggcaagttactttacctctttaagcttgtttcttcacttgtaaaatgggaaccatcctgcataacttccagggttgctgtgaagatatgtgaatcaaatggagtgggcactcaataaatggtaataaatgtttcttaaccttttatggatccttcgaaactcagacacgtgaacctccctagttgaggaaaaacttgtgataaagactaactcgattctttctattctggttagcctcaatttccccatctggaaaatgtatcaaattggtattccactggccaaagctagcctgaaaatatgttttatttggcacgtatagaatttaaagaagaaaactgagccaacatttgaaaattaagatgttttacatggaaatctagttttccagtttctcttaaaaaatcagaagatggagcaacactgagtccacattcccgcctggcagtaatctgctagggccaaaaggaggctgctccttaggcaaggcatccattctcagtttgccagggtccatctggccttctttactcatttatttgatctgctcagccctgtaggcatttcgatttgtagcccctctagacagctggaaactgtctatgcctggcacagagcgggcaattaatcagtgaatcccccattatttctttacatcatttttttttatttggacaaagaaaaaaatccaagtttgttttcatctatggtagctattggataacagatttttcactttgagaagcgaaatgaacaagtcctttctgtcagtcaggatagactaggttaggctgtggtaacactctccaaatctcagtggcttacaacaacaaaggtttatttcttgcttactcacacaaacctagacacaaaatgaaaacactctcctgttttcacatgcatggagacagacatgaatgcataggcatttacagaatcatggaatcctgggatgtaaactcatgcaaacacgtttatagatactggtcagcttaaatagcacaactctctctttattggggatttcaagagatcccaggacccaagaagggtacaagaatatccactgtcagccaaggaaatgcccacactaccaaaggaactgaaagctaatgaagcacctgaaagcttaaacaaacaaacaaacaaacaaacaaaaaagcccgaagcttgtactacattaaattccatgcataaatccttaagtaagacactaaatatacagtgccagcaggctgtcacctccctgccatagcaagacagcctccatctctgggtttctagctcaggagggagatggaccccagacggccaatatgcagagcaacagagggggctgggctgggtcgaagacaggggccaacaggctggaatcctcttcctccagcaggagctacaggcaagaaggaaggggcaggatcaggtcacacctgtttttccttctagcaaccccctctttttaccgaatccaatccaggcctcatcattgttctcctggattatttcacagacctccttgctaattttcccacctccagtcttgcctcctccaaaccgtccatcaaagccacccacttgtctttctaaagctcagggtctctgaatttgtccttgcttagttcagaaacgttccctggctccccttcacatacagttgctgttctagacacctaagcctggcatgccagatctccaccatcagaagcctctccagcctcctttccctctgttctagcatttcctccaggccagtctgcccaatccactatttggacaagagaattcgcagctttccctgtctgtccccctaggtgtttctcactcttcaaggttcctccaatcttcttcaggtttgtcactgagccttgtgaaggcatccaatttccctaactagaacgtaagctccttgaaggcacttatcagacctcctcccaggccagaccccacttcagacttcagcaggcagcctgggtccagagacagagcattgggttccctgccactgtctcactatatgcccttgggcaagtccctgcctttctcagtgccccactttccttgatatcaagaaatttgctgtcgagtgccaaactgataaaatggattcactgaataactctcaactgcaatcccaggggccaggctgaggagcttggggtcctgggcctgaagacgttcaacctgtcgaccccctcatctccttggttagtccctgtgtacttcagtgatctccatttcccagccatccctatccatcctctcctttcatggcccacctggtgggccacaggggtgaagcagggagatccaggcagggttggggggcacagaaggggtcacacgaggagcctgggatgaatctttcagccccacgagggcttcagctgcctcttgctgcagctgccactctgagggaccagatgtccgggccaggcacgaggctccagaggcctgcaagggaaagggagacaagcagactgggaacccccgcttctgcccaccctctaagtgttcctcagcccctgcttccttcagtttcctgctttttccttccccaggctcaacctcctcccagggccctagatcccacttctttcccaggacctgtggctgtagctgaagagggtctggggtgccacagggctggagtatcagagttgagtgtctagaaacaaggagagaagatgccagggtggttaaacagatgaacagacatgcacacattgaaagaggggcaggattttgccatgttttgatctgggaatctgagagcctgctgggccattaagctgtgtcttgacttattttgttttcagtaaagtaaaaatccttgccagtttttcctcccagggctactgtgaggattatgggaaatcactagtgtcttttttttttttgagacaggctcttgctctgtcacctaggctggagtgcagtggcggtgtgatcatggctcaccataagcttgaactcctgggcctacaccatcttcccacctcagcctcctaagtagccaggaaaacaggtgtgcaccaccattcctggctgttttaatttttttgtagagacgaagtctcgctcagttactcaggtggtctcaaactcttggcctcaagtaatcctcccacctcagcctcccaaagtgttgggattacaggtgtgagccaccaggccccacctgatgccggtttttaaaaaaacacctagaagactgagattactgtccctgacctatcagagtctgggtcccattcccccagttccccagtcaccatagaacttgaaggagagcttggctcacctttgggaagcttttcctaatggcctctggcccctctcctgggtctctgaggctctcatcatctctgccccccatatcagcaggcaatcttaccccatcaaatctgtctaagcagatataacagctaccattaaagagtctgtgctaggtctattccatacattattgctaattcttacaacaatcagagaggtaagtaatagtgtctccaatttactgatagaaaaacaggctcagagaggtaaagataattgtccaaagcatcacagctaggaaatggcagtactaggagagctctgccttgcctattagtcagagaccttttcatcttcattatccactgtggttggacaccagcactgtggttggacacagcacaggcttaggcttatgatacacatccttctctccctactcacgtgcggggctggctagggggcccttggggctctccagaaagaggagctgtcagtactgggtgagatcctgggcaggtggtgaagggcccatgagtgggcagctggagggaggtgccagggtcaaagcctaataagaataaaagaatgcagagtgtataggggccaaggtcatagtttctttcctccctctccccacctatgctttcttcctcttccctctccaatatgtggcagattggcactcaaatatatgttgaatgaatgttgaattatcatcttaccagggaagggaggcagagagacagcaggttcttggtacagcaggcggcacaccactggtggtggcatggagaagcctggaggcagccagtgtccagggacccaagggccaggaggcaccggagtccaggacaagggcgaggcttccgggggatggctgagcagcagaggcccacaggagttctgcaggggcagagggcacaggctggagttgggtacaaggctggaaaaggattgagtgtattctgggatacgggcagaaccccaaaactttggggctgggaggccctcgttttcccctcattttgcctagagaagagcagtgatttgactagattacatagcaaaccagggctggggctagaacccaggtgttgagggcacagaagaaagggtctgggtaggaactagggtgggggacactttctcaggccccagcctctccttaccttcccggggggtgtcggtgccagcaggactgccccatggggggtctgaggctggggtgctatgttctcctttccagctgtgaaggaccagggagagctctaatgagccctttctcctgacccctatcctaccccaaccccagacagttctcatctcccccatctagctcattttttttttttgagatggagtcttgctgtgtcgcccaggctggagtgcagtggcgtgatcttggctcactacaacctccgcctcctgggttcaagtgattctcctgcctcagcttcccgagtagctgggactacaggcatgcgccaccaagcccagctaatttttgtatttttagtagagacggggtttcaccatgttggccaggatggtctcgatctcttgacctcgtggtctgcctgcctcagcctcccaaagtgctcggattacaggcgtgagccactgtgcccggcctctagcccatttttgacccacagaactcgctgcattctctcaacgctgggacagctgaggccgagggagtagaaacccttagttcaaggtcgtacaccaattcagcagcaggactgggcctctttttcccatacctgcctcctgta

SEQ ID NO: 101 - DNA, 29089 bp, Mus musculus
acggttcagggggagggggactctcctccaaaaggctgacttggactagcaacacccctctcttagggaacgtcggagggtcatggctgcccaagtggccttgcgcaggcagcaggaggcacagctgaaaaggcacctggctcagggactgatgaaaggggcaacccctctgaaagctcccctccgtgtcaagaagggagccattcggccagggatcccttgtgagtgtctctggttaggagtgggacagggatctggatgcaggaggataagggcaagcaagcatcactgtcctgaaacgaaattagtaccaacttgggcccagtgtttctgttctctttctctgagcctcacattctccaactataaatgtgttcaagagctgggcaggggtgatgaaagcctttactcttaccactcaggaggcagaggcaggcagatctctgagtttaaggccagactggtctaaaatcccagcttcaggacagccagggctacacagagaaacactgtcttgaaaaacaaaacaaaatgtgctcaaggggactggagagatgggccatcagtcaagagtgctgtctcacaaggtagctcacaaccacatcactctaagcactgcagacatgtggtgcacagacatacatatatggaggcaaaacactcatacacatgaataagcaaaagctcaccttaaaatgtaggcaagggacacagtgacagctgaagagagaaaatgagaggggagggcaacagtgagtgggtccgggtagaggtacttgctgtgcaaacctagtgacctgagcttgatcctcggagcctacagaaagaagggcagaactgactccccacagttgcccttggcctccatgtgcacaccatggcgcccaaacacagtaatacatgtttttaaagaaagagaagagtagggtgtggtgggcatgtccataatcccagctctgcagacagaaggtgaactggaagccaaccaagctagacccctgtctggaggagggctacacaggagaagcaaacatcagaacaggcctggctgtggtagtatgtggacgcagaagcaggagtccaaaaccagcctgggcctcatgaacaaaagaataaagaagccagagtgagatgagaccttagctgaaattggagtaggaaaggagtcaggaaatgggctcactggatctctccctggttcctcacagctggaaaagagaacatagcaccccagcctcagagtccccatggagcagtcccactggtactgacaccccctgggaaggtaagagacctgagtctgagagagtggctcctagcctggctctagccccaactgtttcctctgtgctccctgggttccagctgcagccctgacttgcaatgtgggtgaactaaaaagggacttaagagccgcccacagttgcatgtcccaccctcatcccagagcatgctcacttcagccttgccctctacccttgcaggagaactatgggccactgctgctcagccgccccccggaagccttgcctttgccctggactccagtgcctcctgggccttggggccctggacactggctgcccccaggcctctcaatgccacctccagtggtatgccgcttgctgtgccaagaacctgctgtccctctacatccttttcctggtaagaagttaactgacctggccaccaaccggggagcatgcaggagctgtacctagacccctacacatgtgtagcaaatatgcagcttggttttcatgtgggttccctaacaagtggagtgggggttgtctctgactctgctgcctgctattgaatccccttccctctacttagactacctggtgggcctcagtgagagaggatgtgcatagacctgctgggactagacacccgaggatatggagggtacccaaggggactcaccttctctgagaagaaaaagaggggacaatgggggaaagagtttgtaagggtgggactggaagtaaggagggagggtgctgtgatcaggatgtaaaatgaattttaaaaacacaaagacgataattcaccttttattcaacagatatttgaatgctaagttgccactgtaccagaaaggggagagaaaagagacatgggtgggtgaagcgagcacagtcgtgtgaccctgagccctgtacatgctgtgttcttttgtctccttaggctttgaccctggcacctctctccggctgcccactcatgggaccctcccgacctgcccaggatctcgctcagtactgacggctccactttctggggagccccaaggaccccctaacctgcctcacacgtaagtaggaacacaaaaggaaatgtgttcattttgagtttatctttgtactgcagaccttaacagctaatatagaaggaaaagtttcaggccacgtgtgctggtgcacacctgtaatcctggagcttggcaggtagagccagcaggtcagggcttccgattcatctctaggaagggtagcaggcaggcaggcaggcaggcaggcaggcaggcaggcaggcgtcttctgtttgataactgaggctttgctgagactgtgcacctctcagagcctgttctaaatatcagtaattcctagatgaaactcatctcgggtcattataataattaacaacacctaacactggcctgatcttgaacaagcagttcatgcttctgaaacaggtacaatagggtagggttgtctggtgacatggaaagccacggtggtaaggcacaggtatagaccagaggccattagagcagctggtgggacagacagcagttccagtcccactggtcatcctttctgcttctgagacactaccatcagtgactccctccctataaccgtcacagtagcctcagaggggacactcacagagattctcattttatagaaagtgaaatggccaagatagagaacaagacttacccaagtccacaaagttctccagttcccagatcagaatgtccaccactgcctgtgtgtgtctctctctctcctttttccagatgttcaactctgatactccagtcctgtggcaccccagactctcttctgctacagccacaggtctgggggagaagtggcatccaggagcctgggaggaagttgaatttgtagaagggaaacatggggattaaaggaaggaagtacttacaggttggaggggagtgagattcccagtgtgctcctctccctgtcctttgcaggcccctggagcctcctgcctggcctggacatctggcccctcggagcggcagctgcagcgggaggcagctgaggcccttgtaggtctgaaagactcatcccaggctccccgcctgaccccatctgtcccccctaaccctgcctggatctctctgctccacccctgtggcccaccaggtaaccttcctgagaagagagaatgagataagtttggttgggaaatggtagccattagaacaagcagggactaaccaaaaatgggacagatactagttgaattccctcaggtcagggccccagagtttctcagccaggcctctgagactgcagttgaacgttgttctgagagtcactacttaccagttttgttctgaatgacaaatgtccagtgccttgacttcaggaaaatgagtccctgggaaggaggagactttcaggggctggcatataataaaacactgcagaggctggactccagaccccagcttcctgctcaagcctggaagggagtgaagtgaccagggtctaggctagggggactgataactgttttccaggagcttctattctggctggggagcctggaaagcctcacaaggctcagtggcaagactagaagacatgtgaggaaggagagctcagtggggcagagatgaaggctgagaaggccctgtccgatgctgtcctggtctagagcagtagttctcaacctgtggggccaaaacccctttggggatcaaatgatcctttcacaggggtcacctaagaccatggggaaaacagatttgcatcacaattcataacagtagtaaaattacaagttatgaaatagtaacatttttatggtggggggggggcaccacaacatgaggaactgtattaaagggttgcagcattgggaaggttgagaaccaccgccctagaggatctgctggacccaggagaggtgaggctggaaggcttctgattatagatgtggcatgcgcgtctggaacagcagctgtacaaaggggatctggggaacggtctgagctagacagagcatggtagctttggtggagggactagagaaagcaagactggaggcaggcacaccagcagagagtaagaacacagcagggtgggttaggtcagtgggatactggaggagtgaggggtcagtggactggatttgacctggacctgacccttcctgtgtgccttcagctcctcctgggggaagaggattccagcctgttggcccacctctccgacccagtccaggttcctctgtctctctgcacattgggcgtctgggatctatctccctcctcagctagacagcagaggtggaggctacctcactgggacaaagagacgacaaactgcaggcactgcatatttggtattttatttatggttttgcatgggatttaatgtaatgcaagcttcagcttttttttttatataagctttcaggttccttttttagtgtgggtattttcttgactgagggtggctattcttgtagcccgtttaaatactaagtcccccaataaaggcagttgggcagtttaagatgacccatatctaaatacattttttcatgagtttatgctctctatatgcctatgttcttatgtctgtctctgaatgtgaaaatacaagaatatgttcactttgtatgtaggtttctgtaagcaagaaataaacctttgccatctaagccatcgagagttgattatcattgtgacctagtctatcctgactgacagaaaggactgtctcttgagaacttacacaaagctgggcatgttggctcactcctatcacatgctctgtacctggtataacctgttttctgctatccagagagccacaaattaaaatgcctacactggtgtcaagtaaaccatctaaagaagtaaagatggccagatgggggctgggaaacagattgcatgccttacctccgagcagccttctttaacctgctcgattactccaggaagaaacataggctcagtgttgccacatcctctaattttttttcaagagaaattgggaaactgggtttctgtttagaacatcttataataattttcaaacattggtacagccttctttaaatgttttattgaccaaaaaacatagcttcaggtcaactttggccaatagtacactaatttgattctaatctaacataacattttccagatgggaaatctagagccagtcaggacaagaacaacgaagttagtttttaacaggagtttttcctaactaagagggttcaatgtgtttttttaaaagtctgttagagggtctggtgctgtagtgcagtggcacagtgcttgcctggaatgctggggccctaaattcaatactcagcatgtcacacaaagtataaaccagaaaatacaggctcaatcaaggattagagagaatattttccatttgttgagtaccaacagccgcaacagcagctctgtatgcaatctatgctaaaagagagaaagtggttagcccaaaagttcatggaaattttctagaaaccaatcagaaagattctttcttgctgtcaagccttctaaaagcatggaataaaagagttgaggctacagggaacacatcaggcagaaagaagcacttctcacaaacgtctctcccttttcctgccaaggttgttatataatggtttcggttggtgttctattgctgtgataaacatcatgaccaaagcaacttagagaggagagggtctatttgactgacacgtcccacccacagtcagtcactggagggagtcagggcaggagctcaaggcaaaaccctagaagtaataggaactagtgcagaggcgttagagggccactgcttcctgacttgttcatcgtgattttcccagcctgcttccttacacaatttagaactacctgcccaaggttgctatcaacacagtaggctggactctcctacttcaatcattatcaagaaattactccacacacatgcctgcaggccagcctcgtgagaacatctcctgaattgagggcttctgcccagcttgtgtcaagttgagaaacgaaccagtacagtcgatcctttgccagcttcacacacacatttacacacacatatattcacacattcacatacatacacacatataccataaatacacacatgactatttaacaatttcatttcttgcttatccccaagatctcatgttaatattagtatcacaacataaaacacagtccgtttgtgtatgtgtgtgtggatttggtggggggggggttcagggtttctctgtgtagtcctggctgtcctagaactcaatctgtagaccaggctgactttgaactcagagattcacctgcctctgcctcctaaatgctgggattaaagatatgcaataccccatagactcacagtgcaactttttaaaaagctttactttttttcttatttattgcgagggccttttgcttgcatgtatgtctgtgtactgtgtgcatgcagtgcctaccaaggccagaaaagggtatcagcccctctggaattggaattaggacctaatggctgctaggaattgaacccaagtcctctggaattgcagcccatgtgcttgaccactgtactatctctccaggattaattggttggttttgagatggggtctaactctaacccatttagaacccatttcaattcattttgtaagccaagttagcctcaaactcaggacactcttcctacccccaacttactgagtgctgaattacaaagagccaccaggcccagctaataatggaatgtttgttatgctcctgtgctgttgttgtgcaagtcctctttaagtcactgcacaaaggactcctggtgagttaatacaatcctgggaagaccagaagagcccatcctcccctgtgggtggggggactcagagctcagcaacagacctgataactgacggttttcctgtcattacctgtgcctgtccctcttttcactcaagaggatgagcatccaaagacaccttgttctcttaactcaaggccttgagaaggcgagctattcctacagccccgcagatggcagaataacggacctgcagctctcatccgcggacactgcaagagacaaaaagactaaagccagcctcatgccttcagtccctccctgtgataacttagatatacgattgccctttaatagacctgcctaagctggctagcagtgccctggtcttccggtgacagatgactgagcccacacaggcatagggcagggaagcactgcaaactcaactcagctaagactgctgcttggggctaatgaagggtccccagtgtgtgaaggtcacacagccaaaaaggataacagaaaaaggtataagaaagggaagtgagtggacagctgcgagaaggctctgagaagaaagccctgccactaagcccaccctgagctccagccccagaacctactgaggtagaaggccaactgcatgttaccctctgacttgcacactgctgcatgcatcccgcccacccatcagctagttaagagaaaggtttatgttagtgtaaagcagcagttagctgcggtgcatagcttttaaataaatgacaggggaggaagcagagaggaggacttctcacttttatgggaccctcctcgtctccgagccagacctagcaaggctttccacaccattaactagccaagtcattttcaaatcatgtggacccccaaagggtgcctgagggagtgtggtaaaggcgcagaggtcagctttgagaacagggaggaatttaactttgtatggtgccacaagcttctaatcctaacactccccagttctgggaggaagcaggtgaacccctataacttcaaggtctatacagagagttctatactgtatacagttctggtctatacagggttacaatagagactctaccccaaactgggcacagtggcgcatgcacacacacacacacacacacacacacacacacacacacacactgctctggcttccacactgacacctctctgagtggatcccttcatctgatgctggggagccctgaggcctcttgaagccagtggactgtgaacactgctttcccgactggccacttccctgtggctgccaccaaagagcaggaaaggatggcgcctgatctgagtgttgagctgctaagcttctgccttgatgctctacagaaaaaaccaataagtttccaaccgtgaagtgccctccttgcccctccccacaacaacccaagttttgtttcaagagtacatattacattctgtcctttgaaaaatccacattctggtcactccagccctacaggaacgtggcccacttctgaccacacttggagtccaggcagaaaaatgacctcctaacacctattccatccaggctacgctcaactcctgtcctgactcttgtaggctcacacttacccatctccttggatagctagccgtgcaacgctatgttcatgctctgtagagagtgacggtaccctatgtagaccctcacgaggtccggagcttttccccaaagcaagatctgtccttttatccaacttggtacctgtgttaagctctttaggcctttatgttccttagaggtaccagtttgatcactctaagccaggctagtgtcaagctgtgtccccaacccccagaataattgttcaaagaggacaggcctattgtgcagtgtctctctgggggactccgagtaaatgatgagcgacctcattctctacagcgccttgggaacggtgttcctactcagtctactcaggtccagccactgtaatatcagcttcctgcctcaagccattctttttaattctgcttacttttagttttacaaaaaagtagtgtttcggccaggcgtggtggcacacgcctttaatcccagcactcaggtggcagaggcaggtggatttctgagttcaaggccagcctggcctacagagtgagtttcaggacagccagggctacacagagaaaccctgtcttaagacaaaacaagaagaagagaaggaagaggaggaaaaggaggaggaagaagaggaggaaacaaggtcataacatttccaggaaaatgaacagaactagaaacgattatgttaaatgaaattggccagactgaaaaagacaaaaagtgtgtgtacagaacctagatttaaaatcatgcttttgtacttacatgggggagagggatcatgaagttagaaagtggggtcataaaatgggaggaagagatcttaagggaggtgggaagtagagcagtggaatctaggaacagaaatagaagggactcactagctggaggaagggaaccagcaggagcgtcaaggggacatgagcgggcacagtgtaaaaagacacacatgcgtgaaaataccatggtggaacccactgctgtgtgtgctgacctggaaagtaatggggaaaaaaaaggtttcttcatattaactcctcgaatagcgtctctatcgaccttacaccaaagtcatgcatctaccacaggattcatccccattgacacaacatgtgtcatgtgtcaccatgaccaaatgccagatagaaacaacccaaggatttattcatttgtctcagtttggaaagggactggtttattgccacatggccccatgtccttgagcaaatcactgtcatgctgggtgtgtcctgctgaggagctaggactaccacacagataagagaccccaggcaagagaagaagagttcccagttctaaccattcctccagctaagcccatcttccacctcccacagcctctcaccagcagcatcctatttgtgaatccattgattctgtcagcgtcctcacactcacagacatccccagaagtgcactttactggtcgcatacatggtttttgtattggtgctgttctggtttggctgccttagaactcattatgtaaaccaatctgacctcgaatttgctgtaatcctcctgcctgtgtctcctgagtgttaggaccgtaggtgtgcatcactatgcccaggccatttaagtgtttaaggtttttttaaatttacttttgtgtgtatgtgtctgcatatgtacatacatgagtgcacgtgcccgaggaagccagaagaggacatgtcatcctctggagatgaaagtacaagctactgtgaccctccagtgtaggtgtttggaactgaagtcagattttctgaaattgctgagccatctgtctctccggcccctcaaactggcttaacttttcacttatgtattgataattcatttctttttaatatttttttctaattttaagtcttagtatgtgtataaagagggtgcgatatgtgaacatacacccttctctgagacgcacctgtggcagtcagaggacaaaactctgtagttagttcttataccgtgatgggttcaaagaatcgtatcaggtcaatcaggctcgtatgggagaacttctacctagtgagcgaaccatcacaatgcccctcgtttcttttttttttttgggggggggggggtcgagacagggtttctctgtgtagccctgactgtcctggaactcactctgtagaccaggctggcctcgaactcagaaatccgcctgcctctgcctcctgagtgctgggattaaaggcgtgcgccaccacgcccggcccctcctctcttttctatcttaaataatatttgtctggatgcaacacaacctcaaatattttatgcgctgcgctgcggggtgggagtgggaggtactgagagcctggcgtagtgacacactcccgtagcattaagctgggggatcatgagttcaaagccagccttagataaaaagtcccaggccagtcttggctaaataaattaatgataatcctgtctcaaaacaacaaacgataggcaggtaggtgggtgggtaggtacagatataataaagttgcacaggtcagcttggatgactcagaagaggcaaacgaggagactaacggtctgaacaaccagactccggcactagatggcggagctgaacctccaccaagggcccgcctctacccctttgtccccgccctaatctcctccccgctcccaacgccttctttcctctccgcgagcgtcaatggagctgaagcaacttccgcccaaagaagggtggggcttccgtgtatctcttggtctcgcgaatgctaatgctagcacaaaaggtggtggtggccacatgtcatagtgccttttccctggattgcctgtcacggttccgcccgtaactattcccatttccggccaggaagcagggtcttgcgctgaatcccgccttcctttcgtgcgcgctcaacttcgcccgcacttccgccctcaaaagtttccgcctccttgttcccgccagacacacaaggctcaaatgaaggccgactcccccagctcgctccggtcacgcccaaggaaacggaaagaggaaccagatcccttatcctcctcccgagtcccttctcttggcttctccaccccttcctcttacagacccgcccattttgggtggagatgaagccatattcgccctcagaaaggcggagccctctggtttagccgctctcgcgagcactccgaaatctcgcgagactcgacgcccgacttgtgcgcccgggaaaccccgtcgttccctttcccctggctggcagcgcggaggccgcacggtgagtgagggctctgggtcgcggctgtgcgcggggccacggggccgggctttctggccccaagagctcgtgccgggaccgcgggaagcccggcgcggggtcgctccgccctctggagccgcggccacgtgcgagcggcaggcccggacatgcctgatcgccgcaatccgggagcccggagggttaggtgggcagcggaggggtgagtgggacgcccggaacgtgggcttgagggagcggggtgtggagggctctcccacgcggtcaccacgccgcggtgctgcgatccgcgtggcgtgtgcacccggcaactctgttggacctgcaggagccgagttgcagggacatgaggctgggtggatgctgaggctttggggtggactggcgacgagcagggttggtgttgacctggacccacgtcaggggtttgcaccaagcctgacctcggcatgcttgtcccttcctcagatgcccggagttactgtaaaagacgttaaccagcaggagttcgtcagagctctggcagccttcctcaaaaagtaagtgtttgttggaactgaggcctgacccctgtgcgctgtgaccccaatgtgtcattaatccctctggccacttgctgggggtcttttctgaattgggcctacggtgaccatgcttcctttttaacctgttcgttcttgctttttttttcccccaaccttgttaacttgctaaaggttagtagatctgaagtcatctttggaaatttttgaagtgtgctttttctcaattctcttggttctaggtccgggaagctgaaagtccccgaatgggtggacacagtcaagctggccaaacataaagagcttgccccatatgatgagaactggttctacacacgagctggtaagaactgaggctttggctgggagtgggaacctgggcgaccccaggcagggaccctgtcttcccctcccatctacaccaggagacagacctcattattgaatagctgtagctttaaactagaaaggaaatctgagggcaaatgagtgtccatattttgcttacttgagagtcttaacagctttctgtgtccacggttatagcatttagatttgaacaactgtcaactcctgtttggttgagtggtcgggagtgccactcctgttataaaggaaacttacagatctggtgcccaaagaaaactttggggtgcccctctggtctctctggatcctgcctgggtgctttgtgcatcctgttgtctctagtctttaggggagcaggattctttctgctgggtagtgccagggttgcagttcatggccaggcctttgctaggggggggccctgcctgagaattcccctggtcgtgggaagtaagttcctcttcgcttaagaccgtgaagcagtttataagttaatattaaatgtccacgggatccactttgtttcaggctttggcatgggcacagggaccaccatgactcaacacagcctctgaaaaccaaaaggtcaattccacagtgtgggaaaaggtcggtgcttccacctgccagcacgtttttaaggagggtgatgtagggaagggtggtgaggcctagctgaggtgtgcacctcacaccccctcttggaagcaagcgtgcagtggtgttgacagtgcttcaggtggtaggttagggcggctgtggagttgcgagaggaagactgttgggtttctctgggtagagtggtgtacttgctgtggacagggttggttgtctagtttccacagctgctgtggggggaggctgccatatccagggcccgccagacactgagctgtgtcccaagcaggatggggttagcaagaaatggaatcgagccaggtgccttttgcctttgattccagcacttctggagcagaagcagtttggggccagacctgctggtgtgagcttgtattcccagaatttgagagaccaaggcaatgctgagggggctgggctgagctacaggaagaccccagcattctggggtctaatgggttcctgtctggtttgatcaaaaagctcaggctcttaccaaattgtagccgtttgtcataacactgaaaaggggggtacagaggtggcattactttcttcgaagataggctagttctgttcaaagttagttttcagactatgtttgtagttttgtctggataatgagctggcttgttctgtcacttgcttttggggctggagtgcagtggggaaacaggctcatgttttaggtcctgagaaaaggctccatgggcctcctgtgttaggaccagggggcttgttgggagagtgacatttgtaggggaccacttccgttggagaaccaaagggagggtgagttagggctgggagaatagatttttccacagaagtttaacatgaaggcattggggagggaaacatacaaggtttttcatcccacacttaaagacggggtggtcagggtggggtccccaccctgctcttagcacaagtttcttctgttgttgttaggctgcagtgcttcatgaaaccttggtcttcgcaagtaagttcaaatccaaggtgccagcccctcctgagcagcaattctggggctttatctaaagttgtgcctttaaaatgtgccagagccaggtcttgttgaagaggagaataaaaagaaataggctgtcttgctgcttacagcctctaaatagttctttattcagtcaaaaggagtgcacacaagctctggaatggcaggcccatgccttgtaattagttggcaggtggtttcccacgagatgatttttatgtggtgctggaaaggacggctagaatccccattgcagaagcttttagccttgttgtgattccctccgtttgtccgctgtgcttgcagttggctagttctttggtgatgtgctgagattcaagcacccactgtgtccaggcagcctagtgagaccaaggttccccaccctgaggaagagcagagaggtatagagcatttgagtgggcctttaagattggggttgttggtgatgtcaccttgcaaaaaggttggaaatggctgttaatcctgacactgatacgggctgtgggttttttaaaaattaaagcaaaatgaacagagacaagctgtgggggcaatgtcttgggtgccagtccaatgctaaatggaacctgggcagtagtagatgagctgagtctgtcacagggctgttcatccctaaaatgaagttgcctggggccccagtaccatgcggctcttggctactgtgtagcttgcagatgtgaagaatgcatggcacggcttcagctcagtgccttgggttttcctgacgctggtttgataggccagaagagtgcccacaggacaataatccttgctcgacccatggttgaggcaaggcacattacaagttttgaggtgcccaccacagaaagtgcctgcatcaggcacatgggtatggccacacttgatgaggcttatctagaacatggggccagtcttggtgaggggcaaagatccaggggtgtcaaacaccagttttggtacatggtctcagttacacagttgtctaatttcacacagtgaaggacaagcaggtgacctcaggctccctcttgccccacccacagcttccacagcacggcacctgtacctccgaggtggtgctggggttggttccatgaccaagatctatggaggacggcagagaaacggtgtcagacccagccatttcagcagaggctctaagagtgtggcccgccgggtcctccaagccctggaggggctgaaaatggtggaaaaggaccaagatgggtatgcagggttgtggctgggccaggggtagtctttgcctgctggtggcatgtggtggggttgttggacctccctataaatgaaggtatggggccttcagaaagcaaaagggagggcctcacccagacctctctggctgacttgctctgactctgggaaggtaatttagcgactgtctgctttcattagcctactcgttaacttttcccaattgattttttcggggcttttgatctaatgcttgcacaaacgacaccccgtcaactcccaagggtctccctctcctgccccgggctcgttaggatgtggctggccacaagtgggacttggcaaacacagtgcagttccatcacttggtactttgtttgtgcaccacccctgggggggtgggctgtactcatccagggtttgttttgttttgttttgtttttctttgtacaggggccgcaagctgacgcctcagggacagagagacctggacaggatcgctggacaggtgagaggtgcacgttatgcgtctgttgaaacagagcgggggggggggggggctggaggccacactgggaaggggttaaaaataaggtatactagccaggcggtggtggcgcacgcctttaatcccagcacgcaggaggcagaggcaggcggatttctggaggtcagcctggtctgcagagtgagtgccaggactatacagagaaaccgtgtcttgggaaaaaattaaaaaaaataagatatactataattgctggagactgggtgcccaatgtggtatgaggcttctataaacttagacctgtagtcccgtacagatacttggtgttagggcttctagccactcttcctccttagtaccaggcaccaggtttacacagcttgggatggggtagagatgtggcagacaggttcaggcccagactttgtagagtgacttccttcctaccacattccatgtaaagtgatgctcaccctgaacagcagtggtgtaaagaggagccctgggatctgacaggcactccgtgcctaattttctctctacaagagactctaccacctaagggtcttggaaggctttagcccttaacttggagtcttagtaaaaagagcctgaccccaaacattggcaaacccatcccctcaggacaaagggcagaagcttgagccctgtgtataatttacagagtcagaagtgtctgcaacagtggggctgagggcatggatgcagtgagctatgacaaaccttgaccccgccctgatctttctgtcttcccacaggtggcagctgccaacaagaagcattagaacaaaggatgctgggttaataaattgcctcattcataatcctggtctggatctggttttggttttcaaaacgatttccatgggtgtccttagctatcatcctgctgaggctggccttaaacttagatcacctcgcctttgcagccaccatccagctctggtctgggtctcttggcttcatttaggagtagaggaattgtgattgtcctcaagacaccagtggagctgtggcattagtgttagggcaaggctgtgcatctgtggtggtaattgagaaaaaactgtatagttgaaagtgacctccccagtcagtcagtccctgtgctaaagatggagccattcctccatgctgtgtgtagccccaagtgcggttgagcagatttaaccaagtaagctgtatcgagtgtgctgggcctctgagcagaagtctaacccagctcagttggtcatggacgcatcccaggtgctagatgttccctgtcagttccttatttctccaagctaacaggttgatgccaggtaaaactggctcccagaagagcccttgttaagtccttgctggaagtggctgttgactcttatacatgagatctgtgcagcctctcccagtgtgaagtgcatgccaagcagtttgcagatgttttccatgcccagcaatcctctgaagtgttgaattgaagcatttgaagagaagtcacatagtgatttgctgaatgctctaaggctttgagaatcacatggccacgcggtcaaccttgggcacctacaattccctctagcatgagtacattctgctcagctgagccatgactggataaactacctggccgagtaggcatagctgcagcttcactcttcggccactaggtggcagctgctagccactgctgaacaagttaaattccagctcctagttcgttgggaactgggggtgctcaagatagctgtcctgtgtgagcaggcccctaccacaacattggggcctgtagtacagaaggggaacgaatcttcaggaactgccaactgcatttagtggtacaccaagctcatggaagggggttcatacctacataggctcagctgaactgaagaatcatgtaattgctgcaattaagattttatgtatgggagtacgctagctgtacagatggttgggaaccttcgtgtggttgttgagggttgaatttttaggacctgctcgatttggtccagcccaaagataggcacactggctgacaaactggaagagggcgtcagatctcatgggtgattgtgagccaccatgtagctgctgggatttgaactcagaaccttcaaaatgctcttacccactgaaccatcttaacagcccagttgcagtgttaattactgtgtagcctagaatggcctggaacccctgcctccaccttcagagtattgggtttacaatcaaccaccaagtgtagccacttgccctattttatttatttttgagacagggtttctctatagctcttgctgtcctggaactccctttgtagaccagactgacctcgaactcagaaatctgcctgcctcccaagtgctgggattaaaggtgtacgccatcatggacttgtttatgaattatgaaacattccaggcatgcaaaacagtattcaaaacagccttgcaaaagctctccacccatggctgggaaaatggctccagggtttaagaatacttgctgctcttccagaggacctgaatttagttcctagcattcatgtcaggtgactctgctgtaactccagatctagggaatgaaatgcctctggcctcagacacttcactcaggtgcacatacccatgtgcaggcccacacacctatacacaattaaaagtaacagtaaatctttaaaatgcccagcctaaggagtaacaggggagtcagggatggcagaatacacccacaatactgggaagcaaagaagagaatcacaagtttgaggacagcctggtctacatagggagatccaggccagccagagctctgtcaaaagacaaacaggaaaaaagtgttatacaaagaaaatcagttgtaactcagtagcagatctcttgtctggcacaggaggagcccagagttccacagaagcaaacataaaaaggaataaacacacacaaaaccactgcaaagtcaaaattagggcctggggagatggctcagctgttaagaacacctgccacaatgggcagtggtagcacacacctttaatcccagccctcagaggcaggcggatctctgaatttaagaccagcctagtctaccaagtgagttccaggacagccaggactacacagaaacaatgtctcaaaaaaccaaaacataaaaacccacctgctgttcttccagaggtccctggtactattctcttcatctatatggcctctgagtccagggggatctgacagcatacacgcaggcaaaacacccatgcacattaaatgaaaatgaaactttgtgtttgttttgttctgtttgagacagggtttctctgcgtagctgtggggctgtcctggaattcactctgtacactaggctgccctcaaattctgcctgcctctgctggatttaaaggcacacattaccttccagcattttttttttttttttttggcttttctttttaaaggtgggtgaatccagctgtgtccttctccagccccacccagtcctcttcctcaggaggtaagcatgatgtggtgtgcacattcatctctacctttgtccccaaacagcatacagtgacatttttttgcctttgaaaaacaagtcaactgccaggcatggtggcacacccacctttaatcccagcactcagaaggcagaggcaggcagatctctatgagttcaaggccagcctggtggtcttcacagtgagttccaggacagtcagggctacactgagaacccatctcgaaaaacacaaaacagaagagaaaactaagtcaactgcatcatctacaccagtttttttctcctccccatttctccactgacttcctccctgctcggtggctttcagctagcctctctacaaaggctggctttcctcttacaaacgtaccttggaattcctttgccattttccctaccaaaagtatcgtgtagtttttgttttcttcatgattcagctgcccccctaaagcctctttcgaatttttttatttttatttgggggagatgctttgtgtatgtgtgtgtgtgcactacatgtgtgcatgtgcccatgtacctttgggagtcagactgtctgaaactggagttacagacagttgtaacccactacaggtgagttcggggcgtaaacccctgtcttctacaagaacagtgcatgctcttaacatgctcttaacatctctctagcccctatttggggggttgttctgtctgtctgtttgtttgtctaactgtctgtgtcagggtcttgttgtatagctctggctatcctggaattcatgacagttctcctgcctctacctcccttttgctgttttgatttgatttggtttgggggtatttgtattgttttgttttgttttgttttgttttttgtttttgtctgaggccaagtctgcagaacaggctgacttggaacttgcctttatcctgtctcaaactctggaattataggtatatgccaatacacctaatttaataaatgtatttttgtcctgtctttacatatgtgaaaatcacctaactacttacagtatctcaaaagctcatttcccattcagacctcatttcagactcttgttagttaacatttttaatttatttatgttctgtgtatggttgctttgtctacatatgtctgtgcaccatgcataggcccggtgcccacagaggcaagaaaaggacctggaattagctggaagctgccctatgggtgctggtggtcaaacacaggtcgtctggagattacaggagcaggccaccacacccacctgatgttttctttttactcactcttgtgtgcacacacatctgtgtgcttgcccttgccagtatagagaacatgtggaggctgaaggctgactgcaaatgtcttccccactctcctcacccatcccctttcttgtttttgttttgtttttccagacaggatttttctgtgttgccttggctgttcgggaactcattctgaggaccaccaggctggtcttaaactcacagagattcacctgcctctccctcctgaatgctgatgctgggataaaaggtgtgcactactatctggctttaaagaaatgtttacgaatgcttttagtttgttttgttttgttttttagatttatttagtatttatatgtatgtttgtgaaccaccatgtgaatgataaagacttaaacctagttcctcatcaagaaaaacaatacagagacaaagtttggagctgagatacagagacaaagtttggagctgagacaaaaggatggaccatctagagactgccatacctggggatccatcccataatcagcctccaaacgttgacaccattgcatacaccttttcagcaagattttgctgaaaggaccctgatatagctgtctcttgtgagactattcttgggcctagcaaacacagaagtggatgcccatagtcatttataggatggatcacagggcccctaacggaggagctagagaaagtacccaaggagctaaagggatctgcaaccctataggtggaacaacaatatgaactaaccagtaccccccagagctcatgactctagctgcatatgtatcagaagatggcctagtcagccatcagtggaaagagaggcccattggtcttgcaaattttatatgcctaagtacaggggaatgccagggccaagaagtgagagtggggggaagggcatgggggacttttgggatagcattggaaatgtaaatgaagaaaatacctaatttaaaaaaaaaaaaaaaaaaacaagtggcagggcggtggtggcacatgcctttaatcccagcccttggggaggcaaaggcaggcagatttctgagtttgaggccagcctggtctacagagtaagttccaggacagccaggagtatacagagaaaccctgtcttgaaaaactaaaagaaagaaagaaagaaagaaagaaagaaagaaagaaagaaagacaagtggtcttaaccactgagccatccaacccctcatctttttgtttgtttggttggttggttgtttttttggcttcttgtgaagtcataacttccagttctttggaaacatcaaatgatgttttgctggtgcacacaggtgaaaggatatttggatatagtaaacacatggaaggacctgtgatgatgttatataaatatgacccccagactgtggaagatgagcactgagccttggtttggtttgctccacctggttattcttccctaatgacatgcatgcatggattgattcgctttacatagtgctgttgagctccacttatggaaaacaccgatattgagaaaaacttgcccaagaactactcgtgaggttcctgcctctggagtgctaggactaaaatcacgtatcaccactgcccagctaattcctcacctttgaaagaaaacaaaaaaacaggctctcctcactggacccagagctcaatatactggccagactggctggcctgtgagccaacttgctgtttccactgccttgccgtaggccagtgggtgaacccggtggtttctacaggattaaactatggctgcctggtgtctgcttgctgagaaggactggactgcagctgctggttcgtgtctggtgtctgcagctgctgagctgtatttggtgtttgctaagggactgaactgctgacaaagaaaatggacctcacctccaaagaacaattgctgagcaggtccacttcccccacatcctaataacttttctcttccactaccactattggtggtgggctagaagagagattgacccgtattaaaagtaggttgcattaggaggcagaggcaggtgaatttctgagttccaggctagcctggtctacagagtgagttccaggacagccaaggctacacagtgaaaccctgtctcgaaaaaccaaaaaaaaaaaaaaaaaaaaaaaaaaaaagtaggttgcaaaaaatttatgcctacatttttgagacagggtttttcttgtgtagccctggctgtcttggaactcactctataaaccaagctaacctcaaactcagagatttgcctgtttctgcctctggagttctaggactaaaatcatgtatcaccactgcccagctaattcctcacctttgaaagaaaacaaaaaacaggctctcctcactggacccagagctcaatatactggccagactggctggcctgtgagctcactgttgtcctctccccttgctccatagtctgacagtttcttatgtagccccggctagcctcttgattcattactctgagcctcccaaaatctggaatcagagtcatgagccatcaccgcacatcagccacatacactgtacagcactgggcaagtgacctctcccccctcactgagcctcagtttcctgtcaagtggagggtggtctctgccctattgagaggaggacataaaagaacttcaagacgagggtgtcattcagcagcagagcagtcacctagaacgcgtgaggccccagatgtcgtctcttacactgcaagacaaaatttgctaggcatggcggagcgcatctgtaaccacggcactcagaagaaggcagagccaagagcatcaggacatcaagagcatcctcagaggggggggggggggggttggggggggaatgattgactcagtagtcaggagcacaggctgctcttgcagagaaccagggtttaattcccagcaccgacatggcgacttataactccatctcctaggggtctgtagccctcttccgtcctccacaagtaccaggcacacatacatgcggtacatgtgcatactatgtaagcaaacactcatatacattaaataaagcttcatcaggccgggcggtggtgacgcacgcctttaatcccagcacttgggagtcagaggcaggcagatttctgtgttcgaggccagcctggtctacagaatgagttccaggacagccagggctacacagagaaaccctgtctcgaaaaacaaaaacaaaacaaacaaacaaaagctccatcagttaaaaataatcaaacaaaggtggcaataaacaaaggactgttgtcacctgcatagtggatacaaggccaacccgtgctatatgaaaccctgtttcaaaaaaataaaagaaagagagagaaaaggtggtgggttagaaagaaagaggcagataggagtgataagttttgcccgatgttagtgagcgcagaagccaaagttgagagtagccgctgtggacctgcctgcagcaggtacccagaaccatggctcgccaggatcctttctcagggatcagtggtgatgaaccaggccttgaaccaccctctccccgaccccacgcactagagagagactcaagggaattgtggccagcccaggtgcagggcagttcctctccactcagagcccacacatatggcaaataaagggccaggagtaagggccactggagcccatctccggcacggctgaacaggaagtgaggcggagtttggagtggaatctggtacctcaaggctacggccacccaaactaaccgactcactgggagacgatgccagggggtctagaagccctcagagccctgcctctcctcctcttcttgtcatacgcctgtttgggtaatgtggccaaagggaaggtgcgggtggggcgggggtgttgcggctgacaggagaggtgcagagtggagtcagaaatggccaggcagggtgatgcataacgtggcatctcttaaagtaacgccagaactctaggaaactgaggaaggaggaacactgcatttgaggccagcctgggctacataatgagttctatctaggccaacctgggcaagttactgattaaaactgtctcaaaaagaaaaggagtgtggggagggaatcagggaaagccgtctgtagctagccacaggcttgagtaagtccactgttaggaccaacactaccttgccccacgacacacgaccttagctccacaggtcagaatgagaactgaggtaagtgttgactgaacaccacaccagtggaggtgtagcaatgggtgtcggtgagggaacgggttttatttgtttgtttgtttgtttgtttgtttgtttgttttttcctctgccttacatctggagggcaggcttgccatgtgaccacatagacccaggtttgcagtggaggtcttaggagcagggactggggccctgctctctgtgtcttaagcctgtgtgaccaggaactggctggggctctttcccctccctttctttcttcctcacttccgaccttcttcttttctgtcatgtccacaaaagggagctacaagccagtgtggagctggggaggctgagaacagggtggggggtggggggcgcggttcaagataaatacaagagcagacaccatagccaccagtccaccctcggctcttagcctcctccgatgccccagacagaactcagtcccagtgcctaggttaatactggtttctctgttttgttttgtttttcgagacagggcttctgtgtgcaactggaactcactctgttagaccaggcaggcctcaaactcccagagatctgcctgactctctctcctgagtgctgggattaaaggcatgtaccactactgcctggcaggtcgccacatttaaattacagagatgagaaacagcctaggcacaaaaaaacaaaaaaacaaacaaacaaacaaaaaaaacaaaaacaaaaaaaaaaacaagccaagcgcagtaaaggagagattcaggaaggtgggaattgggctctactatcttttccaatagcctggttactgctgagctgagccccaccgctgcatctaaggttctgccccaccttcaccccctccccgtgggggttcctaagagttgtaaggaatggggaccaatgggatggttttcatgaaagagtccctgggctgtttggggaacatcaaaatacaaaggggaaagggaagaaagaggccatagggtgtgcccccccccaagtctcccatcatctttttctaggtaccattaccattggtacggctccactcctgatgtgaaggggtctgggctagagcaatcatctccatctccaggctctgacccatctgtctcctctcctctctccacaggtcccggatgccaggccctgcgggtagaagggggtccaccatccctgacggtgaacttgggcgaggaggcccgcctcacctgtgaaaacaatggcaggaaccctaatatcacatggtggttcagccttcagtctaacatcacatggcccccagtgccactgggtcctggccagggtaccacaggccagctgttcttccccgaagtaaacaagaaccacaggggcttgtactggtgccaagtgatagaaaacaacatattaaaacgctcctgtggtacttacctccgcgtgcgcagtgagtagggagggcgctggcctccttgcgttccctgctccctctttcttccaaaacattaggagcagagctagctcctccctcctggacctgccaccagccacagagatggtggcttcagggctccctgacctcgcaagggtcagggctgggagaagaagggacaccagaatgctgagcagcaccctgtcttcacagatccagtccctaggcccttcctggacatgggggaaggtaccaagaaccgcatcatcacagcagaagggatcatcttgctgttctgtgcagtggtgccagggacgctgctgctattcagggtgagtctcccccaagtgacacccctcaagtcatcttggcttacctgggcctggactgtgactcccagtgtccagctggtcctctgaattccaaggtttgtccttccaagtttgggaggctgggaataaccaccaaaaggattcccaggggggtcagcgtgtccccacggccctcatagaaaccctctcacttctggcccgccaacgggagtcccctgcaaatgcagccaagacaagggaagaaggtgtgtcctcccagagcccctgcgtctccttaggccagaagacaacatttttcacccacattggggcttcattatgtagccctggctggccttgaactcacagagatctgcctatttctgcctcccaagtgctgctgggattaaagggccaccatgcctgcccttcttcctttctttaactttttcttttccccaccacctaaccccccaagactgggtctctctgtgtagccctggctgtcctagatataaggctggcctcagactcacagagatccacctgcctctgcctcctgagtgctgggattacagttgtgcacccctatcgccctgcactttatttatgtcttagtgtgtacgtgggcatgttgagtgtggaggtcgaagaacaactttcaggagttgattctttcctcccactgtgggattccgcacaccaaattcatatcctcaggtttgcatggcaatacacttaccagcttgagctatcatctggactttctttgctttcagtttttattttactttattttattttatttttttaaagctagatattagtctaggctagcctcaaacttgctatatcaccatggctggcctgattcctctttaccttccaagcactgaaattacaggcaggtggcaccaccagttttatttttgtttgttttaatttttgttttgtgttttgttttgtttttgtggggagggttagacagcattttgctatgtaattcaggctgggctagaactcactctatagatcatattggtctggaattcccaatcctcctgcctcagtttgccaagcactggaattacagatgtccagcaccactcactccctgctcgccgttctgcttgtcattgaggagcagtagagagctagcatggtggtgcacagctttgaccctagcagcactcaggaggcagaggcaggcggatctctcgggagccaaggccagcctggtccacgtactgagttcccaggtagttcttgctagatagagatcctcagagcatcagtggagtggcagggaggtgcagcagtccacttgagacagggagattgcttaaagtttgaggcccataaaaagaaagagaggagaggggcagagactagaatctgccaagatcctgatggtgggatctgccttgatggtggggagcacagtatccctcactctttctgataaagcacttgctagtaggagacagtctaaaaacccttcacctccctccttgctaaacgtcgcttctacttcatccccttctgtagaaacggtggcaaaatgagaagtttggggtggacatgccagatgactatgaagatgaaaatctctatgaggtaagcactgtttgcagcaggcgtcgggtgcatggggtgtggtgtctgccttgagtctcaccctggagttgactggacgctggggctccagctgtcagggtactgatgtctcctctctgacccctgcagggcctgaaccttgatgactgttctatgtatgaggacatctccaggggactccagggcacctaccaggatgtgggcaacctccacattggagatgcccagctggaaaagccatgactgacatgtcccacccttccctgcctgccatatgtctgactccagcatccctgcctccccactcttcccctggagtccccccttcccagtgcttgctccagccactcgagtggcctacccttgcctccaggctgccccaccctattctcccacctaatcttgtccttccccaagtccagctccctctctagtgggtaatgagcccttaatcgctgcctctaggggagctgattacagcagcctcgttagtgtcacccc

SEQ ID NO: 102 - DNA, 29089 bp, Mus musculus
ggggtgacactaacgaggctgctgtaatcagctcccctagaggcagcgattaagggctcattacccactagagagggagctggacttggggaaggacaagattaggtgggagaatagggtggggcagcctggaggcaagggtaggccactcgagtggctggagcaagcactgggaaggggggactccaggggaagagtggggaggcagggatgctggagtcagacatatggcaggcagggaagggtgggacatgtcagtcatggcttttccagctgggcatctccaatgtggaggttgcccacatcctggtaggtgccctggagtcccctggagatgtcctcatacatagaacagtcatcaaggttcaggccctgcaggggtcagagaggagacatcagtaccctgacagctggagccccagcgtccagtcaactccagggtgagactcaaggcagacaccacaccccatgcacccgacgcctgctgcaaacagtgcttacctcatagagattttcatcttcatagtcatctggcatgtccaccccaaacttctcattttgccaccgtttctacagaaggggatgaagtagaagcgacgtttagcaaggagggaggtgaagggtttttagactgtctcctactagcaagtgctttatcagaaagagtgagggatactgtgctccccaccatcaaggcagatcccaccatcaggatcttggcagattctagtctctgcccctctcctctctttctttttatgggcctcaaactttaagcaatctccctgtctcaagtggactgctgcacctccctgccactccactgatgctctgaggatctctatctagcaagaactacctgggaactcagtacgtggaccaggctggccttggctcccgagagatccgcctgcctctgcctcctgagtgctgctagggtcaaagctgtgcaccaccatgctagctctctactgctcctcaatgacaagcagaacggcgagcagggagtgagtggtgctggacatctgtaattccagtgcttggcaaactgaggcaggaggattgggaattccagaccaatatgatctatagagtgagttctagcccagcctgaattacatagcaaaatgctgtctaaccctccccacaaaaacaaaacaaaacacaaaacaaaaattaaaacaaacaaaaataaaactggtggtgccacctgcctgtaatttcagtgcttggaaggtaaagaggaatcaggccagccatggtgatatagcaagtttgaggctagcctagactaatatctagctttaaaaaaataaaataaaataaagtaaaataaaaactgaaagcaaagaaagtccagatgatagctcaagctggtaagtgtattgccatgcaaacctgaggatatgaatttggtgtgcggaatcccacagtgggaggaaagaatcaactcctgaaagttgttcttcgacctccacactcaacatgcccacgtacacactaagacataaataaagtgcagggcgataggggtgcacaactgtaatcccagcactcaggaggcagaggcaggtggatctctgtgagtctgaggccagccttatatctaggacagccagggctacacagagagacccagtcttggggggttaggtggtggggaaaagaaaaagttaaagaaaggaagaagggcaggcatggtggccctttaatcccagcagcacttgggaggcagaaataggcagatctctgtgagttcaaggccagccagggctacataatgaagccccaatgtgggtgaaaaatgttgtcttctggcctaaggagacgcaggggctctgggaggacacaccttcttcccttgtcttggctgcatttgcaggggactcccgttggcgggccagaagtgagagggtttctatgagggccgtggggacacgctgacccccctgggaatccttttggtggttattcccagcctcccaaacttggaaggacaaaccttggaattcagaggaccagctggacactgggagtcacagtccaggcccaggtaagccaagatgacttgaggggtgtcacttgggggagactcaccctgaatagcagcagcgtccctggcaccactgcacagaacagcaagatgatcccttctgctgtgatgatgcggttcttggtaccttcccccatgtccaggaagggcctagggactggatctgtgaagacagggtgctgctcagcattctggtgtcccttcttctcccagccctgacccttgcgaggtcagggagccctgaagccaccatctctgtggctggtggcaggtccaggagggaggagctagctctgctcctaatgttttggaagaaagagggagcagggaacgcaaggaggccagcgccctccctactcactgcgcacgcggaggtaagtaccacaggagcgttttaatatgttgttttctatcacttggcaccagtacaagcccctgtggttcttgtttacttcggggaagaacagctggcctgtggtaccctggccaggacccagtggcactgggggccatgtgatgttagactgaaggctgaaccaccatgtgatattagggttcctgccattgttttcacaggtgaggcgggcctcctcgcccaagttcaccgtcagggatggtggacccccttctacccgcagggcctggcatccgggacctgtggagagaggagaggagacagatgggtcagagcctggagatggagatgattgctctagcccagaccccttcacatcaggagtggagccgtaccaatggtaatggtacctagaaaaagatgatgggagacttgggggggggcacaccctatggcctctttcttccctttcccctttgtattttgatgttccccaaacagcccagggactctttcatgaaaaccatcccattggtccccattccttacaactcttaggaacccccacggggagggggtgaaggtggggcagaaccttagatgcagcggtggggctcagctcagcagtaaccaggctattggaaaagatagtagagcccaattcccaccttcctgaatctctcctttactgcgcttggcttgtttttttttttgtttttgttttttttgtttgtttgtttgtttttttgtttttttgtgcctaggctgtttctcatctctgtaatttaaatgtggcgacctgccaggcagtagtggtacatgcctttaatcccagcactcaggagagagagtcaggcagatctctgggagtttgaggcctgcctggtctaacagagtgagttccagttgcacacagaagccctgtctcgaaaaacaaaacaaaacagagaaaccagtattaacctaggcactgggactgagttctgtctggggcatcggaggaggctaagagccgagggtggactggtggctatggtgtctgctcttgtatttatcttgaaccgcgccccccaccccccaccctgttctcagcctccccagctccacactggcttgtagctcccttttgtggacatgacagaaaagaagaaggtcggaagtgaggaagaaagaaagggaggggaaagagccccagccagttcctggtcacacaggcttaagacacagagagcagggccccagtccctgctcctaagacctccactgcaaacctgggtctatgtggtcacatggcaagcctgccctccagatgtaaggcagaggaaaaaacaaacaaacaaacaaacaaacaaacaaacaaataaaacccgttccctcaccgacacccattgctacacctccactggtgtggtgttcagtcaacacttacctcagttctcattctgacctgtggagctaaggtcgtgtgtcgtggggcaaggtagtgttggtcctaacagtggacttactcaagcctgtggctagctacagacggctttccctgattccctccccacactccttttctttttgagacagttttaatcagtaacttgcccaggttggcctagatagaactcattatgtagcccaggctggcctcaaatgcagtgttcctccttcctcagtttcctagagttctggcgttactttaagagatgccacgttatgcatcaccctgcctggccatttctgactccactctgcacctctcctgtcagccgcaacacccccgccccacccgcaccttccctttggccacattacccaaacaggcgtatgacaagaagaggaggagaggcagggctctgagggcttctagaccccctggcatcgtctcccagtgagtcggttagtttgggtggccgtagccttgaggtaccagattccactccaaactccgcctcacttcctgttcagccgtgccggagatgggctccagtggcccttactcctggccctttatttgccatatgtgtgggctctgagtggagaggaactgccctgcacctgggctggccacaattcccttgagtctctctctagtgcgtggggtcggggagagggtggttcaaggcctggttcatcaccactgatccctgagaaaggatcctggcgagccatggttctgggtacctgctgcaggcaggtccacagcggctactctcaactttggcttctgcgctcactaacatcgggcaaaacttatcactcctatctgcctctttctttctaacccaccaccttttctctctctttcttttatttttttgaaacagggtttcatatagcacgggttggccttgtatccactatgcaggtgacaacagtcctttgtttattgccacctttgtttgattatttttaactgatggagcttttgtttgtttgttttgtttttgtttttcgagacagggtttctctgtgtagccctggctgtcctggaactcattctgtagaccaggctggcctcgaacacagaaatctgcctgcctctgactcccaagtgctgggattaaaggcgtgcgtcaccaccgcccggcctgatgaagctttatttaatgtatatgagtgtttgcttacatagtatgcacatgtaccgcatgtatgtgtgcctggtacttgtggaggacggaagagggctacagacccctaggagatggagttataagtcgccatgtcggtgctgggaattaaaccctggttctctgcaagagcagcctgtgctcctgactactgagtcaatcattccccccccaacccccccccccccccctctgaggatgctcttgatgtcctgatgctcttggctctgccttcttctgagtgccgtggttacagatgcgctccgccatgcctagcaaattttgtcttgcagtgtaagagacgacatctggggcctcacgcgttctaggtgactgctctgctgctgaatgacaccctcgtcttgaagttcttttatgtcctcctctcaatagggcagagaccaccctccacttgacaggaaactgaggctcagtgaggggggagaggtcacttgcccagtgctgtacagtgtatgtggctgatgtgcggtgatggctcatgactctgattccagattttgggaggctcagagtaatgaatcaagaggctagccggggctacataagaaactgtcagactatggagcaaggggagaggacaacagtgagctcacaggccagccagtctggccagtatattgagctctgggtccagtgaggagagcctgttttttgttttctttcaaaggtgaggaattagctgggcagtggtgatacatgattttagtcctagaactccagaggcagaaacaggcaaatctctgagtttgaggttagcttggtttatagagtgagttccaagacagccagggctacacaagaaaaaccctgtctcaaaaatgtaggcataaattttttgcaacctactttttttttttttttttttttttttttttggtttttcgagacagggtttcactgtgtagccttggctgtcctggaactcactctgtagaccaggctagcctggaactcagaaattcacctgcctctgcctcctaatgcaacctacttttaatacgggtcaatctctcttctagcccaccaccaatagtggtagtggaagagaaaagttattaggatgtgggggaagtggacctgctcagcaattgttctttggaggtgaggtccattttctttgtcagcagttcagtcccttagcaaacaccaaatacagctcagcagctgcagacaccagacacgaaccagcagctgcagtccagtccttctcagcaagcagacaccaggcagccatagtttaatcctgtagaaaccaccgggttcacccactggcctacggcaaggcagtggaaacagcaagttggctcacaggccagccagtctggccagtatattgagctctgggtccagtgaggagagcctgtttttttgttttctttcaaaggtgaggaattagctgggcagtggtgatacgtgattttagtcctagcactccagaggcaggaacctcacgagtagttcttgggcaagtttttctcaatatcggtgttttccataagtggagctcaacagcactatgtaaagcgaatcaatccatgcatgcatgtcattagggaagaataaccaggtggagcaaaccaaaccaaggctcagtgctcatcttccacagtctgggggtcatatttatataacatcatcacaggtccttccatgtgtttactatatccaaatatcctttcacctgtgtgcaccagcaaaacatcatttgatgtttccaaagaactggaagttatgacttcacaagaagccaaaaaaacaaccaaccaaccaaacaaacaaaaagatgaggggttggatggctcagtggttaagaccacttgtctttctttctttctttctttctttctttctttctttctttcttttagtttttcaagacagggtttctctgtatactcctggctgtcctggaacttactctgtagaccaggctggcctcaaactcagaaatctgcctgcctttgcctccccaagggctgggattaaaggcatgtgccaccaccgccctgccacttgtttttttttttttttttttaaattaggtattttcttcatttacatttccaatgctatcccaaaagtcccccatgcccttccccccactctcacttcttggccctggcattcccctgtacttaggcatataaaatttgcaagaccaatgggcctctctttccactgatggctgactaggccatcttctgatacatatgcagctagagtcatgagctctggggggtactggttagttcatattgttgttccacctatagggttgcagatccctttagctccttgggtactttctctagctcctccgttaggggccctgtgatccatcctataaatgactatgggcatccacttctgtgtttgctaggcccaagaatagtctcacaagagacagctatatcagggtcctttcagcaaaatcttgctgaaaaggtgtatgcaatggtgtcaacgtttggaggctgattatgggatggatccccaggtatggcagtctctagatggtccatccttttgtctcagctccaaactttgtctctgtatctcagctccaaactttgtctctgtattgtttttcttgatgaggaactaggtttaagtctttatcattcacatggtggttcacaaacatacatataaatactaaataaatctaaaaaacaaaacaaaacaaactaaaagcattcgtaaacatttctttaaagccagatagtagtgcacaccttttatcccagcatcagcattcaggagggagaggcaggtgaatctctgtgagtttaagaccagcctggtggtcctcagaatgagttcccgaacagccaaggcaacacagaaaaatcctgtctggaaaaacaaaacaaaaacaagaaaggggatgggtgaggagagtggggaagacatttgcagtcagccttcagcctccacatgttctctatactggcaagggcaagcacacagatgtgtgtgcacacaagagtgagtaaaaagaaaacatcaggtgggtgtggtggcctgctcctgtaatctccagacgacctgtgtttgaccaccagcacccatagggcagcttccagctaattccaggtccttttcttgcctctgtgggcaccgggcctatgcatggtgcacagacatatgtagacaaagcaaccatacacagaacataaataaattaaaaatgttaactaacaagagtctgaaatgaggtctgaatgggaaatgagcttttgagatactgtaagtagttaggtgattttcacatatgtaaagacaggacaaaaatacatttattaaattaggtgtattggcatatacctataattccagagtttgagacaggataaaggcaagttccaagtcagcctgttctgcagacttggcctcagacaaaaacaaaaaacaaaacaaaacaaaacaaaacaatacaaatacccccaaaccaaatcaaatcaaaacagcaaaagggaggtagaggcaggagaactgtcatgaattccaggatagccagagctatacaacaagaccctgacacagacagttagacaaacaaacagacagacagaacaaccccccaaataggggctagagagatgttaagagcatgttaagagcatgcactgttcttgtagaagacaggggtttacgccccgaactcacctgtagtgggttacaactgtctgtaactccagtttcagacagtctgactcccaaaggtacatgggcacatgcacacatgtagtgcacacacacacatacacaaagcatctcccccaaataaaaataaaaaaattcgaaagaggctttaggggggcagctgaatcatgaagaaaacaaaaactacacgatacttttggtagggaaaatggcaaaggaattccaaggtacgtttgtaagaggaaagccagcctttgtagagaggctagctgaaagccaccgagcagggaggaagtcagtggagaaatggggaggagaaaaaaactggtgtagatgatgcagttgacttagttttctcttctgttttgtgtttttcgagatgggttctcagtgtagccctgactgtcctggaactcactgtgaagaccaccaggctggccttgaactcatagagatctgcctgcctctgccttctgagtgctgggattaaaggtgggtgtgccaccatgcctggcagttgacttgtttttcaaaggcaaaaaaatgtcactgtatgctgtttggggacaaaggtagagatgaatgtgcacaccacatcatgcttacctcctgaggaagaggactgggtggggctggagaaggacacagctggattcacccacctttaaaaagaaaagccaaaaaaaaaaaaaaaaaatgctggaaggtaatgtgtgcctttaaatccagcagaggcaggcagaatttgagggcagcctagtgtacagagtgaattccaggacagccccacagctacgcagagaaaccctgtctcaaacagaacaaaacaaacacaaagtttcattttcatttaatgtgcatgggtgttttgcctgcgtgtatgctgtcagatccccctggactcagaggccatatagatgaagagaatagtaccagggacctctggaagaacagcaggtgggtttttatgttttggttttttgagacattgtttctgtgtagtcctggctgtcctggaactcacttggtagactaggctggtcttaaattcagagatccgcctgcctctgagggctgggattaaaggtgtgtgctaccactgcccattgtggcaggtgttcttaacagctgagccatctccccaggccctaattttgactttgcagtggttttgtgtgtgtttattcctttttatgtttgcttctgtggaactctgggctcctcctgtgccagacaagagatctgctactgagttacaactgattttctttgtataacacttttttcctgtttgtcttttgacagagctctggctggcctggatctccctatgtagaccaggctgtcctcaaacttgtgattctcttctttgcttcccagtattgtgggtgtattctgccatccctgactcccctgttactccttaggctgggcattttaaagatttactgttacttttaattgtgtataggtgtgtgggcctgcacatgggtatgtgcacctgagtgaagtgtctgaggccagaggcatttcattccctagatctggagttacagcagagtcacctgacatgaatgctaggaactaaattcaggtcctctggaagagcagcaagtattcttaaaccctggagccattttcccagccatgggtggagagcttttgcaaggctgttttgaatactgttttgcatgcctggaatgtttcataattcataaacaagtccatgatggcgtacacctttaatcccagcacttgggaggcaggcagatttctgagttcgaggtcagtctggtctacaaagggagttccaggacagcaagagctatagagaaaccctgtctcaaaaataaataaaatagggcaagtggctacacttggtggttgattgtaaacccaatactctgaaggtggaggcaggggttccaggccattctaggctacacagtaattaacactgcaactgggctgttaagatggttcagtgggtaagagcattttgaaggttctgagttcaaatcccagcagctacatggtggctcacaatcacccatgagatctgacgccctcttccagtttgtcagccagtgtgcctatctttgggctggaccaaatcgagcaggtcctaaaaattcaaccctcaacaaccacacgaaggttcccaaccatctgtacagctagcgtactcccatacataaaatcttaattgcagcaattacatgattcttcagttcagctgagcctatgtaggtatgaacccccttccatgagcttggtgtaccactaaatgcagttggcagttcctgaagattcgttccccttctgtactacaggccccaatgttgtggtaggggcctgctcacacaggacagctatcttgagcacccccagttcccaacgaactaggagctggaatttaacttgttcagcagtggctagcagctgccacctagtggccgaagagtgaagctgcagctatgcctactcggccaggtagtttatccagtcatggctcagctgagcagaatgtactcatgctagagggaattgtaggtgcccaaggttgaccgcgtggccatgtgattctcaaagccttagagcattcagcaaatcactatgtgacttctcttcaaatgcttcaattcaacacttcagaggattgctgggcatggaaaacatctgcaaactgcttggcatgcacttcacactgggagaggctgcacagatctcatgtataagagtcaacagccacttccagcaaggacttaacaagggctcttctgggagccagttttacctggcatcaacctgttagcttggagaaataaggaactgacagggaacatctagcacctgggatgcgtccatgaccaactgagctgggttagacttctgctcagaggcccagcacactcgatacagcttacttggttaaatctgctcaaccgcacttggggctacacacagcatggaggaatggctccatctttagcacagggactgactgactggggaggtcactttcaactatacagttttttctcaattaccaccacagatgcacagccttgccctaacactaatgccacagctccactggtgtcttgaggacaatcacaattcctctactcctaaatgaagccaagagacccagaccagagctggatggtggctgcaaaggcgaggtgatctaagtttaaggccagcctcagcaggatgatagctaaggacacccatggaaatcgttttgaaaaccaaaaccagatccagaccaggattatgaatgaggcaatttattaacccagcatcctttgttctaatgcttcttgttggcagctgccacctgtgggaagacagaaagatcagggcggggtcaaggtttgtcatagctcactgcatccatgccctcagccccactgttgcagacacttctgactctgtaaattatacacagggctcaagcttctgccctttgtcctgaggggatgggtttgccaatgtttggggtcaggctctttttactaagactccaagttaagggctaaagccttccaagacccttaggtggtagagtctcttgtagagagaaaattaggcacggagtgcctgtcagatcccagggctcctctttacaccactgctgttcagggtgagcatcactttacatggaatgtggtaggaaggaagtcactctacaaagtctgggcctgaacctgtctgccacatctctaccccatcccaagctgtgtaaacctggtgcctggtactaaggaggaagagtggctagaagccctaacaccaagtatctgtacgggactacaggtctaagtttatagaagcctcataccacattgggcacccagtctccagcaattatagtatatcttattttttttaattttttcccaagacacggtttctctgtatagtcctggcactcactctgcagaccaggctgacctccagaaatccgcctgcctctgcctcctgcgtgctgggattaaaggcgtgcgccaccaccgcctggctagtataccttatttttaaccccttcccagtgtggcctccagcccccccccccccccgctctgtttcaacagacgcataacgtgcacctctcacctgtccagcgatcctgtccaggtctctctgtccctgaggcgtcagcttgcggcccctgtacaaagaaaaacaaaacaaaacaaaacaaaccctggatgagtacagcccacccccccaggggtggtgcacaaacaaagtaccaagtgatggaactgcactgtgtttgccaagtcccacttgtggccagccacatcctaacgagcccggggcaggagagggagacccttgggagttgacggggtgtcgtttgtgcaagcattagatcaaaagccccgaaaaaatcaattgggaaaagttaacgagtaggctaatgaaagcagacagtcgctaaattaccttcccagagtcagagcaagtcagccagagaggtctgggtgaggccctcccttttgctttctgaaggccccataccttcatttatagggaggtccaacaaccccaccacatgccaccagcaggcaaagactacccctggcccagccacaaccctgcatacccatcttggtccttttccaccattttcagcccctccagggcttggaggacccggcgggccacactcttagagcctctgctgaaatggctgggtctgacaccgtttctctgccgtcctccatagatcttggtcatggaaccaaccccagcaccacctcggaggtacaggtgccgtgctgtggaagctgtgggtggggcaagagggagcctgaggtcacctgcttgtccttcactgtgtgaaattagacaactgtgtaactgagaccatgtaccaaaactggtgtttgacacccctggatctttgcccctcaccaagactggccccatgttctagataagcctcatcaagtgtggccatacccatgtgcctgatgcaggcactttctgtggtgggcacctcaaaacttgtaatgtgccttgcctcaaccatgggtcgagcaaggattattgtcctgtgggcactcttctggcctatcaaaccagcgtcaggaaaacccaaggcactgagctgaagccgtgccatgcattcttcacatctgcaagctacacagtagccaagagccgcatggtactggggccccaggcaacttcattttagggatgaacagccctgtgacagactcagctcatctactactgcccaggttccatttagcattggactggcacccaagacattgcccccacagcttgtctctgttcattttgctttaatttttaaaaaacccacagcccgtatcagtgtcaggattaacagccatttccaacctttttgcaaggtgacatcaccaacaaccccaatcttaaaggcccactcaaatgctctatacctctctgctcttcctcagggtggggaaccttggtctcactaggctgcctggacacagtgggtgcttgaatctcagcacatcaccaaagaactagccaactgcaagcacagcggacaaacggagggaatcacaacaaggctaaaagcttctgcaatggggattctagccgtcctttccagcaccacataaaaatcatctcgtgggaaaccacctgccaactaattacaaggcatgggcctgccattccagagcttgtgtgcactccttttgactgaataaagaactatttagaggctgtaagcagcaagacagcctatttctttttattctcctcttcaacaagacctggctctggcacattttaaaggcacaactttagataaagccccagaattgctgctcaggaggggctggcaccttggatttgaacttacttgcgaagaccaaggtttcatgaagcactgcagcctaacaacaacagaagaaacttgtgctaagagcagggtggggaccccaccctgaccaccccgtctttaagtgtgggatgaaaaaccttgtatgtttccctccccaatgccttcatgttaaacttctgtggaaaaatctattctcccagccctaactcaccctccctttggttctccaacggaagtggtcccctacaaatgtcactctcccaacaagccccctggtcctaacacaggaggcccatggagccttttctcaggacctaaaacatgagcctgtttccccactgcactccagccccaaaagcaagtgacagaacaagccagctcattatccagacaaaactacaaacatagtctgaaaactaactttgaacagaactagcctatcttcgaagaaagtaatgccacctctgtaccccccttttcagtgttatgacaaacggctacaatttggtaagagcctgagctttttgatcaaaccagacaggaacccattagaccccagaatgctggggtcttcctgtagctcagcccagccccctcagcattgccttggtctctcaaattctgggaatacaagctcacaccagcaggtctggccccaaactgcttctgctccagaagtgctggaatcaaaggcaaaaggcacctggctcgattccatttcttgctaaccccatcctgcttgggacacagctcagtgtctggcgggccctggatatggcagcctccccccacagcagctgtggaaactagacaaccaaccctgtccacagcaagtacaccactctacccagagaaacccaacagtcttcctctcgcaactccacagccgccctaacctaccacctgaagcactgtcaacaccactgcacgcttgcttccaagagggggtgtgaggtgcacacctcagctaggcctcaccacccttccctacatcaccctccttaaaaacgtgctggcaggtggaagcaccgaccttttcccacactgtggaattgaccttttggttttcagaggctgtgttgagtcatggtggtccctgtgcccatgccaaagcctgaaacaaagtggatcccgtggacatttaatattaacttataaactgcttcacggtcttaagcgaagaggaacttacttcccacgaccaggggaattctcaggcagggcccccccctagcaaaggcctggccatgaactgcaaccctggcactacccagcagaaagaatcctgctcccctaaagactagagacaacaggatgcacaaagcacccaggcaggatccagagagaccagaggggcaccccaaagttttctttgggcaccagatctgtaagtttcctttataacaggagtggcactcccgaccactcaaccaaacaggagttgacagttgttcaaatctaaatgctataaccgtggacacagaaagctgttaagactctcaagtaagcaaaatatggacactcatttgccctcagatttcctttctagtttaaagctacagctattcaataatgaggtctgtctcctggtgtagatgggaggggaagacagggtccctgcctggggtcgcccaggttcccactcccagccaaagcctcagttcttaccagctcgtgtgtagaaccagttctcatcatatggggcaagctctttatgtttggccagcttgactgtgtccacccattcggggactttcagcttcccggacctagaaccaagagaattgagaaaaagcacacttcaaaaatttccaaagatgacttcagatctactaacctttagcaagttaacaaggttgggggaaaaaaaaagcaagaacgaacaggttaaaaaggaagcatggtcaccgtaggcccaattcagaaaagacccccagcaagtggccagagggattaatgacacattggggtcacagcgcacaggggtcaggcctcagttccaacaaacacttactttttgaggaaggctgccagagctctgacgaactcctgctggttaacgtcttttacagtaactccgggcatctgaggaagggacaagcatgccgaggtcaggcttggtgcaaacccctgacgtgggtccaggtcaacaccaaccctgctcgtcgccagtccaccccaaagcctcagcatccacccagcctcatgtccctgcaactcggctcctgcaggtccaacagagttgccgggtgcacacgccacgcggatcgcagcaccgcggcgtggtgaccgcgtgggagagccctccacaccccgctccctcaagcccacgttccgggcgtcccactcacccctccgctgcccacctaaccctccgggctcccggattgcggcgatcaggcatgtccgggcctgccgctcgcacgtggccgcggctccagagggcggagcgaccccgcgccgggcttcccgcggtcccggcacgagctcttggggccagaaagcccggccccgtggccccgcgcacagccgcgacccagagccctcactcaccgtgcggcctccgcgctgccagccaggggaaagggaacgacggggtttcccgggcgcacaagtcgggcgtcgagtctcgcgagatttcggagtgctcgcgagagcggctaaaccagagggctccgcctttctgagggcgaatatggcttcatctccacccaaaatgggcgggtctgtaagaggaaggggtggagaagccaagagaagggactcgggaggaggataagggatctggttcctctttccgtttccttgggcgtgaccggagcgagctgggggagtcggccttcatttgagccttgtgtgtctggcgggaacaaggaggcggaaacttttgagggcggaagtgcgggcgaagttgagcgcgcacgaaaggaaggcgggattcagcgcaagaccctgcttcctggccggaaatgggaatagttacgggcggaaccgtgacaggcaatccagggaaaaggcactatgacatgtggccaccaccaccttttgtgctagcattagcattcgcgagaccaagagatacacggaagccccacccttctttgggcggaagttgcttcagctccattgacgctcgcggagaggaaagaaggcgttgggagcggggaggagattagggcggggacaaaggggtagaggcgggcccttggtggaggttcagctccgccatctagtgccggagtctggttgttcagaccgttagtctcctcgtttgcctcttctgagtcatccaagctgacctgtgcaactttattatatctgtacctacccacccacctacctgcctatcgtttgttgttttgagacaggattatcattaatttatttagccaagactggcctgggactttttatctaaggctggctttgaactcatgatcccccagcttaatgctacgggagtgtgtcactacgccaggctctcagtacctcccactcccaccccgcagcgcagcgcataaaatatttgaggttgtgttgcatccagacaaatattatttaagatagaaaagagaggaggggccgggcgtggtggcgcacgcctttaatcccagcactcaggaggcagaggcaggcggatttctgagttcgaggccagcctggtctacagagtgagttccaggacagtcagggctacacagagaaaccctgtctcgacccccccccccccaaaaaaaaaaaagaaacgaggggcattgtgatggttcgctcactaggtagaagttctcccatacgagcctgattgacctgatacgattctttgaacccatcacggtataagaactaactacagagttttgtcctctgactgccacaggtgcgtctcagagaagggtgtatgttcacatatcgcaccctctttatacacatactaagacttaaaattagaaaaaaatattaaaaagaaatgaattatcaatacataagtgaaaagttaagccagtttgaggggccggagagacagatggctcagcaatttcagaaaatctgacttcagttccaaacacctacactggagggtcacagtagcttgtactttcatctccagaggatgacatgtcctcttctggcttcctcgggcacgtgcactcatgtatgtacatatgcagacacatacacacaaaagtaaatttaaaaaaaccttaaacacttaaatggcctgggcatagtgatgcacacctacggtcctaacactcaggagacacaggcaggaggattacagcaaattcgaggtcagattggtttacataatgagttctaaggcagccaaaccagaacagcaccaatacaaaaaccatgtatgcgaccagtaaagtgcacttctggggatgtctgtgagtgtgaggacgctgacagaatcaatggattcacaaataggatgctgctggtgagaggctgtgggaggtggaagatgggcttagctggaggaatggttagaactgggaactcttcttctcttgcctggggtctcttatctgtgtggtagtcctagctcctcagcaggacacacccagcatgacagtgatttgctcaaggacatggggccatgtggcaataaaccagtccctttccaaactgagacaaatgaataaatccttgggttgtttctatctggcatttggtcatggtgacacatgacacatgttgtgtcaatggggatgaatcctgtggtagatgcatgactttggtgtaaggtcgatagagacgctattcgaggagttaatatgaagaaaccttttttttccccattactttccaggtcagcacacacagcagtgggttccaccatggtattttcacgcatgtgtgtctttttacactgtgcccgctcatgtccccttgacgctcctgctggttcccttcctccagctagtgagtcccttctatttctgttcctagattccactgctctacttcccacctcccttaagatctcttcctcccattttatgaccccactttctaacttcatgatccctctcccccatgtaagtacaaaagcatgattttaaatctaggttctgtacacacactttttgtctttttcagtctggccaatttcatttaacataatcgtttctagttctgttcattttcctggaaatgttatgaccttgtttcctcctcttcttcctcctccttttcctcctcttccttctcttcttcttgttttgtcttaagacagggtttctctgtgtagccctggctgtcctgaaactcactctgtaggccaggctggccttgaactcagaaatccacctgcctctgccacctgagtgctgggattaaaggcgtgtgccaccacgcctggccgaaacactacttttttgtaaaactaaaagtaagcagaattaaaaagaatggcttgaggcaggaagctgatattacagtggctggacctgagtagactgagtaggaacaccgttcccaaggcgctgtagagaatgaggtcgctcatcatttactcggagtcccccagagagacactgcacaataggcctgtcctctttgaacaattattctgggggttggggacacagcttgacactagcctggcttagagtgatcaaactggtacctctaaggaacataaaggcctaaagagcttaacacaggtaccaagttggataaaaggacagatcttgctttggggaaaagctccggacctcgtgagggtctacatagggtaccgtcactctctacagagcatgaacatagcgttgcacggctagctatccaaggagatgggtaagtgtgagcctacaagagtcaggacaggagttgagcgtagcctggatggaataggtgttaggaggtcatttttctgcctggactccaagtgtggtcagaagtgggccacgttcctgtagggctggagtgaccagaatgtggatttttcaaaggacagaatgtaatatgtactcttgaaacaaaacttgggttgttgtggggaggggcaaggagggcacttcacggttggaaacttattggttttttctgtagagcatcaaggcagaagcttagcagctcaacactcagatcaggcgccatcctttcctgctctttggtggcagccacagggaagtggccagtcgggaaagcagtgttcacagtccactggcttcaagaggcctcagggctccccagcatcagatgaagggatccactcagagaggtgtcagtgtggaagccagagcagtgtgtgtgtgtgtgtgtgtgtgtgtgtgtgtgtgtgtgtgtgcatgcgccactgtgcccagtttggggtagagtctctattgtaaccctgtatagaccagaactgtatacagtatagaactctctgtatagaccttgaagttataggggttcacctgcttcctcccagaactggggagtgttaggattagaagcttgtggcaccatacaaagttaaattcctccctgttctcaaagctgacctctgcgcctttaccacactccctcaggcaccctttgggggtccacatgatttgaaaatgacttggctagttaatggtgtggaaagccttgctaggtctggctcggagacgaggagggtcccataaaagtgagaagtcctcctctctgcttcctcccctgtcatttatttaaaagctatgcaccgcagctaactgctgctttacactaacataaacctttctcttaactagctgatgggtgggcgggatgcatgcagcagtgtgcaagtcagagggtaacatgcagttggccttctacctcagtaggttctggggctggagctcagggtgggcttagtggcagggctttcttctcagagccttctcgcagctgtccactcacttccctttcttatacctttttctgttatcctttttggctgtgtgaccttcacacactggggacccttcattagccccaagcagcagtcttagctgagttgagtttgcagtgcttccctgccctatgcctgtgtgggctcagtcatctgtcaccggaagaccagggcactgctagccagcttaggcaggtctattaaagggcaatcgtatatctaagttatcacagggagggactgaaggcatgaggctggctttagtctttttgtctcttgcagtgtccgcggatgagagctgcaggtccgttattctgccatctgcggggctgtaggaatagctcgccttctcaaggccttgagttaagagaacaaggtgtctttggatgctcatcctcttgagtgaaaagagggacaggcacaggtaatgacaggaaaaccgtcagttatcaggtctgttgctgagctctgagtccccccacccacaggggaggatgggctcttctggtcttcccaggattgtattaactcaccaggagtcctttgtgcagtgacttaaagaggacttgcacaacaacagcacaggagcataacaaacattccattattagctgggcctggtggctctttgtaattcagcactcagtaagttgggggtaggaagagtgtcctgagtttgaggctaacttggcttacaaaatgaattgaaatgggttctaaatgggttagagttagaccccatctcaaaaccaaccaattaatcctggagagatagtacagtggtcaagcacatgggctgcaattccagaggacttgggttcaattcctagcagccattaggtcctaattccaattccagaggggctgatacccttttctggccttggtaggcactgcatgcacacagtacacagacatacatgcaagcaaaaggccctcgcaataaataagaaaaaaagtaaagctttttaaaaagttgcactgtgagtctatggggtattgcatatctttaatcccagcatttaggaggcagaggcaggtgaatctctgagttcaaagtcagcctggtctacagattgagttctaggacagccaggactacacagagaaaccctgaaccccccccccaccaaatccacacacacatacacaaacggactgtgttttatgttgtgatactaatattaacatgagatcttggggataagcaagaaatgaaattgttaaatagtcatgtgtgtatttatggtatatgtgtgtatgtatgtgaatgtgtgaatatatgtgtgtgtaaatgtgtgtgtgaagctggcaaaggatcgactgtactggttcgtttctcaacttgacacaagctgggcagaagccctcaattcaggagatgttctcacgaggctggcctgcaggcatgtgtgtggagtaatttcttgataatgattgaagtaggagagtccagcctactgtgttgatagcaaccttgggcaggtagttctaaattgtgtaaggaagcaggctgggaaaatcacgatgaacaagtcaggaagcagtggccctctaacgcctctgcactagttcctattacttctagggttttgccttgagctcctgccctgactccctccagtgactgactgtgggtgggacgtgtcagtcaaatagaccctctcctctctaagttgctttggtcatgatgtttatcacagcaatagaacaccaaccgaaaccattatataacaaccttggcaggaaaagggagagacgtttgtgagaagtgcttctttctgcctgatgtgttccctgtagcctcaactcttttattccatgcttttagaaggcttgacagcaagaaagaatctttctgattggtttctagaaaatttccatgaacttttgggctaaccactttctctcttttagcatagattgcatacagagctgctgttgcggctgttggtactcaacaaatggaaaatattctctctaatccttgattgagcctgtattttctggtttatactttgtgtgacatgctgagtattgaatttagggccccagcattccaggcaagcactgtgccactgcactacagcaccagaccctctaacagacttttaaaaaaacacattgaaccctcttagttaggaaaaactcctgttaaaaactaacttcgttgttcttgtcctgactggctctagatttcccatctggaaaatgttatgttagattagaatcaaattagtgtactattggccaaagttgacctgaagctatgttttttggtcaataaaacatttaaagaaggctgtaccaatgtttgaaaattattataagatgttctaaacagaaacccagtttcccaatttctcttgaaaaaaaattagaggatgtggcaacactgagcctatgtttcttcctggagtaatcgagcaggttaaagaaggctgctcggaggtaaggcatgcaatctgtttcccagcccccatctggccatctttacttctttagatggtttacttgacaccagtgtaggcattttaatttgtggctctctggatagcagaaaacaggttataccaggtacagagcatgtgataggagtgagccaacatgcccagctttgtgtaagttctcaagagacagtcctttctgtcagtcaggatagactaggtcacaatgataatcaactctcgatggcttagatggcaaaggtttatttcttgcttacagaaacctacatacaaagtgaacatattcttgtattttcacattcagagacagacataagaacataggcatatagagagcataaactcatgaaaaaatgtatttagatatgggtcatcttaaactgcccaactgcctttattgggggacttagtatttaaacgggctacaagaatagccaccctcagtcaagaaaatacccacactaaaaaaggaacctgaaagcttatataaaaaaaaaagctgaagcttgcattacattaaatcccatgcaaaaccataaataaaataccaaatatgcagtgcctgcagtttgtcgtctctttgtcccagtgaggtagcctccacctctgctgtctagctgaggagggagatagatcccagacgcccaatgtgcagagagacagaggaacctggactgggtcggagaggtgggccaacaggctggaatcctcttcccccaggaggagctgaaggcacacaggaagggtcaggtccaggtcaaatccagtccactgacccctcactcctccagtatcccactgacctaacccaccctgctgtgttcttactctctgctggtgtgcctgcctccagtcttgctttctctagtccctccaccaaagctaccatgctctgtctagctcagaccgttccccagatcccctttgtacagctgctgttccagacgcgcatgccacatctataatcagaagccttccagcctcacctctcctgggtccagcagatcctctagggcggtggttctcaaccttcccaatgctgcaaccctttaatacagttcctcatgttgtggtgccccccccccaccataaaaatgttactatttcataacttgtaattttactactgttatgaattgtgatgcaaatctgttttccccatggtcttaggtgacccctgtgaaaggatcatttgatccccaaaggggttttggccccacaggttgagaactactgctctagaccaggacagcatcggacagggccttctcagccttcatctctgccccactgagctctccttcctcacatgtcttctagtcttgccactgagccttgtgaggctttccaggctccccagccagaatagaagctcctggaaaacagttatcagtccccctagcctagaccctggtcacttcactcccttccaggcttgagcaggaagctggggtctggagtccagcctctgcagtgttttattatatgccagcccctgaaagtctcctccttcccagggactcattttcctgaagtcaaggcactggacatttgtcattcagaacaaaactggtaagtagtgactctcagaacaacgttcaactgcagtctcagaggcctggctgagaaactctggggccctgacctgagggaattcaactagtatctgtcccatttttggttagtccctgcttgttctaatggctaccatttcccaaccaaacttatctcattctctcttctcaggaaggttacctggtgggccacaggggtggagcagagagatccaggcagggttaggggggacagatggggtcaggcggggagcctgggatgagtctttcagacctacaagggcctcagctgcctcccgctgcagctgccgctccgaggggccagatgtccaggccaggcaggaggctccaggggcctgcaaaggacagggagaggagcacactgggaatctcactcccctccaacctgtaagtacttccttcctttaatccccatgtttcccttctacaaattcaacttcctcccaggctcctggatgccacttctcccccagacctgtggctgtagcagaagagagtctggggtgccacaggactggagtatcagagttgaacatctggaaaaaggagagagagagacacacacaggcagtggtggacattctgatctgggaactggagaactttgtggacttgggtaagtcttgttctctatcttggccatttcactttctataaaatgagaatctctgtgagtgtcccctctgaggctactgtgacggttatagggagggagtcactgatggtagtgtctcagaagcagaaaggatgaccagtgggactggaactgctgtctgtcccaccagctgctctaatggcctctggtctatacctgtgccttaccaccgtggctttccatgtcaccagacaaccctaccctattgtacctgtttcagaagcatgaactgcttgttcaagatcaggccagtgttaggtgttgttaattattataatgacccgagatgagtttcatctaggaattactgatatttagaacaggctctgagaggtgcacagtctcagcaaagcctcagttatcaaacagaagacgcctgcctgcctgcctgcctgcctgcctgcctgcctgcctgctacccttcctagagatgaatcggaagccctgacctgctggctctacctgccaagctccaggattacaggtgtgcaccagcacacgtggcctgaaacttttccttctatattagctgttaaggtctgcagtacaaagataaactcaaaatgaacacatttccttttgtgttcctacttacgtgtgaggcaggttagggggtccttggggctccccagaaagtggagccgtcagtactgagcgagatcctgggcaggtcgggagggtcccatgagtgggcagccggagagaggtgccagggtcaaagcctaaggagacaaaagaacacagcatgtacagggctcagggtcacacgactgtgctcgcttcacccacccatgtctcttttctctcccctttctggtacagtggcaacttagcattcaaatatctgttgaataaaaggtgaattatcgtctttgtgtttttaaaattcattttacatcctgatcacagcaccctccctccttacttccagtcccacccttacaaactctttcccccattgtcccctctttttcttctcagagaaggtgagtccccttgggtaccctccatatcctcgggtgtctagtcccagcaggtctatgcacatcctctctcactgaggcccaccaggtagtctaagtagagggaaggggattcaatagcaggcagcagagtcagagacaacccccactccacttgttagggaacccacatgaaaaccaagctgcatatttgctacacatgtgtaggggtctaggtacagctcctgcatgctccccggttggtggccaggtcagttaacttcttaccaggaaaaggatgtagagggacagcaggttcttggcacagcaagcggcataccactggaggtggcattgagaggcctgggggcagccagtgtccagggccccaaggcccaggaggcactggagtccagggcaaaggcaaggcttccggggggcggctgagcagcagtggcccatagttctcctgcaagggtagagggcaaggctgaagtgagcatgctctgggatgagggtgggacatgcaactgtgggcggctcttaagtccctttttagttcacccacattgcaagtcagggctgcagctggaacccagggagcacagaggaaacagttggggctagagccaggctaggagccactctctcagactcaggtctcttaccttcccagggggtgtcagtaccagtgggactgctccatggggactctgaggctggggtgctatgttctcttttccagctgtgaggaaccagggagagatccagtgagcccatttcctgactcctttcctactccaatttcagctaaggtctcatctcactctggcttctttattcttttgttcatgaggcccaggctggttttggactcctgcttctgcgtccacatactaccacagccaggcctgttctgatgtttgcttctcctgtgtagccctcctccagacaggggtctagcttggttggcttccagttcaccttctgtctgcagagctgggattatggacatgcccaccacaccctactcttctctttctttaaaaacatgtattactgtgtttgggcgccatggtgtgcacatggaggccaagggcaactgtggggagtcagttctgcccttctttctgtaggctccgaggatcaagctcaggtcactaggtttgcacagcaagtacctctacccggacccactcactgttgccctcccctctcattttctctcttcagctgtcactgtgtcccttgcctacattttaaggtgagcttttgcttattcatgtgtatgagtgttttgcctccatatatgtatgtctgtgcaccacatgtctgcagtgcttagagtgatgtggttgtgagctaccttgtgagacagcactcttgactgatggcccatctctccagtccccttgagcacattttgttttgtttttcaagacagtgtttctctgtgtagccctggctgtcctgaagctgggattttagaccagtctggccttaaactcagagatctgcctgcctctgcctcctgagtggtaagagtaaaggctttcatcacccctgcccagctcttgaacacatttatagttggagaatgtgaggctcagagaaagagaacagaaacactgggcccaagttggtactaatttcgtttcaggacagtgatgcttgcttgcccttatcctcctgcatccagatccctgtcccactcctaaccagagacactcacaagggatccctggccgaatggctcccttcttgacacggaggggagctttcagaggggttgcccctttcatcagtccctgagccaggtgccttttcagctgtgcctcctgctgcctgcgcaaggccacttgggcagccatgaccctccgacgttccctaagagaggggtgttgctagtccaagtcagccttttggaggagagtccccctccccctgaaccgt

SEQ ID NO: 103 - DNA, 110346 bp, Homo sapiens
taaaactttatttacaaaaacaggctgggggtcaggtcaataaaactttatttacaaaaacaggctgggggtcaggtttggccttcgggctgtagtttgccaactcccagttcagacttagaccaataaaagattgtttcaggaggaatgttttatcgctgacattttttagagttaccggtgcacagtgataagaaatagcaacccgagtttgaataggctgggggctgtatccactgttccaaccttggtacacctctcattcccactgtgcagagggggcccagggctcagaggggcacccaagactcagaggggatactgtgggctgagaagggcagctggagctcagagggaatacctggggctcagaggggcagccagggccttgagaaggtgagcaacttgcctagaaatccagtctgtgtcgcccagagtgtgaatataacaaaaatcctcttgggcggctccgatccctcctccccgtgtggtggggactcctttctgggacagaccctgggtctgagtctgtgttgctcagggaagctgacacggactcctgtcacactcgccagcacttttctctgtggctcaggacagggtggaaaagttagaaagtcgccaggagtgggcttggggacagtttgggggccccgagtcccctcatttccctgtctggaggcgcagagaacactccagagggcccggtggacctgctgtcctccctgagcccgccccactcacatcttatctctgcctccctggttctcgatcaaagacagatcacagctgctcctcattgctcaggtcccctcaagtctcctaacagatttcttgaccccaaacttgcactttgtgggaggctcctaccctctctctggctcagccttttgttgtgtagtttgtttttaccatcttaaccatttctaagtgtacatttcagtggcattaaggacatccacattgttgtgtaaccatcaccaccatccctcctggcactttctcatcttgcaaaatagaaactgcatatgcattgatcaataattcccctttccctctcccccagcccctggcacccaccattctcttttctgtctctgtggatctggctactctagggagctcatgcaaatggaatcgtacggtatttgtcctgttgtggcttatttcactcgcataacttcctcaaggcccgtgcatgtcgcagcgtgcgtcagaaagtccttccttttccaggctgaatcctattccaccgtgtggatgggccccagcttcttacccaccacccatcagcggacactcgggttgctcccaccgttgggccatcgtgaacagcgctgcaatgaacgcggtggccagattcctcttcaagttcccagtttcatttctttgatacccagaaatgagattgatgcatcacatggtaattctatgttaatttctttttgttgttttttgttttttgagacagagtcttgctgtcgcccaggctggagtgcagtgccatgatctcagctcactgcaacctgcacctcccaggttcaagcgattcacttattccacacctctgaggtgggtcttattagccccattttacagatggggcaatcgaggcccagagagttaagtaacgtgtccataggagagcagggttttgaacctggactgtctggctccagacttgctgttttaaactattagtcagttaaaactagtagccttcttcttctttttttttttcttcctaaagacagcctactttctttttttctttatttttgagtcagggtttcactcttgttgcccaggctggagtgcagtggcacgatcgtgtctcactgcagcctctacttcctgggctcaagcaatgctcccacctcagcctcccgagtagctgggactataggcacgtgccaccacgcctggctaattttgtgtatttttagtagagatggggtttcaccatgttgctcaggctggtcttgaacttgctggcctcaagccatcctcccgcctcagcctcccaaagtgctgggattacaggcgtgagccactgcgctggccgttacctccaggcttctaccgcagctgctggacactgcctctgagcctctctttctctcctctaattcctttcccaccacagaatcagttcctgtagtagtctgagcaggaagtggagagaacactcaaaattggggactttgaagatatatacaaaggagcagggaaaacgaaagggagagtgaagctgctccccaccctggggctgaggggaggagggcagggagtgtcacctggaacccgggaggagagaggagtcgagagaggtctgccttccagggaccgtgacctctgctcaagagctgcagccagcctgtgtgtttcagtgcagtgcagttggggtatcacagaccaccccacatgcagtgacttggaggtgctattaatgatactattggggcaagaggtataaaccggggtgactgcaccgtctaaggtgcaggggtccctgattgtctgttccttgggcacactgagcacctccctgacacagggcctttgcacttgctggtttgtttgccagaaaggtcctccccaggttccggtctccccccgccagcccccatctccctgtggcattacctttttatttctctcattagcacgtagcaccatctataatccttatctatttatttgcttatacatatatttatagataaataaaaaaacatatatatattttaatatctctctctctttcccttactaaaaaggccagggcagaccagacgtggtggttcacacctataatcccagcactttgggaggtcgaggtgggaggatcgcctgactccaggagttcgagactagcctgggcaacatagtgcgacacccatctctattaaaaaaaataaaaattaaaaaaaattagcttggctgggtgcaggggctcacacctgtaatcctagcactttgggaggccaaggtgggtggatcatttgaggtaagagttcaagatcagcctggccaacatggtgaaaccccatttctactaaaaaatacaaaaattagctgggagtggtggcaggcgcctgtagtcccagctactcgggagggaggctgaggcaggagaatcgcttgaacccgggaggcagaggctgcagtgagctgacatcacaccactgcactccagcctgggcgacagagcaagactcttgtctcaaaacaaaacaaaacaaaaaattagctggtgtggtggcacatgtctgtaggaggctgaggcggggggatcgcttgagcccagggggtggaggctgcagtgagctttgaactccagcttgggtgacagaaccataccctgtctcaaaaaaaagtaaggccagggcacagaggacctgcctgctttcttccccatctacccccaggccctagcacacagtaggcctgatacatagcgagtgctcagcaagtatttgccacataaatgaatgaatgagcatgtccatcccttctctggtaggtaggacaggaccaggtggtctcagaggaatcttctggttcctgggataggaatcatcctcctttctccagctgctgttgagagtggcagctgatagaaacttctgtcctccagtgacctggcccacggagcaacgtattagctcgcggctgccagctgggtcctccccacacacttgcacctttgtcctggaaagcacgtctgtgttggagggttagcccttgccagagaggacatatcagagtccccaaaggccagggacaaaggcaaggattgatcgccagccctgagtcagagaggaaagactcctggagggaagtcagtgatcggggactcagaaaggcgtgattctgaaggaagacaggatttacagggcatctcagtctgctcaggcttctaaaacagagtaccatagacggggagagcttacagacggcggacatctatttctcacatttctggagggtgggaagtccaagatcaaggcgccagcagatttgatggtggtgaggccctgcgtcctggttcacagatggcagcttctctctgtgtccttgcctggtggaaggggagatgcagctctctagagcctcgtgtgtcagggccctaatcccatcgatgaggcctctgcccccatgacctcgtcacttcccaaaagccctacctcctaataccatcacatagtaattaggtttcaacgtacaaatttcaggggacacattcagactctagcaccggggctaaagtccaggggcagaggctaagtttctggaggggctgtttaggggctctggagaccttctctgatattcacaatattgcagggggcattttgacctactgaagagaaacagctcctaaaaagtcacttgtagcaacatgagagattcgcattctgattaaaatctatgcaggcacctcctgcctcagagtcgttgccctggctattccctctgcctggaatgttcttccctggatctcaacacattcctgcacttcctgcaggtctttgcccaaatgtcaccttctcactgaggctgtcttcaaacaccccatttaaatggcaacccctctcccccagtagcatttacactgttctgtttttcccctaaagcacgcatcgtcctctaactgcctgtcccatggaaatgcagcatgcacaaaccacacacacaattttaaaaattttatgacagaggaacctgttctgaaaaaagaaaaaaaggtaaaagaattttaggggtcatattttaaaaagtaaaaagaaacaggtgaaattaatttaacttgtaatattattcaacccttggtcagtgtgtgtggatgaaccacgtctaccagagtccaaggtaaaagcctgcctctgccgccgggccacgcagctgcctggcatggtggcctggggcaagttgctcagcctctctgtgccccggctcccttatcggtgatattcaaatagtgtcatttcaatgtgtaatcaatataagaatattgagatgttttacgctcttttcatatgaagcctttgaagtctgggatgtatatgacatggcatatctcattcagactagccccgggtcaagtgtcccatagccacatagggccagtggctactgtattggatagcacagctctaatatctttttgttttgttttttgagatggggtcttgctctgtcgtccaggctggagtgcagtgatgccatcttggatcactgcaacctctgcctcctgagcttaagtgatcctcccacctcagcctcctgagtgtctgggaccacaggtgcgtgccaccatgcccagctaatttttttttttttaatttattgtagcaacagggttttgctatgttggccaggctggtctcaaactcctgagctcaaacaaagtgcctgcctcggccaaagtgctgggattacaggtgtgagccaccgtgcccatagctctaacattttataaaatccaccaatgatgatgtttatcactaattgttattgcttgtctattaacataccggacccgcaaggctaggggcttgcttatggtccctgctgggtccccaaacgcccaacatagtgcccagcacagagtaggagctcaacgtgaactgaatgaatccagcaggcacacgtgagctctctttcctccctcaccagcagcaatccaggtggcagatgtggctacaatgctttcctggctgggcgcggtggctcacgcctgtaatcccagcactttggaaggccgcggcgagtggatcacttgagcccaggagttcgagaccagcctggccaacatagtaaaactgcatctccattaaaaatacaaaaattggccgggtgcagtggctcacacctgtaatcccagaactttgggaggccaaggtgggcggaccacctgaggtcaggagttcaggacaagcctggccaacacggtgaaatcccgtctctacaaaaatacaaaaattagccaggcatgatggcaggtgcctgtaatcccagctactcaggaggctgaggcgggagaatcgcttgaacccaggagaaggttgcagtgagctgagatcacaccattgcactctagcctgggcgacagagtaagacttcttcttaaaaaaaaaaaaaaaaattagccagtcgtgtggcatgcacctgtaatcccagctgctcaggaggctgagacagggagaactgcttaaatccgggaggcggaggttgcagtgagctgagatcacaccactgtattccagcctgggccacagagcgagtctccacctcaaaagaaaaaaaaataaggtttcctcttcctttgctttttattttgtcctttctctcacccgtctctttgctttccttcactttcttcctctttttcctttccctcagcaaacagcgtagtggtcatgtgtgtggcaagtcactggttcacatctctgctctctgctcgccaggagccagctgtgcctcctttaaggaagcccttcagcttccattcactgtgttctattgccgctggggatgagcgtgattcttcccaggctggggtgggaatgcggctgcctgcaggaggtgttggctccgcctcacacaggcaccttgctaagcatatgaccaagatgagcccatgtaatcctcatgaccaccccagggtgcaggcatgactcagaccaatcccaaggcaccgataagggagccgaggcacagagaggctgagcaacttgccccaggccgccatgccaggcagctgcgtgttccggcggcagaggcaagcttttaccttggactctggtagatgtggttcatccacacacaccgaccaagggcctactgtgggccacgtgctgttggggagccgggggcacagcaatggacgaaacaggcagattcctgccccgtggagctttttttatcctagaagaggaaggaagccaatcaaacaagcaaacacccgccctggagggcggtcggtgcacagagagaaatgaagcagccaagggggatagggagggtcctatgggtggtttgtaactttcaaagggtgggcaggaaggaagtcattgctgagaagatggcattggagcaaggacctgaaggaagggagggtgagtctcctgggtgttagggagaggagcattccaggaggggaccagggagtgcaaaggttctggggcacgagccgggcaacaggtggaggagctccagggaggaggatgtggctggagcagagtgggcaaggagagggagggggatgaggtcagggagatgtgcccatctgggtgcgttttgactttgtctctctagtatgagatgtggtgatcttgtgggccatggtgagggctttggcttttatgctgaatgaggtgggagccacggaaaggtttctttctttttgttttcttgagagacagggtctcactgtgttgcccaggctggagtgcagtgacacaatcacagctcactcactgcagcctcgacttcctgggctcacgtgattctcccacctcagcctcctcagtagctgaaactagaggtgtgtgccactttacctggctaactttttattttttgtagagatggtgtctggctgtgttgcccaggctgatctcgaactcctggcctcaagggatcctcctgcctcagcctccaaaagcactgggattataggcatgggccaccatgcctggccatttctttaaaataacagttttcattgagatataatttgcatatcatacattcacccatttaaagtatataatttggccaggcatgatggctcacacttgtaatcccagcgctttgggaggccagggtgggaggatgaccagaattttgagagcagcctgggcaacaaagtgagaccctgtctcaacaaaaatgaaaacatcaggtgtacatagtggcatatacttgttgtccaagctagtcaggaggccgaggcgggaggatggtttgaacccaagacttcaagactgcactccagcctgggtgacagagtgagaccctgtctcttgaaaaaaagaaaaagtaaataaagtgtgtaatttgatggttttttgtatattcacggagttgtgcaaccatcattaccatcacttttaccgtcacttttagaacattttcaccactccaagatgaaaccccaaacctgtagcagtcactcctcattctccccagcccctggcaaccactggtctactttttgtccccatagatgtgcctactatggacattttatataagcagaatcatacatgtggcctttgtgtctggcttctttcacttatcaatgttttcaaggttcatccatggtgtagcacgcgtcagcccttcattcctttttatgctgagtcatattccagtgcgtggttatgccacattttatttacctattcaccagctgatgggggtgtgggttattttcactgcttggctgctgtgaacatttgtgtccaggcttccgtgtggacatgctctttcctttctcctgggcatatacccaggagtggaactgctgggtcttaggggacccctatgtttaccttttgaggctgcaccattttacaatcccacaagcacctcaagaggcttccaactcctccaggtctttgcctgcagtcattctccgtctttgatcacgaaaggactctgagcagaggaggaaaagcatctgacttgattttccaggagccctgtgacaccatgttgatcatattttgttatcagcactctttcttttcttctgtatcttcgactttccccagggcaagacctctctctcaaacatgacgaagtctttttttcccttcttaagctgccctccctgccaccggaagtgactcccctcagcaaggccaaggtggctcacgtgtcccatcaccctttcatctctgcccttctctctcgagtgacagcatggcgtgacatgagggctctccagccatggccttgcagccctcttgggtaagcatcacgtacatttggaccttgaagacttggtcatgaatcagagttagattgggtgagatggtcaaggcaggtcagtatcaaggaagtggaggagggtgtcagggccaggcagaccgcagattttagttaactggctaatttccgagaactacaaaagtcattaaaaaaaaaggcaactgcatagctgaaggctgttgaaggccttaaggaattcaatgaagtgatattaattaattaatcaatcgatcagttacttgattaattaatgagttaattagctgattgagtaaagtatttattgagtacctgctatgtgccaggcatttttccaggtgctggagatacatcgataagcaaaacagggtcagcttctgtctctcgggagctggaggagatgaacaaggaaacagataagaccatttcacacaaagcaaggtggcctgacagagtgggctgggactcctgttttcaacagatgcaacagcaaaggcttctctgaggagtgggtttcagctgagcccagaagaggagagtggggagccatggaaggatctaggggaagcgtatcctagacagaggaacaggaagtgcaaagttcctgacacaagaaaaagctggggatgctcaatgaactgaaacaatgggggagagggcaggagatggaggcagagagatgggcaggcgccagttcatgtgggtccggaaaataacgacgacactccccagctcagttgcactgacacattccagggactgttctaagcactggcacattttttgacttgtttaatcctcatggtagcccttggaaaggggctcttctaatccccgtttcgtagatgaggagactgaggcacagaaaggcccaaaccacttgccccaggactccaatgtgggaaaccccagagcctggatttctctgaacctgtcccccggggctaccacagtctcacctcagccactctgacctccctcaggagttgggccctgccccttggggcactggaccatattcggcctccttagaggaaggcagtgccaggcaaagctgtctaacgagaacatagcaggtgctctgtaaatattggttcaggcgaagacatgttgcttaaggatggccctgcgagaaggctgctttcttctggagttaaataagaggtttagaaagcctccctcggagcactcaaggactgagcctgccttacccacgtgctggggacaccaccctcctgtccctgtgtaacccaggagtctcttctcagtaacttcattcagaaaatgaggggactggccagcacttcagggaccagaaggcaggccaggtggggtgtggtggaggacttcaggggggcgtggagggcttcagggatacactcacccatctaagggcaactgccacttagtgccagcccacttctctcccttttttcttttttctttttcccccagggtcttgctgtcacccaggctggagtgcggtggtaagatcagggctcactgcagccttgaactctgggactcaagggatccttctgcctcagcctcctgagtagctggggcgacaagcgcatgccactgtggctggttaatcttttcattttctgtagagactggtctcactatgttgcccaggctggtctccaactagtggcctcaagtgatccctcacctggaccttccaaagtgctgggattacagttgtgggccaccatgcaccgggcctgttctgttttcttggagcacttgcctgcaattatccttcattcatttgctcacgtgctcatcattggtttccctcttcattagaaagtggggacttggtttgggttaactaagcttccctgtgcatcagttttcatttctttctttctttttctttttcttttctttttttttttttttgagatggagtttcgctcttgttgcccaggctggagtgcaatggcgctatctcggctcgccacaacctccgcctcccgggttcaagcgattctcctgcctcagcctcccgagtagctgagattacaggcatgcgccactacgcctggctaattttgtattgttagtagagacggggtttcgccatgttggtcaggctggtctccaactcccgacctcaggtgatccatgaagtccacccgcctcggcctcccaaagtgctgggattacaggcgtgagccacctcccagttttcttattgtaaaatggagccattgtgtgcaaagcactcaggacaggggccagcacctagaaggctcctcagtcattcattctagaatatttactgtgagcaggcattccctgccaggccacgttctagagctcaggacgcgtgggggggggggcccgcctcacgggttggcatcccagttggagcacatggtcagaatgcaaggacgcaaatgaacgtgaacctgccagggggtgctcagtcatagggtgatggtggcaccagcgttacgaaggatagggccaggcggatacctgggagaacagaattgcctgtgcagggtgtatggaggccctggggctggagcctgcggggcttcttccagggacagtgaggctggagatggactgcggagatgagggtctagaaggtggtggcggggcatgtggaccgttgtaagggctctggggttcctgggtgggctggcgaagtcctactcacagtgaccaaccatgatgatggtcccgatagaggaggagagggaggaggagggaaaaggaagggtgaggggctcagaggggagagctgggaggaggggagacataggtgggggaaggggtaggagaaaggggaagggagcaagagggtgaggggcaccaggccccatagacgttttggctcagcggccacgaggcctcctcagctcccgccccaaaacggaagcgaggccgtgggggcagcggcagcatggcggggcttgtcttggcggccatggccccgccccctgcccgtccgatcagcgccccgccccgtccccgccccgaccccgccccgggcccgctcaggccccgcccctgccgccggaatcctgaagcccaaggctgcccgggggcggtccggcggcgccggcgatggggcataaaaccactggccacctgccgggctgctcctgcgtgcgctgccgtcccggatccaccgtgcctctgcggcctgcgtgcccggagtccccgcctgtgtcgtctctgtcgccgtccccgtctcctgccaggcgcggagccctgcgagccgcgggtgggccccaggcgcgcagacatgggctgctccgccaaagcgcgctgggctgccggggcgctgggcgtcgcggggctactgtgcgctgtgctgggcgctgtcatgatcgtgatggtgccgtcgctcatcaagcagcaggtccttaaggtgggtgagggagaccccagggggtccgcgcacggacccgggctgttgggcgctgggcgccgggaggacccgcgcgttgcggtgggtgggcgaccgcagcggaatcggcgcccgggcctggcgccgcagagcacgagggaggccaggcgcttcgggaggggctgctgcccgcctccccaccaccctcaccgccccagactgaggctaggggggaacccaggggctttgctggaggcgcaggccagggttggggaggcctggacgggagaccacccgggcgcctgacccgccctaaagggtctgggcgcccacgacggatcaggagtgtggacaggttgcttccgtggtgccgcccgaaggagcccaagagtgtgtgaacgtctgctttcacagcagccggtagcagggtccggtaaaattagagctgcactttgcttgtatcctgtgagcccaggaggacaggaaccttctgtgagacccacgtgggtgcccagctcacatggtaggtgctcagctgagcatcctccactgcccagaatctccccataggaaccctctcccagaggcagaatgcgcgactctgttctccctgctcactgcctccatgattcagtctggaaactataagccgcttttctccccagattcatgcagaggcaggcagcagcccaaggtcctctgagtgcacgcagccttaggtctttcctctgatcctaactttgcataccattgccctttcaaccagggagacagattaggcggtcagctggtctgcagacggacagactctgccctgggtgcctgggtggcctgtttgaatgagcctggagttagggaagggctgggagattgcagagtatcacatttgaactaaaagccatttagagttttgaagccctgggaacccacacatgcagtggcggggaggggaaactggggctcactcttatcaaagttctagccagatgcagagctggggtgaagatgtggacattgtcactctaatggacgtcttttccccttggcctgcctctttggactgggtttcttaagaatggttccttgtccacatttcatgtctgttccctcattcacagagcgaatgaatgagtgaatgaatgaaggatctgcttagatctggctgccacacttcttgggacccagctagctggccttaaagatggagcaacatatggtctctctcaaggtctctgggtgagcagttgtctagggcatcttagccacgttgtgtctatttttgatttttcaaatcttgtcccgccaaagcctgtaatctgactgcaaagaggtcccggtggatggtgacactgtctctggggatggcaggaaaatcagcagaatggcctcttctcccccatgacagctcagaggctttctctgttacactgagggagctttatttttctgtggcctactcatactgaaacgtgtgtgtcagtgacagccttgtggctgctgcagtgccaggaccccactgtgtgtatgcagggtccctagaggggctatcactcaggcagttcaagcatgtgaccctgtgctgtgagtgagcacctggtctcttgctatgggagtgtggggacttatgccaggtaaagagtcttgccaactcagttattcgggggcttatttcaaggtgttttctttctcaggatgtcatcaggttaagtatgtcagtaggatgtgtgtgtgtgtgtgtgcaccacacatgcatgcaccaccaaatttccccactcctctcctgggcttctaaagaggaaaaccacattgtcctcaattgtcctggagctaggagcatctggcttaaagttgaacaggagcctcccagcatccttctgtggatatcccaaaggcgattggtttggggccgagtggtgtgaaggcaggaagacacgcccagcccaagacggccacttctggaaccgcccaggctggagcagcggccaagtgccttagcatggaagaagagagcctgtgttcaggggaccaggcgggtgagacacacgcataagcagggactgcccgctggtgttttctttggctacatgagtctgtgtgcaacttgaatgggaggccttgtgcttttattttttttttttaatgtgctttttggttaacaacagaagtccctacagttggccctctgtgtctgcaggttctgcatccgtggattcaatcaactgcagatgaaaagttttcagaaaaaatccccccaaaataacaatacaactaaaaaaagacataaaaacaatactgtataacaactattgacatagcatttacatcgtattaggtattataagtaacctagagatgatttaaagaatacgggaggatgcgcataggtgatatgcaaataccacagcattttatgtcggggacttgagcatctgcagatcttggtatctatgggggtcctgaaaccaattcccctctgacattgagggacgactttatataaaatatatgaatacttgctcgtaaaaaaaagttcaaatggaggaaaagagagaaagtttcccccattttattcccctcctgagctattatcaccatcattgatgtggatctttctagacccttttctgtgtaccaggagcctgtatgtatacatattaatatatattttacataacttgaactaagtgtaggtgaacttgaacatgtataattatcttgcaatttgtttttcaattcaaagataccagctgaaaaattttccatgtctcagcaataagtctaccccgcgttttccttcatcactgctggtattcctttgaatggttatagacttgtttacctgtttctccattgactgatcattttctctgtcacaaatgacagcgatatcccgacacatccctcttcgtgtggttcatgaacatttccatagggtggatttctagaagtggggccttgggagcaggtgtgctcagtttgagttttgatgattacggccaaattgcccttctgcacagctctgttgctgcatccacccacaaggtatgggactgtgctacttcccctatctctgccatcactggtaattactgatttatcattaccattttttggtagccaagttcccgtgtgtctctggtcctccaaggaaggcccagctggtggacatgggggagaggcccctcactgcagctgggctgcaaaaaagggatgctcatcttccgaggctgctgtcttcaatgatgagctggggtgaagatgtggatattgtcacactagttgacatctttttccctttggcctgcttctttagactgaatttcttaagaatggcttcttgtccacatttcatgtctatgtccttttcacagaacttggatgtgtgcccccagggatctgaaccatgtcttcattattcaccggatcacctgaggtcaggagtttgagaccagcctggccaacatggctaaaccctgtctctactaaaaaatacaaaaactagctggacatggtggtgcacgcctgtaatcccagctattcgggacgctgaagcaggagaatagcttgaacctggaaggctgaggttgcagtgaactgagatcacgccactgccctccagcctgcgtaatagagtgagactccatctcaaaaaaaaaaaaaaaaaaatgaaggaacttagaaatatgtctcagcatgggtaggccataaaaacacattactaattgaaaaaagctctggtgctatttatgtttaaaaaaaacccaccaaacaatattctatattttctttccatttttatttttattttcgtagagacaaggtctcactatgttacccaggctggtctcgaactcctggccttaagtgatccttctgccttggccttccaaaacactgggatgataggtgtgaaccaccgcgccctgccattattttcaatggcttaatattagaatatgttaaagtttgggaaaaggtgagactaacagaagtggctactctaatgagagaaggcaggacactgggggtgtggccaaaggaaacctaatactttatctgtaatgctatttttttttttcttttttgagatggagtctcgctctgtcgcccaggctggagtgcagtggcacgatctcggctcactgcagcctctgcctcctgggttcacaccattctcctgcctcagcctcctgaggagctgggactgcaggtgcctgccaccacacccagctaattttttttttgtatttttagtagagatggggtttcaccgtgttagccgggatggtcttgatctcctgaccttgtgatcttcccctctcggcctcccaaagtgctggaattacaggcgtgagccaccatgcccggccattatttttgttttaacagagaaaatgtatccacatgctacgtgtttgattaaaaattacaaggccaagcatggtggctcaaacttgcgatcccagcactttatggggctgaggtgggagggtcacttgaagccctgagtttaagactagcgtgggcaacatagtgagacccccatctctacaaaacaaaacaacaacaaaactaagctggtgcatggtggcatgcacctatagtcctagctacttgagaggctgaggtgggaggatatcttgagcccaggagctcgaggctgcagtgagctgtgtttgtgccactgtactccaacctgggcaacaaagtgaaatcccatctcttttttttttttttgagacggagtctggctctgtcgcccaggctggagtgcagtggtgcgatctcggctcactgcaagctccaccttccgggttcacgccattctcctgcctcagcctcctgagtagctgggactacaggcgcccgccaccgcacccacctagttttttgtatttttagtggagacggggtttcactgttttagccaggatggtctcaatctcctgacctcgtgatccgcccgtctcggcctcccaaagtgctgggattacaggtgtgagccaccgcgcccggccaaaatcccatctcttaaaaaaaaaattacgaatgaacagatacatagttttcctcaaagactggccagatgaatgcgccacacagaccgatgaggcacactgcaaaggggccctgtggtcgaggttgcttggagaggctttggggaagcgcaactcatttcttttcccttctgccagtgggtaggattggagagaggtgtttggacaggcacactaagggccgcgattgtgaacttcatggcatccattcatgggcagcttactgtgcaccaggcagggttcaaagcacctttgtgaaaattgtctcatttagtccctgcagagggccgtgacatatgatttattgtcttcagtgtccgttaaggagacaagctgaagagagtaatttgccccaagtgacctcgctagtgtatgtgtgtgcgtgcatgtgtgcacgtgtgtgtgtgtgtgaaggtgtctgtctgtcccagaggcagatgccatgagaatggggactcttgctcccattccctggatctgagcctggcatgcagctgtgctcaggtatgtgggtgagtaacgaaggcctggttcaggtcctggggggcacacatccaagttcccgtatgtctctggtcctccaaggaaggcccagctggtggacgtggggagaggcccctcactactgctgggctgcagggaaggggtcatcttccaagaccaccatcttcaatgataggcctcatggccttcttccatgtccaggagagaacctgggtcccctctgctgtctttaagttggttttctagatggactcaacctcggttgccttgtcctgctgctgggcttcccccacctatgatccctgtctcaataaacggcacctccttttgtttcccctggggtagaggcaaaaaccttcggtcatctttgcctgcatgcttttttcctgatacccctgtatctgctgaggcaggggctttcccatcactgtcactgcagcgtccccgagggccatagcagcgcctgagctccttgccaccccttcaacaccagtcaggttacagaatgaatgaggcgggcgcgacccccagccctggcctcaggctctttagctcacccctgcctccctcagccagagccacacagtgagccttggggagccccggcaccagggccagccagggatgtcaccggctgtccctgagtttgtgccttttgggaaatctttgtcaatcagttaaaagatgggggttgatgggagataacagtcaatgggcactcgttgtggccggatactgttccaagtgtttatgtgcattattcattttagtatctaaaataggtactattgtgtcttattttattgagggaaatggatgcacagaggcggaaagtaacttgccccatgtcacatagctccaagcggttgaatcaggatttcaagtctgggggccgactccacagctggtcccggtggcctctgcgcactgcgtcctcccggttctccgtgtgtctgagcaggtcgactgcatgcttaaggcgggcggcggggggtgcccttcttatattctcttcctgggctgccccttccttttctgtgcatcaccagggaacagcagggtcccttcgaggctttgtcctaatcatcaccccgccaaactttgctggtgcagagtgcaccctggcctctcccttccgggggtagtctgagaccagggacatgttctccaatcaaaggcaccaagtgaggctcccggggaggccacctgttcctagcccagggctcccagtgaccccgggggctggactcccacccatcctgcaggggccgcccgctctgcgcctttatcagcccccctgcggaacctgggggggaggcccagtgtctccacctaccgggcgtttcctgtaggacccccttgtttggacatgtggggcaaagccctagaactgatcactgggcacaggtggggagggggctcctcgaggacagcttggatcacaggtgtgtgccaattctgttttgtttttcttcctctttcctgccattgaacttcctactccttctagcatgtgagagacagcttcaacttactccctggcgacggctgaaaaacatgggctatttttagtttgtgtgagtctagtttatttgctcctggtagatttgcctctccctgtcttcgtgagtgtgtgtgtgtttgcacacacgtgtgttggtgtgtgtacacaagtgctgatggtgaaaacagtgacacacacacctgtgtaggcatgcacacacctgccttgatgtgtgacgacgtgatgatgtgtatgcagacacctgtgttgatgtgtgcctacatatgttgacacaggcacacatggtgtgtctgtacatgcaaatggacacacatgaacacacgtgtttatgcatgtccttgtgtgttgatgtgtctgcacatacatgttgatgtgtcccgctgtggttggcctttctggggccaggcccagcacctggggtttccaggaaacattccctgtcccttcccggaatggccggtacttgctgtgcctccgccgggagatgcaccctgattaactagaacgtggcgaagctcagccacctggaatcgccttaccctggcctttggtttctagcaaatgggatggaagtgagtccccatggagggcttgctccatgaaggtgtttttcctggatgagtcttggccccagtggcgatttgctgcaggcttgttggcactgtcattcgtgggtcctgcatggaggttccttagtgtccagagggtgattccatgtctgtggtcagcaaaagagaggcccctggggccataagccacaccccccaaggctgaacccagagagtttgtggtttaaatcttgggcctggaggattctgtggaggagagttcggtccaggccttctgctccaggaggcgctggcagctccgacaccacagacacattaattgtgcggagaattcaacgctagggctcagtcaaaaatcaaaaacgcaaaacaaaaagagaatcccttttatttacctcgtctccctccccctgtttggacatgaccttgagctctgctggcccacaagtggccaggctggagctgtcttgcaaagagaaacaaaaacaacacaaaaagctgcgttcttgactttgaagccttaaagggcccaggggctggctccctgtgggtgttgggggcgattttcctcccaaagcctgcgtgagatatggagacactccgcctgctcagaagctccccaggtcccgggttccaggaagcctcatggcccaaggcctggccgtcttaattttcttgttttctttccctccactccactgtttcttcctgttcactgattgcctgtgctggggagggggaaggaacgggaggggcctgaccttgttcacttcctggcattttgggtgaagttccttacaccttctctggaagcttctagaaggacccttgaggcgctttaaatctccattctctgggttttcctcccaccttcctggctgctctgtcttcttgcctgctgatgcctcctcatctccctggcctcctgcctcctgctggtggagctccaggcatcctttctgtgtgtcctcatccctcatccctggggtgggctcctccagccttgcgcctgaatggcatctctgtcctgaccactcccaaattggtatccctgggcccagacctttcccctgaaccccacccccgagtgtccaacagcagagtccgtatctcaactcggggtcaaaggcagctcacgctcgccccggctggctcctcatcaccctcggccacacctgtggctcccaccagcttcccactccatcatagcccccccatcttccagttgcccgggccaacatcttgcactcagccttgactctgttctctccacttccctcagagaacccgtcagaaagttttctagcttcatcatctaaatatacccagattccaactacttctcaccacgcccgaggcgccatcacctctggtccaaggcaccatcacctctcccccagattcctgcatccgcctcctcactggcctccctgtgctcatccttgctccccagtggggtttctcaataagcagccatgggagcccatcaagattgcacttagcacctcctcccctcaaagccctgacatggccagacccgtcccctaggagtcacagccaggtcctaacctggcccagggcctgtgccatccacccctgccacttttctggcgacgtccgcattcccttttcccttgcacaatggcctcctggccattcctcagccccatgggcccaatcgccttagctctcctgacacaagccctctcatctcccgtaggtctctgttcagctctcacttgctcacggagaccctcccctgattccgtttgtgcatcatgcaggttcccccttgtccccctgtgctgccagccctccttacccgctctgcttagacctgtcagccactgtagataccctggaacttccctgggtatcatgttgattgtttattgtctatttctccccatgagaatgtcggactgtgagggcagggacctttgtgttattcgttgccgtgacccaagcccctggaacgatgcctagcacataatcgcaggttctcaaatatttattgaaaggatgtttaaaagacaagggttgtttcacaggatggttcgtgaccagtggcaggttgtggtcctgtgcagggcaatggggcctactcctccacctgccgtggccgtcgccccagaccgagctgccaccgttgtttcccagtggatgctggagtgtcatcatggggctgtttgctctgctgatttataccacactgttgtcacttctccccatcaaagccaggatgctctttaaaacatgcaaattgggccgggcacagtggctcatgcctgtaatcccagcactttgggaggccgaagtgggtgggtcacctgaggtcaggagttcaagaccagcctggccaacatggtgaaacctcatctctactaaaaatacaaaaattagccaggcgtggtggcatgtgcctgtaattccagctactcgggaggttgaggcaggagaattgtttgaacccgggaggtggaggttgcagtgagccgagattgcaccattgcactccagcctgggtgacagagcgagactccgtctcccaaaaaaaaaaaaaaaaaaaacaaaactatgcaaactggatcatttcaagaagctgaataaaatcttcctgcatttggtatcaaagctgtgagcctcattttcgtgggccctgcccatctcaactcagcattctcaccccactgcaacctcacaggccttccttttcctccaacgtgtcacatgctgtcctgcctcagggcctttggaagtgcttttctttctgcctggaccgtctttttgtctccctggctcttatgcttggttcctcttttatgtttaaatgtaaccttttgaagcttaaatgtaaccttttgaagaagacaccccgtgattgcccaccccacccaatggacagttgccccccacgtccactgtctgtgccatctgtgtggtttttcagctggagggcaatggccccatctcggctcactgcaacctcctcctccccggttcaaacgactctccagccttgcctcttgagtagctgggattacaggcgtgcaccactatgcccagctaatttggtatttttagtagagatggggtctcaccatgttagccaggctggtctcgaactcctgacctcaggtgatccacctgtcttagcttcccaaagtgcttggattacaggcatgagccaccgcgcctggcttgcgccatctgtgttataaccacaccatgctattcccttctgagcccttaatagtctctgaaattatctcatccacttgtgtgagttccatgaggacagagactttatctgtctcgttcatggctgcattccatagttggagacccttgtccagggcagagaaccacctagcgtaggaccttgggctaaggcagagaggccccagtgggggtcctccgcagcgtggactttggaaccagactccctgagttcagcagtggctcttgcacttcctgtctctgtggctgtgggtgagttgcataaccctgccgggcgtgtttctccgggcctccctcctcgggctgtagcgaggggtaagggaggtcatacgccctggggaacaccccaaagcctgggtccctgggatgcatccacagattgtaggcctgagtcttaacacactccatctggatttcaatgacttctgcctggttccagtgctgggctgtttccctgtctgagctttggtggcttttgattgacccctttcctgccccagcatgaaggtggagtagccagaaggaagggatgcgggtgtataaagatgtcatcggggctgtctgtggatggtgggtaaagagacagcacctgtcatggtggaagggccacaggaagcgtggaggctgtttctggggccacctcctgcctccaggaggaagcagggatcctcctgttggcatcttggtcccatcaggtgtcttggatggggctggggctgggagtgtttctctccctgagcatttaagccaaggttcattatttagaatggaaccatttataggccgggcgccattattacattattcctaaagtgttaggattacaggtgtcatgcctgtaatcccggcactttaggaggctgaggtgggtggatcacttgaagtcaggagttcgagaccagcctggccaacatggtgaaaccccatctctactaaaaacacaaaaattagctgggcatggtggcacacacctgtagtcccagctacttggaaggctgaggcggaggactgcttgaactcgggaggtggaggttgcagtgagctgagatcgcgccactgcacttcagcctaggtgacagtgagactccatctcaaaaaaaaaaaaaaaaaaatggaatcctttatgtttcactttgttctcattagcaggactgtgcgaggctgagtcaggagaccgaggtccattctgcttgtgattttgctccgtgcaggaatgtggaggtgtggcccataagcatgtcattcatgcaaaatcatctacatgcattcaattagaaaaaaaaaggaaaacagcagtgaccctcataagtagacttggttagtgtcaatgtagggagtgagtttcttgtgaccctgctgttcttcctgggtcccgtgacagggcatctggacaggctgaatgcgattctagaattagattcctatgtttttatatgtacgccccagtctcacttgccagtggcttcctctgacgcttagaaaataaatggcatctgcaccacgtcagggagaaactgactgctttggaattcccagaagctcttggaagggaaccttcctgagggatattgaaggagaattaaagaattttctcagtggctggcacaacttatggagtcaatgctcattggctgtgattggctgagctgggatcacatgtgcatccttggaccaattgctgtggctcgagtaatggactgctgtgattggtcagccttgggtcgcctgcccatttggagccagggagggaagtagttcttgcccacagagactcaggtaggagtagggtggttcccaaaaggcaaaaaggaggggctgttgtcgggggaagaggcggccataggcagcaaaaatggggctgagcccctttgcccccaggtagcttcccacttcatccccacattgcctttcactgtctctggctgttacagtattagagattattttgtttggctgactattctgtttaccaaggcctcttgaggaggtagtagcttaccagctgtttattatgtatgtatttacttatatttacttacctatttattttgagacggagtttctctcttgttgcccaggctggagtgcaatggtgtgatctcggctcaccgcaacctttgcctcccaggttcaagcgattctctcacctcagcctcccaagtagctgggattacaggctgcgccactgtgcccagctaattttgtatttttagtagagacagggtttctccatgttggccaggctggtctcgaactcctgacctcaggtgatccgcccacctcgacctcccaaagtgctgggattacaggtgtgagccacgaagcccggcctatttatttatttttttgagacatggtctcagtctgtcgcccgggctggagtgcagtggcatgatcttggctcactgcaacctccgcctcccgggttcaagtgattctcctgcctcagcctcctgagtagttgggattacaggtgcccaccactacacccggctaatttttgtatttttagtagaggcgaggtttcaccaggttggccaggctggtctggaactcctgacctcaaatgatccacccaccttggcctcccaaagtgctgggattataagcatatgccacagtgcccaccctttattatttatttatttagattttttgagacagggtctcactctgtcacccaagctggagtgcagtggcatgattacggctcactgcagcttcaaccactcaggctcaatcgatcctcctaccttggcctcctgaataactgggactacaggtgtgcaccaccatgcccagctaatttttagattttttgtagagacaggggtcttgctatgttgcccaggctggtcttgaactcctggcctcaagcaatcctcccaccttggtcttccaaagtgctgggattacattcatgaatcactgtacctggcctaattgctctaacggggaaagtttcatcagctgtcagattgttagatctggactgacttgggttccgaagctcagttctatcttttatttttcctttggaaaccaaattctgtaggtagcagaggtttactcaaggccacggagatagttagcagccagtgctgggtggggccgactgtcccaggctagctggatggaggccaggagggcccgggcagcaagggtggaaggggcctgggtgggtgccggaggaagtcactaacgaatgttcttcaggcagaaagttcccagggtcccattgatacccctgcctgttcacatcctggcggcaggactgggatgaggcattttttaaaaagttggggagatatcagggctggtgtgccaaagttcaggctttgtccacccaaggtgagaggctgcaggggtgtgccgtgggcagagaggggatgaggtaggggtgggagggatgagctgcccagatgcacccgtggaggagttgatctggaatcctagccactgggtttaccctgcagtgtgtcccagcagcatcccaggcttctctccagcctttggcagggctttagcttccagcagctcaggtggaccccagcatatggactttgaaggcaggcagcccaggttcaaatcctggcttggccacttcccagttgggtgccttcaggcaagtgacttaccctctctgtgccttttttacttttctgtaaaatgaagttaataaaagtgtctcctacatagggcttttaaggtggcagaattggcacatgtcacacttcaaatagcagctcggcaagtgtcaagtaagggctggctgtttccaacatcttaaccggatagacacagacatagagagggatccatctgtcagcagtttgctgaaatgggaccatactatgcacgctttgctgcaccgtgggtttctcacgctgtcatcgcttgtccatgtcgtcctcagtcagctgggattttctggtgatgatcacgctctgattctctagatgcctggaaacgctccacggtgcggatgtaccacggctcgttctgccgttctcacgagggaggcatccagcttgtaaaataaagcagcccagtgtgttcttccaccaccacatcacccaaggttctattttcaaagattttattttgtaaaaacgggaagaaaagtacaagttgctgcatgtgcatcctctctctctcgttgctgagccttttgggtgcatcctaaggacaaggacgtccttctccatggccgtggaccacggccccactcaagaaggccacgaggatccacacctttaatctgacagtctgtgttcagattcccttacggccccaataacactttttgtcatagttgttcattaaaaaattttgaattggccgggcgtggtggctcacgcttgtaatcccagcactgtgggaggccgaggcgggtggatcacaaggtcaagagattgagaccatcctgggcagcatggtgaaaccctgtctctactaaaagtaaaaaaattagccaggcatggtggcgcacacctgtagtcccagctactcgggaggctgaggcaggagaatcgcttgaacccaggaggcggaggttgcagtgagccgagatcgtgccactgcactccagcctgggcgacagagtgagtctccgtctcagaaaaagaaaatttttttttgaatccaaggttgcatgctgtgtctggttgcctcatgtgtttttcctctttaatccagacctgttctccagcccttttctctttgctgggtctttcaggacactggcatctgtaaaggggccaggcgggtgcttttggcaggatggcccttgatttggatttgtctgattgctttctcaggagtgcacgtggtcttcccacagactcccacacaaaagcctcattgtgtgaatcagattggagcagagtgtttctgatgagccggggttgggtgcctggatcctcccccagctcccagcctggcagtcacagtgcaagtctgaacctcttgggttgaagaagcctgcaattcctcctggtcccttcctccacctgctttctaaaatttctggctctcattccttgcctttgagcggtgatgtgtccatccttcagcggccctcggccagcctctgcccaccccagtgccatcacatgggaagagatggcggatctgatccctgactcatcccctgggccaggaagattgtggaaaccctggggtctcagggctggtcgggtggaaacgggaggctggatggagtggcaggtgggggcttttcctgttttgcctctccctaactgggcctcccggcagccactagcccagatgcccaggcctcagagccttgtggaaattcttgtgccagatcatcttggccctgtctggcctcctggcaggcaggtggaggtcaaactggccttacttggccgagagcccattgcagccaggatcccttggcagctctgggaacagccaagtctcccctgtccttgggatttccttccactgtctgttcccaggctcctggactccacctgctgcaacccctcgctttgcactttccacccagagtcttggatttctgttttttgtgaaatttgctcactttgaggaaagtgtaagacatatgcaatcaaatatgtaactaagatgaacatgcatgcaatcaccccacgtgaagaagagggaaagctcatctgccccgaagcccctgcagaagacactgtgtttggtcccagcttgctttgctttttatagtatcactccctcatagccatccctaaacaccgggattagtttggtccggttttggacttaacttggatgcaggcatactctcagtatttttgtttggtttggtcttgctggtgttacttcatatggtatttgtgggatccacccacattgctgcgataagctgcactctattttcatggccatgtcatatcacagttcatgatgctaatcggaagaagctgagtatcacagttcatctgtctttttttttttttttttttttttttttttgagatggagtcttgctgtgtggccaggctagagtgcagtggcgcgatctcagctcactgcaacttctgccccccgggttcaagcaattctcctgcctcagcctcccaagtgcaccaccatgcccagctaatttttgtatttttagtagagatggggtttcactatgttggccaggatggtctcgacctcttgacctcatgatccgcctgcctcggcctcccaaagtgctgagattacaggcgtgagccaccacgcccggccagttcatctgttttaaccctgatgccggtgactgtgttcacttctgggttatgacacactcgtgtccctgcctgcaagggacatgtgcctgaatccctctagggcccgacagtcagagtagggggtctggtcatggcgtgcgtgtcttcacctgcatggagaagggccaagctcttgtccaaagtggttgcagcgtttccaatcctatcatttgtttttcatttaataatttattgagttcaaattcacataacatataattaatccttgtaaatcgaataattcagtgataccaccacttctacctagtttcaaaacatttccatccctcccaagtagaattgcccattctccactctttgcagctccccagcccctggcaatcactcattttctttctgtctctacagatgcacctgttacggacatttctttctttctttctttctttttttttgagacagagtcttgctctgtcgcccaggctggagtgcagtggtgcaatcttggctcactgcaacctccgcctcccgggttcaagcgattcttctgcctcagcctcccgagtagctgggactacaggcgcctgtcaccacacccggctaattttttttttttgtatttttagtagagacgggtttcaccatgttggccaggctagtctcaaactcctgacctcaggtcatccacctgccttggtcccaaagtgttgggattacaggcctgagccaccgtgcccggccctggacatttcttttttttttgaggcagagtcttgctgtgtcacccaggctggaatgcagtggcgtgatctcggctcactgcaacctccgcctcctgggttcaagcgattctcctgcctcagcctccccagtagctgggactacaggcgcccgccaccacgcccggctaattttttttttttttttttgtatttttaatatagacggggtttcacatgttggccaggctggtctcaaactcctgacctcaggtcaaacacctgcctcggtcccaaagtgttgggattacaggcctgagccaccgtgcccggccctgcacatttcttataaatgaaatcatgcaatgtgtggccttaagtgcctggctgcttccgcttagcgtcatgttttggggttcatccgtggtgtggcatgtggagtgctgctttcctttttgtagctgagcaggcctccacggtgcgggtgcactgcatgctgtttttccgcgcctctgtggatgggcgtctgggctggtggctgccgggagcggtgctgctgggagcgcgcatgttcgggaactcgcttggcttctgctttcagtggtctccttttatgccctccttcccctcacccctctcgctcttcagcccgccctgcccctgcgcccatcctctgtgtggctgcgtctgtaaacctgagtgtgtccttggaccttgtgcagtcctagattccggagcctgcaggtgtgggtccagatcccggccctgcctcctgctgctgtgtgaccatggacaggctcttcgagtctctggtctctggtgggtgtctgagtctgcatgggaggcagaggttgcagtgagccgagatcgtgccactgcactccagtctgggcaacagagcaggactctgtctcaaaaaaaaaaaaaaaagaaagaaagaaagaaaaaaatgtccataacaggtgcatgggccaaagaccatgtattcccgtacagttctggaggccggaagtctgagatcaggatgttggcagggctggcttctccggagacccctctcccggcctcatagacgccaccttctccctgtgtgcgcacatccccggtgactctctgcgggtcctaatctcctcttttaagggcgtcagtcagattggattagggctcaccccactgacctcatttaaacgtaatcaccgatttaaaggccctgccccccgcgccaatacagtcacattctgatgcaccgagggttagggctgcaacatgggaattttggggggacactgttcagctcataatagtagggtgcctataaaatgggctaaaaccatgccttcctataggattcagtgaggaccgagggagctagaggtggaagtgctttgagctgggggtggcacagggaggcccccttcatgtggcctgtcacgtctgaggagagggcggcttttccatgccatgcacggtaactcgtgtcaacattcctcgtgctgccctgtttaaaatctatccgtgttcctatgtgtgtatcaggcttattgcttccttctgctgcctggaccccctaattcatgttcatcctgttgtatttattcccttagcgacgggggtaccttggttatgtctgactcctgcctccacaaacagcaaatatgctggaccctgctgccttgtacttctccacaatttcctggggatgcgcaggagtggaattgctgtagggcagagggggagccattttcacccaacatgccttccagaagggccactgctgttcaccctcccagctctcacatcctctccagcacctgagacgatttagtcttcgagaatgtctggggtctcagtgagggtacgtggtgcagcattgttctcatgtgcttttctgaggtgtgaatttgagtcttcttcctttcataagtcctcaggtgggggtctgaggctcagagattttgagggccatgttggagggtcacagagcaaactggggctagaccccaccagcttgggcttggagggcctccagcttggatgtagggcccttcataaatccaggatgatctcatcttgggatccttaacttggtaacatctgtagagaccctatttttaaataaggccacattctgaggttctaggtgggcatgaatttggcaggggacatgcttcagaccagcactatgtgtgcaggtgcccaatcctcagatctgcagagctctgggttcaaatccaggtcccattacttgggtcctgtggaaactcacttttttcctaaaagccgatttccacctctgcacatggggccaatgttcttccatctcacaaaccagaagtcaaggccaggcgcagtggctcatgcctgtaatcccagcacttagcgaggcagaggtgggaggatcgcctgaggccaggagttcaagaccagcctgggtaacatagtaagacccccccccccatctccacagaaagtaagaaacaaaaacaaaacaaactggaggccaaggagagcagctgcggatggtcacgtgcctctccctgggtgtgcccagctcttacccagaaagccctggctggcattaaaaataaggaaggtaaaatagggatatgatcaaacaaattaaaagtgtacggaaaaagagtcagccttctggaaagatcacagcacgacactgctcccctggccccagctggtctttgctccagaggtgacttgggttaatagttccttgtttttccttcctgcaataaacatgtttgcgtccacagagggggacccacacccgtatccttcccgtccgtggcacacgtcccacaagggcacacggttcccatgcttttctgcctcttggctggggcacctaggtggatcttggcatctcttgttcccgcacagaacccatcctcatccgagccctgggcctctgtctcccagcaggctttgcaaataggaccttgtaaaggacagggctgtgtttcccaaaggccagagcagtgaagaggggcatgtggggtcgtggggcacacctctaggacattggggtccaggggtcctttccagtaagaccttgctgtgctggaaacacccctgtgtctttcagggctgttttcagagtcagggttgatgtgaccgccacgtttcctctgggcctgacagctgtaatctgtggcttgggagtgcagataagtgtgatgaagctgccagcaggcctgggcatctgtgtccttggtgggggcagggagaagagacagggactgggatgctggggccagggccagagccccgctgagatatgaggtccccttccaccctgggaggtgtgtggggaggagcttcctcgaacccctttagctgggacggatggaagaatgagcagctttgcatttccggcagcgtctccagctttcctggggctttctcggcttgtgttattgatgaactccagtgcgtgaggccattggagccttagaggcctgtttcccctggacaggtgactgcctgggccagaggcagcactggcatggtgccctcttgctcctggctgggagtgacacggggcgtggggcgctttgcattcatccccagctgtttgggcacatttacaaccctcattttacagatgggacaaaccccagtggagaatctgctccgggcagctgtttatgaaccacctgaatggggcacacaggactgtgggaggaggaggagggacccccagggctgaagtggcagggaaagctactcatcctttcggcccatgtttactgctcacaaattgtgggccaggtctcgtgccaagtgttggagctacagccgtggacaaaagagacctggtcctgctcacggcagctacgctttagcaggagggatgggccatggagaagcacatggaagaggtggggtggcgagaagagctaggaaggggacgaggcaggtgagctgacatggagccactgctgggaaggggactccttctgatgtgggagtcaggagggcctctcagaggaggggctctatgagctggggagcagctggcaaagagcacagcaggttcaaaggccggaggtgcgaaggagcctgctgtgttggaggaagagggagcaggccagtggggttgggagaagtgactggagggggtgaaaggggacaggcatgtgggggccttgcaggacacctggaggagttcagatttggttttcaattccatggagggttctgagcagggaagagccatgatctgactcagtattttttttttttttttttgagacagagtctttctctgtcgcccaggctggagtgcagtggcatggtatcagctcactgcaacctccgcctcccgagttcaagcaattctcttttttttttttttttgagacggagtcttgctctgttgcccaggcgggggagtgcagtggcgcaatctccgctcactgcaagctccgcctccctggttcatgccattctcctgcctcagcctcccgcgtagctgggactacaggcgcccgccaccacgcccggctaatttttttgtatttttagtagatacggggtttcaccgtgttagccagcatggtctcaatctcctgacctcgtgatccgcccacctcggcctcccaaagtgctgggattacaggcgtgagccaccgcgcccagcctcaagcaattttcttgcctcagccttctgagtagctgggattacacgtgcgtgccactacactcggctaatttttgtatttttcgtaaagatggtgtttcaccatgttgggcaggctggtcttgaacccctgacctcaggtgatccacctgccttggcctcccaaagggctgggattacaggtgtgagccaccacgcccagcctgactcagtcttgaagagctctctggctgctgtctggagaagggagtgtcgggggccaggctggaagcggggaggcagagaagatggtgatttgagccaggtgggggtagttttctaaatggaaagaagggaacatattcgagttttttttcagggagagtcaacaagataggtcagtggactggggtgcgagggaaggagaggaatcaagggtggttcctcaaggtttgaggagtttggtagatggtggagccattttccgagacgagaagatcgggggagggaggttgagagcagatggagtgtgggccttaactctggtcctaaaatcaagcgaggacaactcaacaacaagagtcagacaaccccattaaaacacggaccaagcacctgcaaagaagacatgcaggcagccaggcgcggtggctcacgcctgtaatcccagcactttgggaggccaaggtgggcggatcacaaggtcaggagttcgaggccagcctggccaagatggcgaaaccccgtctctactaaaaatacaaaaattagccgggtgtggtggcaggcgcctgtatgtaatcccagctactcaggaggctgaggcaggagaatcgtttgaacctgggaggtagaggttgcagtgagccaagactgtactccagcctgggcaacagagcaagactctgtcttaaaaaaaaaaaaaatgcagatagccaacggggacatggaagtgtgctcagcgacactcgctcatcgttagggaaatgagaatcagtgagacacactcatacccattaggatggtcacttgagaaaacagaaaatctcaaatattggtgaggatgcggagaaatcggggcccatgtgtgccgttggggtgagggtgcggagaaatcggggcccatgtgtgccgttggggtgagggtgcggagaaatcggggcccatgtgtgccgttggggtgagggtgcggagaaatcggggcccatgtgtgccgttggggtgagggtgcggagaaatcggggcccatgtgtgccgttggggtgagggtgcggagaaatcggggcccatgtgtgccgttggggtgagggtgcggagaaatcggggcccatgtgtgccgttggggtgagggtgcggagaaatcggggcccatgtgtgccgttggggtgagggtgcggagaaatcggggcccatgtgtgccgttggggtgagggtgcggagaaatcggggcccatgtgtgccgttgggaatgtaggatggtgcagctgctgtgtggaggcccccccaaaatttaacatagaattaccatatggtggggcaaccccacttctgggtatcaaagaaatggaagtgggaacttgaagaggaatctggccaccgcgttcattgcagcgctgttcacgatggcccaacggtgggagcaacccgagtgtccgctgatgggtggtgggtaagaagctggggcccatccacacgttggaataggattcagcctggaaaaggaaggacgtttggacgcacgctgcgacatgcacgggccttgaggaagttatgcgagtgaaataagccacaacaggacaaataccgtacgattccatttgcatgagctccctagagtagccagatccacagagacagaaaagagaatggtgggtgccaggggctgggggagagggggtgcagagctctttttcagtgggtacagggtttcacttttgcaagatgaaagagttctttagatggatgttgctgataattgcacaacattgcaaatgtccttaatgccactgaactgtacacttaaaaatggctaagttgggctgggcgtgtagtggctcatgcctgtaatcccagtacttttggagcccaaggtgggtggatcacgaggtcaggagttcaagaccagcctggccaagatggtgaaaccccgtctctactaaaaatacaaaaattagcctggcatggtggcaggcgcctgtaatcccagctacttaggaggctgaggcagagaatttcttgaacctgggaggcagaggttgcagtgagctgagatcacaccactgcactccagcctgggtgacagaccgagactccatctcaaaaaaaaaaaaaaaaaaggctaagttggtaaattttatgtttaccccaattaaaattaaaaactgtggcagggtttaacctgaagggagaaatggtaccggcccctcctgcttgaatgggttgggctgttggtttgtagatggtagaccagacggcccagcctgttggccagggtcaaattccaacatgctgagcctgttgcagaagacttagcctttgaagcaggcagccctgagcttctgattcctccaggcccaaaccaccgttgccctattttacaagaccttggctggcttcatgacgtgttcttgaactggagccagtggtgagctcagggaggctcctgtaacaatagttccctgaggcatgtttatagccgggtgccctcttcacaacagacacatgtcctgggtcatctcattctctctgcactgccacggggaggatggggaggcagtcacgtctccatgtggcatatcaggggaccggggtgggaggggctgactgagccgaggccagaactaggtctgcgccctggccctctccctaatggccagatccggcctcacccgtgaagctggcctggcaggggatggcccttcctgaatttctgtgtggtctaggctggggttggcatgcttttctgtacagagacagatagtcaatatgctcagctctgcaggctgcacgggttgtgtctcagctactcagccctgctgctgtgatgctgaggctgccattgacgacacagaaataagtcgaggtggccgctgtgggccagtgccactgcatttatgaacaccaaaatgtgaatttcatataactttcacatgtcatgaaatggcatttttctttcaattgtttgtttatttatttttaacatattttttggagacagggtctcactgtgtcacccaggctggggggcaggggcaccatcatggctcactgcagcctagacctcctgggctcgttatcctcccaccttactctcctgagtagctgggacaacaggcatgtgccaccacgcctggctcattttttttttttataggttggtgggtgggtgtgtagggggggtcctcactatgttgcccaggctcgtcttgaactcctggcctcaagtgaccctcccaccttggtctcccaaagtgttgggattacaggcgtgcagcactgcacccagctggctgacttttcttttcttttcttttcttttcttttcttttcttttcttttcttttcttttcttttctttctttttctttcctttcttttcttttttctcccttccttccttccttccttccttccttcctttctttctttctttccttctttctttcttttctttcttccctttcttcccctctttcccttctttccatttgaaaatgcaaaatgattgttagcttgtggggtgagtagaaataggcatcaggctggatttggtccacaggctgtagcttgttgaaacctttctaagaacagagaagaataatgtttttgcttgaaaacagccagctttattgaggttggggtgtttgaaagaaggcatattcactgtctgacttgtgtggaaacagtggggctgggatcagccctggtagaaattgtttttgtccaaaaaagcaagtagaggtgggctgcctggagttcccgtcatgcaggtgcaactggggagcaggatgaggccctgatttggcggggaaggagaggttgtgcttgattcatctctgtgcccggggaccaggactgtatgcaccttccagcattctcttcgctggtctgagctccttacttgccacgcctgtgctgggcctttaccaaggcagtgcccagcctttggtcagacccaaggtcaagactctgtgccaacattgggtttgtgctcttgggcaagcgagtggtttaatctccctgtacttcactttcttcatcagtaaaatggagacaaattattagctttattctattttattttatttcattttattttgagacagggtcttgctctgtcacccaggctggagtacagtggcacgatcatggctcactgcagcctctatctcctgggctcaagggatcctcctgcctcagccttccacgtacctgggtctacaggcatacactaccacatttggcaaatttttaaacattttttgtagagatggggctcactgtgttgcgcaggctggtctcgaactcctgggctccagtgatcctcctgccccagcctcccaaagtgctgggattacaggtgtgagccaccacacccagcctaattgttaggtttaaataaatgaaagcattgctttaaatgggatgctttgagctggaaacaacataaaacttgcctccagtggcttctgtaatgcagatgtttactgttgtgcttcctgagagatgggaggtggtggtttccagatgcgttcagcagttcagaacatcgtgctctgcctcagtagattttgcccagtggctctccgaggtggctgtactgatggacattctggccagtgacacatgcgcgagacctctggtgcttgccagtgcgtgccagtgaatacgtgtgatgtccctgagctcttcctactgggtacctgagtcacttgtgaattgcgtgtcctcttccccacttcctgctcagtccacgagggcaggaatcctgttggattaactttacccctgtagcactgatcgcccgctttggatgctcaggcagggttgaaatgaatgaatgactgagtgaatgaatgaatgaatgaatgccacgttctcatcgtgtgttactataggacagggattgcaaactgtgcaggaacatacatgggggaagggccctggcatgaggtgatagggagtggtggggcccgttgcaagctggagggcacaccccaactgtgaagcggctcctgctttgctccagcgggctgggccacgtggcatgcaggcccagagctggacatcacccaggttcccaaaagaagccagaaggcaggaatttacctgctggtttaagatactgtcaacagattcaaatattttgaaatatgtgattcaaaacccatctactggcaaaatctggcccatgggcccagtttgtggcatctgtttcaggaagagacaagacctagtttgtgttttttttagtgggggcggggaggatgcggtgtataagaaattttgagtgaattaaaaaaaatttatgaaaaatttcaagggctgggtgcagtgtctcacgttcgtaatccagctctttgggaggttgaagcgggagaattggtttaggccaggagtttcagaccagcctgggcaacatagcgagacccctacaaaaaataaaatctacaaaaaatgaaaaaattagctgagtatggtgacagaagctgctgtggtcccagctacaaggaggctgaggcaggaagatggtttgagcccaggagttcaaggctacagtgagctcggactgcaccagtgcactccagccagggtgacagagcaagaccctgtctcttaaaaaaaaaaaattcaaacatacataaaaatagaccggtgcgatggtcacgggccctgtaacttgctgaggagataccaagtcttgccttctgcacgtgcctccatacactttccccttttccacattgttctggggctcatgtcagacattgcctcatccgtcagtgtctctagtatagccacggcacttcatggtgcattggagtctggacgctggagggctcactaaaacacggatcaccaggccccagcccctgagtgtctgagtcggcagacctggcatggagcctgggaatctgcttttttatcgagttcccaagtgatgctgatgttgctggtttggagaccgccttttttttgggggggtggacagggtcttgctctgttgtgcagcctggagtgtagtggtgcaatcacagctcactgcagcctcgaccttctgggcccaagcaatcctcctgcctcagcctcccaagtagctgggactacaagtacatgccaccatgcctggctattgtaaaaaaattttgttctagagatgagatcttgctatgttgcccagactgttgaactcctgggctcaagtgatcctcctatctttgccttccaaagtgctgggattacaggcgtgagccaccacgctcagccagggaccacacttcaagaaccactgcccgaacaggtacctagtaaacaccaccacaatgataaagcaaaagaaaatccccaagcatgaccacagtactatgctcacaccaaaagtcgttctgtagggcagtaatgaggtttgaaaggtggacctgctccagtgttcagaaattgcccgagacctcatgcctggagtgggaggctctgcccggaccctcagccccttgttggttgggccccttttgggggcctcaggggctgtggctcagggaccagcacaagggactggcaccggtgacgtctgtttctggtcccggcccagcctggaagtttctgggaacctgaggaccctggagtggttctgacctctggctgcctccctgtccccccgtgtgtcccgtgggagctcactggcttgggaggcctgcttttgacaagacccctggctctggccttgcagggcccctcaggcccctgctggctgttgcctgcattcttcctcccatgtggctgaggatgaagctggcttagcccttttcagggcgggcctcggtttgtgtttctggacaccctcgtgtcactggcaggaggtctcgggagtcacgaggaggcagtgcaggcagcacgggcacgtccgcagcccagagggcttgcttttcagatcccagctgcaagaacaaagtgcccccgctgagctgcttgaaagcagctgcgggagagtgtcctgctccgcagatcattccccggcccgggtttctcttaggacagctcaggccaaaacacagcagggttcaaaagcgggggacgtgtgagcatcctgggcgtggagcttcccattaaagaggacactgggcttcctgccgggtccaccttgtttctagcgaagcctgccttctggccaagatagggctgtggggagaggaaggggtgcacggggcaaatgtcacactccctggtgcaggggtgttccctggggtggagggggctgtgtgggaggatgctctggggtctctgggtgggtgtggcaggctgaacaatgtccccaaaaggtgctggcgtcctgatccccaggacctgtgaatatgtgaccttcctcagcaaaagtggctttgtaggcgtgattaagttaaggatcttacaccaggcatgatggctcacacctgtaatcccagcactttgggaggccaaggtgggagatttttgagcccaggagttgaagaccagcttgggcaacatagtgagaccccatctctataaaaaatttaaaaattagccaggcgtggtggtgtatgcttgtggtcccagttatgtgggaggctgaggaaggaggattgcttcagcccgggagttcgaggctgcagtaagccgtgatcacaccactgcattccagcctggcaacagagtgagaccctgtctcaaaaaaaaaaaaaaagttaaggatcttgagatgggagatgaacttggattgtcccaggggccacaatgctttcacaaggatctttgacagagggaggcaggagggtcagagtaggagatgtgacctcagaagcaggggttggagtgataaggggacaggagccaaggaatgcggaggcctcttagaagctgggaaacggaaggcaatggattccccctgagctccagaaggaagcaccctgcctgcaccgtgactttcatcccatctcaggggcagtcccagtttggacttctccccccgagaactgtaagataataactttgtattgatctgagccagtgttaattgttaattcttacagcagcagtgggaagctaatacaatgaaaatgcttccattaaagccaggtcattaacatgatagtataatctggtttgggtgggcttaaataaaatatttaaacttaaaataatgttgtgttaatatgtgaacttttgaaattgtcagtgtttttacaaaaagaccttaatgttctggaaaaagtataaatatggggtgcacattttttccttttgcttgaagctgtaatatgattcggtgaggcactgatttggccctccctgtattgccgcgacagagcctgcttgttttaaaataactttctgttttagaacagtttttttttttttgagaccaagtctcactctgtcgcccaggctggagtgcagtggcacaatctcggctcactagaacctctgccttccaggttcaagtgattctccttcctcagcctcccaagtagctgggaccacaggtgcctgacaccacacctggctaatttttgtacttttagtagagtcgggatttcactatgttggccaggctagtctccaactcctgacctcaagtgatccacctgccttggcctcccaaagtgctaggattccacaggtgtgagccaccgcgcccggcctagaacagttcaactttcagaaaaattgggaagatagtgctgagttcccacatatcccacagccagtgtcccctgctattaacatcttaaaggaatgggatacatttgttgctatgaatgaaccagtgttgatacatcagtaataactaacatccagacaggattcacgtttccttcgtttctccttcgtatcattttctgtcccaggacccaatccagggccccacattgcgtttgtccctcacgttgccttaggatcctctggtctctgtgggttctcagactttcctggctttggatgacctggattgcgttcctgagcaccggctaggaattttgcaggacgcccctctgctgggatttgtctgttgttcttctattgattaggccctagttccgggttttggaaggaagatcgcagtgacgaagggctgttcccagcacattatgtcaacatgacctgtccctgctgcatgggtcctattctttattccttgttacaggtaaagaaacaggcacaggaagttgtatcaggcgcctgctggtaggtggaggatgggcagggggttgaggggacagggagtggacagagcccctttgctggtaaagaggggaccccagacctctcacgtctctccagggcccctggtggtctcctggctggcctcgctgctctgcttcagaaatcagatttgacggggcactgggaccctgattgggccttggtggctgtaggtgctctcttattagcgacaccacttgagggtgtattgaacatctgaagagtacccaaccctggatcaataattttttgctttaggccaggcgcagtggctcacgtctgtaatcccagcactttgggaggccaaggtgggccgatcacctgaggtcaggagttggagacctcagcctggccgacatggtaaaaccccatttctgtcaaaaatacaaaaatcagtccaggcgcggtggctcatgcctgtaatcctagcactttgggaggccgaggcaggcagatcacctgaggtcaggagtttgagaccagcctggccaatttggcaaaaccccgtctctacttaaaaaaatacaaaaattagccaggtgtggtggcgggcatctgtaatcccagctacttggggggctgaggcaggagaattgcttgaacccgggaggcagaggttgcagtgagccgagatcgcgccactgcactccagcctgggtgacagagcaaaactccgtctaaaaaaaaaaaaaaatcagctgggcatggtggcgtatgcctgtagtcccagctattctggaggctgaggcaggagaattgcttgaacctgggaggtggaggttgcagtgagctgagatcacaccactgcactccagcctgggcgacagagtgagactctgtctgaaaaaagaaaaaattttttttgctttaatttttttctttttaaaaattgaagtatcaaatgcattaagaaaagtgcacaatttcggttagaggttgatggattttcacctaggtatgcacgcttgtaatgaccccctataccaagtgtaaacgcctcccccgcacccctccctgtcagtatccacccctgaggtcctgctgcccccacctctatccccatggattggttttgccattccccgggacgtcacttatatggactcatgcacgtggtccctgtgtgtgatttaccctgtcattgtgtgtctcaattggtcattcccttttgtctctgggtagcattccatggtatgagtgtgtccccatttgtcatgcattcacttgcttgtagacatttgtgttgtttccagttttgggctgttatgggtacggctgctatgagcatttgtggataatctttgtgtgggtgcatgctttcatttttctgggacaaatactgggggtgggattgctatattgtagggtgaacgtccagctttggtagaaaaagtatattccacagtgactgcactaatgcacttccaccagcaatgtgtgagcactctggctgctccacatcctcaccagcacttgttattgtcagtctttttcattgtagccattctggtgtatggcatgggatctcactgtgagtccagtggacatttctctgatgactaagccacccagggctggtgggtggctccaggaagtcacaggaatcctttctcctatctcctattctgctccgcccttcttcatgtgtggctttcattcttaagggtgcctcatgatccaagatggctgctctagctccatccattgtgactgaattccgggcagcaggaagggggacttatcaacaactacatagaaatttcagatattgataatgtcagggagataaaacagggtgatgaatataatgtgatgggggaagggctgctttaggaagaatggtattttcatccattttgttcactattgaagtgcccaggcctagagcagagcctgccatacagtggggctcaatagagatggttaagggattgaaaattgctcagggaaggtctcacggagaaagtgactttagacttgagaagtgaggggctcacttttgtgggcatcaggggaaagattgcccctggaggagcaaagagtcagtgcaaaggccctgtggcagaaacttgcctggtggctcaggagcacagcaaggccagtgtggctggagcagagtgagcgaggcagataggaatgggggaggagactggagtgactatagggagctgggttgtgcaagacctcataggtcactgtcaggaatttagattctattctgagataaatagggaggcatgggggaggtttgagcagaatgacatgctctgactttaatcttaaaaggataacttggattctgtggggagaacggggcggggggcaagagcagaggcaggaaaacagcggggaaactacggcacccatccatacaagccaggatgggggccaggatggtgttggagagaagtggatggatttgaggcatgctttaaagcgagagcagcccagccttgctgatggagggtgctaggtgggaggaaaatggaggactcaggaatgactcaacctcttcgcttaagcaacttacaagcgtgggtttcttgtaaaaaccttttattttagtcttcttaccttagtcctttaaaaatcaaaagaagttggaacatgagccaagggtgtggtgttcccaagtcccagattggattagcctgtgtcgtagttgttcctgcatcttaaggccccatggagctggggatgcctggagccctgggattgagagtgtagtcagccactgactgctggtccagagtgggcagggcctggccttgtcccagaactaggcttcgtctgggcaaattggcttcttggctcatttggtcagaggtgtgtttcttggaagcctgttttctcttctcataggaggaggaattagaccttgcaattcagtggccaggtcaagttaatgattcatttgtgaagctcccgtgcaaggagcccagcggggatggcctaggagagaagcgtgagggcacaggcctagacgtggatacggagcctggggctctgtctctccctgctcctgtgaccttggtcaggcatttggctttggagcctcagtgtctgcttcgatgagatgagccattgagaatttaagaggtgaagtaggtggaagtgtttcgctacctgaacagggccgggcagatcgtccagacgattctgctcccctggtgtctgagggcaggggcgtctcagggcaggggccccatcgtgttcatccctgtgtctttaaattcctagcatagcatctagcatggggcggatgattgtacagggcatgaactgcaatcccaatgaggtcagagcagcctcactgtaggccgaggtcgttccagtgggcttcatggaggaggtggcacctgggcgagcggggtgttaggtttggaggtcaggggcctctccaggtgcaggggagagtgctgtgggtggtaggaagagaatgctaaaaattaatgtctatgaaatcttcatctcatccatcacacatttaccgagttgttgccccggcctaaacaggcggtactctctgtgtatttaaaaaaaaaaaaatcccttcttaagtatgagctgtttaaaacacacaaaggaggactagcgttaccacccgctagacatttccacgttgattatatggtttcaggtctcacttttgctcattcacccagaaaatatttacagagctcctgcaaggtgccaagagctgtcccaggccctgaggacagacacatcgccaaacaaagcagctgaggatcttgcccttgtgggtttatggccaggcaggtgatacagatggacagcaataaacctgataagctaattataccgtgtgctcgaaggccacaagcagcatggaaacaacacggcaggtcgggaggtcaggagttttaggggcaggttggatgagccttctgagaagggggcatgtaagcagagattcgaaggggtgagggatttgaccacgtgtttaggaggaagcagtgggtgcaaaggccctggggcaggagcgtggcctcttggacaggatagcaaggaggctgtggggctgggctgagtaacagacagtggttgtggaatgagaccaccgcttctgctgttgtccttcccagcttctccccagcctccccttttccctagtttataagacaggagaaaagggagaaagcaaaaagatggaaagaaacagaagtaagataaatagctagacgaccttggcgccaccacctggccctggtggttaaaataataataataataataatattaacccctgaccaaaactactggtgttatctgtaaattccagacgttgtatgagaaagcactgtaaaactttttgttctgttagctgatgtatgtagcccccagtcacgttcctcacacttactcgatctattatgaccctttcacatggaccccttagagttgtaagcccttaaaagggctaggaatttctttttcggggagctcggctcttaagacgcgagtctgccgatgctcccggccgaataaaaacctcttccttctttaatccggtgtctgaggagttttgtctgtgacttgtcctgctacagttggatgtggggccagagagaacacaggggccagaccaggcagaggggcttgtaggccaatgttcggacggtggctcgtatgttattttcaagaaataacatgttcacaatgacagttaaagctttccccacatccccagcccccagccctctcctgagattgtttgcaggtatcatttccctgaatgtttttctacatttccacatgggtttgtcttcagaaagaatatagagtattatttcatgtgtttggaaaattcacatcaagaggcccatgtcaattgtttctttctttagccttttcttcactcaagatttttttttctttaaaaataaaaattgaggccaggtgcagtggctgacacctataatcccagcactttgggaggctgaagcgagtggatctcttgagctcaggagttcaagaccagcctgggcaacatagtgagaccttgtctctactaaaagcaaaaaaataaaaaaataaaaaaatagccgggcgtggtggtatgtgccttgtagtcccagctactcaggaggctgaggtgagaggattgcttgatctggggagatcgggaagtcaaggctttccagcctgggcaactgagcgagactctgtttcaaaataaataaataataaaaattatgtatatttaaggcatccaaatgctgttttgctatatacacacacatagtgaaatgattactacagttaagcagattaacatatgtatctcctcatatagtcacctctttttttttttttttttttgagacagggtctcgctctgtcacccaggctagagtgcagtggggtgatcacggttcactgcagccttgaactctcaggctcaagtgatcctcccacttaagcctcctgagtagctgggaccataggtgcgcgccactgtgcctggctaatttttgtattttttatagagatgggctccctatgttgcccaggttgttctcaaactcctgacctcaagcgatcctcccacctcggcctcccaaagtgctgggattacaggcatgagtcccggccacctctttgtttttagtggtgagagcacctgaaatctgcttccagtatacagtacagtattaatcacagtcctcgtgttgtgcatgcaacctccagaccacccatcccacatgactgcagctttgcgccctgtgacctgcatctccccacctccccagcctccgccccgtaagcaccattcaactctctgtgtattcaatgtcttcagattcctcacctctaaaagacaaatctggaagtatttgtcctgcagtatttgtccttctgtcaagattctgcctttgagatatctgcaagtcgatggcgtttactcactgtgcagccaccgtgtgcagaagcccagcttatctttgactgagaacctggctgggctctctgttgtttttcaaggcagggtctcgctctgtcacccaggttggagtgcaatggtgtgatctcggctcactgcaacctccgcctcctgggctcaagcgattctcccacctcagcctcccgagtagctgggactacaggtgcatgtcaccgtgcttgggtaatttttgtagttttagtagagacggggttgcaccatgttggcccggctggtctggaactcctgacctcaagtgatccacccgcctcggcctcccaaagtgttgggatcacaggcgtgagcccccgtgcctggccctctgttctttttttgaggtctgacaattcttctggcgctttcttgcacacttaggagaatctttctagggcagagttttcaaactgtcagatgtgatcagattgtgggttgtgaaataagtggggtgggtggggatcagctttttttttttttttttttttttgagatggagtctcgctctgttgcccaggctggagtgcagtggcgcaattttggctcgctgcaacctccgcctcctggattcaagcgattctcctgcctcagccacccgagtagctgggactacaggcatctgccaccacgcctggctaatttttttgtattgttagtagagacagggtttcactgtgttggccaggatgatctcgatctcctgacctcatgatttgcccgccccagcctcccaaagtgctgggattacaggcgtgagccactgcacctggcctgggatcagcattttaaaaacagaatggaataggatagaataccagaggggcgaataatggagtcataacgtaagttgcatcatgctgggaaggtgcgtattccctcatgaggcttctggtgggtgtgcaggtcgtggccctagcctggcaggagctgggaagctggtgctctgcaccatgtctgaacagggaacccacagaccatggggctttgctcacacctgacccgattagaaactgtcccgactccccagtggcctgacccccgctgtgcacagcggtcctgtttccaaacatctttgcctgtagttgttttcttggatgtcctaatttttgctcatctactgggaaatgatatctcattttaatttggagttaatctttctttttgaaattgtgattaagatccagttaacgtaaaattcaccaaaaccatttacaaatgtacagtttagtggcatttagtgcgttcgcaaggttgcgcaatcgttaccacgatctagttccaaagcattctcattaccgtgtacccattaagcagtcacccaccattcctttctgccccagcccctggcaaccaccaatctgctgtctctggatttgcctattctgggcatttcgtaagtgtggtcagacactaagtgtggccttttgactggcttctttcactccatgtcaggtttttgaggtttgtccatgtggtggcatgtgtcagtgttgcattcctttctttttctttctttctttctcttttttttttttttttgagatgaaatctcggtctgttacccaggctggagtgcagcggcgcgatctcggctctcactgcaacctccgcctcccgggttcaagcgattctcctgcctcagcctcccgagtagctgggaatacagttggctgccaccatgcccagctaatttttgtatatattttttttttaatagaggcggggtttcaccatgttggccaggctggtcttgaactcctgacctcaggtgatccacttgcctcagcctcccaaagtgctgggattacagatgtgagccaccacacctggccgcattcctttctttaaaattattttttttggctctttaaatacatttcttttttacgcagtagtaaagagccaacccatgcattcctttttctaagtgagtcagatgccgctgtctggacagaccacactgcgttcagccattcatctgttgacggactcttgggtcgttttcgcccattgcgaacagtgctgctgtgcacattcttgtacgtgttgttttttacacccattttcagttcttcttgggtctgttctggggagtggagttgcagggtcatacggtaactttgcgtttgatcgtttgaggaacggtcagactggtttccacagtggctgttccacgttacacttctgccggcaatgcataaaggttccagttcccacacccttgccaacacttgctattttccatgaaaaaaaattctagccatcctggtgggtgagaagtggtggcccattgtgactttgatttgcatttccctgatgatgtcaagcaccttttcatgagcttgttggctatttgtgtattttctttggagcaaggtcttttcaagtcgtttgcccatttgcagttaatcttttatttttaaaatttcacattatagtttcaaaagggttttagtgaagtgtagcacacgtatagaaaagcccacatataaagggaataacaccatacatttttcagtgaacatagtcccgggtaaccagcaaccagatcaggaaacagaattttcacccgcttatcccccaacctcccaggtgacccctgttctggtttctattgatatgttagtcttgcctgttttagaacgtcacataaatgggattatatgtgtatgcacatatctgccttttgatcaacatgattgcattatattttaaaggtagtaatagtattcatttttaaatttttttttacttaaaatattctggagattgttccatagcggtaaatatagcatgtcatgggtggtggtgttgctgttgtttttttcagacagggtcttgctttgtggcccagactggagtgcaggcacatgatcacggctcactgcagccttgaactcctgggctcaagtgatcctcccagctcagtctcctgagtagctgggaccacaggtgtgcgccaccatgcccggctaatattttttgtatttttagtagagacacggtttcaccatgttgcccaggctggtcttgaactcctggcttcaagaaattctcctggcttggcctcccaaagtccttggattacaggcgtgagccaccatgcctggcctaatttgatgagttgcatcagatgtatacacttcacctatatggcaaccaaaatcaagatagctgggccagttcacgttagtcccctccctccatcccggtccccggcagccactggtctggcttctctctctagagtattccctttccccgatgtcgcggaaatggtgttgtgtagtatgattcttcttttcttttttttgcttggggtagtgcttctgaggctcacctgtgttgtggtgttcatccatggttggttctttttgattgccaggtagcattccattgtgtggatatgtggcaattcatttatctgttgatggatatttgagttgtttccaactatcaaatatggatatatcattccatatttgtttttggtgaacattcaggcaagtcacgctcttaaaggcttcccagcctttgcacaggctgtgtcctctgccaggcactcctccaccatcttcttttcctagcaaagcccagcttattttaaaattcccagctcagatgtcccctcctccaggcagccttcctgggctcaaagggtctatttcgccagatgggagggagtggcgtccaacaagggctcaccttggcattctatcccaactctgtgttccagggccatggtctttgaccttgggggtggtggggacagaatcatagaatcagccatgttaggcaaaaggccacagtgtccccaccactgttatctaatcagctgcctggtctagtgtggtggaaaaaagtcatcctgctgatcaaaagcagggcaaagtccatcccttaacccgggtggaggtggggcagaggaggaagggtcacttaatgactgcagggctgaccctctggtgcccggggtcttcagaccttgttctaagcactttacctccatggactcattcaaacctcacagcagcccatgaggcgacactctccttacgcccattgtatggttgaggaaactgagactcggagaaggtcagtgacccatccctgatcacccagttggacagggctgcgctgggtctctgaagattccctttgggcagtgctgaatgaatgggctgaaacccagggcctgaaagcctcttctttggggagagagagagagagagagagattgagacatggacacgcggccggatcccatgacttcttggtttagccctgattcatcttcagaaccaggccaagcggccaggggaggaggaaagcatggtgagattccaaaggagaaaggtatctccagcccagcagcctctgctgagaaaccaggtgggagagggaggctgcaaagggaaattgaggctgcgtgtgtgtgtgtgcgcgtgtgtgtgcgtgtgtgtgtgtgtgtgtgtgtgagatggagtctcgttctgttgcccaggctggagtgcagtggtgtgatcacagattgctgcaacctctgcttcctgggctcaagtcatcctcccacctcagcctcccaagcggctgggactataggcacctgccaccacggatggctgatttttctattttttgtagagatggagtctccatgctcaggctggtcttgaactcctgtgctcaagtgatctgcctgcctcggcccctcaaagtgctgggattacaggtgtgagccaccgcactgggccttgttttgcttttttaaaaaagcagctttattaaggtgtgattgatataaaacaatggcacatatttaatatatgcagtttgatgggctggtgtgtgcacaccgggaaacccgcccctgagatccaggtgctgaacatacctgtcacctctacggttccctcctgccccccactgttttctgtggtgagaacatatagttcgtgctctactccccgaacacattttccagggttctgggttttgatgctgtgttttctatggggggagcaccagcagctggatgtgtcccccaggctggtgaaggggtctggcctgtggtgagcagggtccccagggctgcagggtctgtcccagacagagggacctgcagtgcatgggctttgaggctgggtgaaggccaggactgaaggaagggctgggcgatcggggcctgagagctgggaggggctggagctggtgcctgtgggctgtggtcgcatggggtggtgggagccgccatggggtggggagggcgttaccgagggggcaggactgctctttgatccagctcacataccacctcccccaggaagacctcccggactcctcagtgccctccaactattggttgaatctctctccagccttagttgtgcctcagtttcctaatctgtaacatgggggtaataatagtggaggtggctgcctcaaagagtaatggtgctgttcagaggatgagaacacagtgaacagcatcaccaggctcatggcgcaccccggaaatgctcgcttctgttacctcattaatattcagtttatgcgccttcgtttgcacctatgggctgctcagaccataaggtgatccttctggtgctggcagctgggtaggaagacacgtttatcaataaacaattatggcacttgaaggccagtctctgatctcctgatttttccaagagaactctgaaatccagattttacattacatcttccagtttcttgacaaagaattcagcttcttcattgacacgccacgtaggtcaaactagacacagttgtagctacagtgtcactagctccttcgtacagatgagaaacttgaggttcacaggggctgacttgcccaagtggccccgtggagtgcgacccagggtctggctgcctccaaatctgctccttccgggggacatggggctggccctgactggccagctcagctgtctgcctcctgtagagcctctgcctgttggttctggctgtccttgtcttagaaggccatgttcaaaagagggtggaaggtgacgcagctgcctggctttgcgacatcagctctagtctaatgggctgggtcactcctgccgggctctgacgtggtgtgggcactgaggggcccgagatatgtcccggctgggttgagggtgggggtcaggtggactaggggggacctccctgtgacactggggcagcgaattatagatctagaggaggaaagctggcagaggagtccaagtggaccccaggcgtgtttcctatagtccctttaagaaaaccatgtttttgcaacatttttaaatcaggagatttcatatacatttctttatttctggttttcatggaaaacttctgtgttctcatcttccgactggctcactcagccacacagggaggctctctcccagcgtctccctaccacagggcctttgcacaggctgtggttgctgtggaatgtcccctgcgcctcaccttctagatttgtgagctcccttcctcactgccttctgttttgattttgggtctaggttgtgtttgtgtgtgttctttttctttctttcttttcttttttttttttttatgagacagggtgttgcttggacacccaggctggagtacaaatggcgccattacagctcactgcagcctcgacctccttggctcaagtgaccctcccatctcagcctcccaagtagctgggactacaggtgtgcagcaccatgcccagctactttttaaaaaattattttttataggccaggcacagtggctcatgcctgtaatcctggcactttgggaggccaaggcagacggatcacttgaggtcaggagaccagcctggccaacgtggtgaaaccccacttctactaaaacaaaaacaaaaactaaaacaaaaattaaccaggtatggtggtgggtgcctgtagtcccagctactcgggaggctgagggaggagaactgcttgaacccggaatatggaggtttcggtgagccgagatcgcgccactgcagtccaacctgggccacagagcaagactccctctcaaaaaaataaaataaaataaaaatacaaaaattagccaggcgtgatggtgggggcctgtagtcccagctactcaggaggctaaggcaggagaatcgcttgaacacagaagcagaggttgcagttagccaagatcatgccactgcactccagcctgggcaacagagtgagactccatctcaaaaaataaataaataaataaaattattctttatagagacagggtcttgctatgttgcccaggctggtctcaaactcttgggctctggtgatcctcctacctcggcctcccaaagttctgggattacaggcatgagccatggtgcctggcctatatttcacttacgtgatgactgtctcaaatcccagtctctccccaatccctgctgtgttttctctgtgctctgtcacgtggcatgcgttttacctgagttgtttggtgcctgcctttcctccgctatggtaaagccccacatagctgggcttttggtctgtcctggtcattctcccatccccagctcttagaacccgcctggcaggtggtagtgctcagtgcttgcttgtggaatgaatgaatgatccccctggccacacggagcccatgttcctgcatgaggctatccctgccctgagcccatccgctaccctgagctccggcgctccctttaggtggtgcatgggcccctgtttaccacagtcccttgactggtgtcacctgttgctgttaggacatattttaagatgcattatgacagcatggataggttgcctgtttaattccataagctccaggtgcgacagcctcatgtgcgaagggctttcccaccacctcctatcccaagctcccgccgaggagccccttccctggccgggctcgggcagctgttccggagccttgtggtggggcgtggggccctcatcactctcctcacaagcgtacttgtcccttcccctgcagaacgtgcgcatcgaccccagtagcctgtccttcaacatgtggaaggagatccctatccccttctatctctccgtctacttctttgacgtcatgaaccccagcgagatcctgaagggcgagaagccgcaggtgcgggagcgcgggccctacgtgtacaggtgaggctgtgtccaggtgagggtggaggggccggctgaggctgggcaggggaggggtctcagagtggacgggatggggaggctgctgactgagccccagagattgttccggaagcaggcaagtcatagtcggggtaagtgctagtcccagagaagtttttgttttagggttttttttttttttttttttttttttagagatgggatcttgctatgttgcccaggctggttttgaagtcctgggctcaagcgatcctccgcctcagcctctcaaagtgctgggattacaggtgcgaatcaccagacgttgcctagagaggttctttatggagcagggagggaccaatggtgtgcgtctgggtggagggtgcatgtgtgagttacacacatacatacacacacatacacatacacatacacacatacatacatacacacgtacatacacatacacacacacatacatacacacacatgtacctacacatgcatacacacatacacacacacacacacacacacacacacatgcatgaccaggagcagggaccgaccccccagaccctatctgggccagaggaccgggtgggtcagcacgggaaggggtcagctgtttgtggaacatgctggcccaaggaccacagagttgtgcctttgctttctgcttgtcctgtacctggctgtggcctaggggaagtgacttcattcctctgagcctcagtttgcccgtctgcagactggagagacacaagagccccttcatggggtcaccgggacactcaggatgcactcggagctctgagacggctggcggatgtgcctgttacaactcccttacctcctggcgttttcacagcacctcccctcctccacacccccacttcccagttcacagacaggggagctgacttgcccccggcacacggtgttccagggatggggcgggcagagggtgttcccgctgttggagacccacagtctggttctgggaaagccaagatgaaaacccagcaaatgtgcctgaggtttgggaatgggaaacatgaatcagctgctgcattccgttcactcattcactcattcgctcgttcatttaacaaatgtttactgagcacctgctaggtgttggctgccgttctaagtacaggggacccagcagtggacagaatgggcaaaaatgccaaagctctctatactccttcattctgtgagcactgactgagcacctcctgtgtgctgggggcgcaggcagaccaaggccctgcctcaccaagctgatgttctgatggggagagagtaaagaagtggacaaataaggggaaatcaggcagccatcagtattgtgcagacaaaacagtgtgaagccggagtgcaggagggagggtggccttggggctcggtctgactggagggtcgggagcacatctgcaaagggacactcactggacccgcatggtgggaagaggccctggggagacagagtcccgggcagagcatgtgcaaaggtctgaaggctgggacagaggcctgtgcggctggggttacgagggagggagacagtggagagacgaggcctgagccttgctgagggcctcagaggtcacgttaggagcctgattttaacctgcatgcaaagtggggttgtggtccagagcatggcacgatctgatttctacttttttttttgagacggagtctctctttcacccaggttggagtgcggtggcgcgatctcggctcactgcaacgtccgccccccaggttcaagcgattctcctgcctcagcctcccgagtagctgggattacaggcatctgccaccatgcccagctaatttttgtatttttagtagagacgtggtttcgccatgttgggcaggatggtcttgaactcctgacatcaggtgatctgcccacctcagcctcccaaagtgctgggtttacaggcatgagccactgctcccgacctgatttccacttttcaaagattcttctggatggtggagagtggcttggagagatgagagatcataaggacagcagcagcaacagtcacagcagctgatgtttacctcgtgctttctctgcacccggcggctgtgttgattgctttctgggtatctgattgcttaatccccacagctgccctgtgaagtagggcttgtgattacttccttttgtagatggagagacgatggccgtgttgggtgggggagagcagaacgaggccgggtgggcggcgacaccatgtcctgcagtgggcaggcggcgggagggacagacttggcgaaggggccgagctcagctttggctgtggggccggaggtgtgcacagacgtccagggcccctggttcccaggcaggcattgcaggcgagtagaagggaaacgtcccatgcagcggggcggggcgtctgacccactggcttcccccacagggagttcaggcacaaaagcaacatcaccttcaacaacaacgacaccgtgtccttcctcgagtaccgcaccttccagttccagccctccaagtcccacggctcggagagcgactacatcgtcatgcccaacatcctggtcttggtgaggctgccctgtggcccacgccgcctcgcaccctgacctcgtcccctgtctctcctcccgcctgccccttgtgcagagagcagtccctgaggtggtcggagcgtggggactcacgcctggtgggtggctttcggccctgtgctgtctccaccacccccagtgggttctgagtttcccaggtgggtccacctgtcttggtttggaagtcctggccaaagtacttttttttcccttttcaatttacatttctgagatctccaaaaggggctgtcttgttgagggctgagccacaggcccgcctctgggactggggctggagttcacttagcctgagtccagtggggtgcaagggggagaaggggttctcgggagcacatgtggccttggcactggaggagcagagggtggttctggtgtcccagatgccccacgtggccactccaggggcctcctgcaccccagcatttcccttcatgggctctttgctgtgaggcccagctggggccaagggaggatgggccagccacgtccagcctctgacactagtgtcccttcgccttgcagggtgcggcggtgatgatggagaataagcccatgaccctgaagctcatcatgaccttggcattcaccaccctcggcgaacgtgccttcatgaaccgcactgtgggtgagatcatgtggggctacaaggacccccttgtgaatctcatcaacaagtactttccaggcatgttccccttcaaggacaagttcggattatttgctgaggtacgtgtggcctggtgagaagccaaagattcaggcctgtgtcctgtcttcccctcacacagcctggacactggtcaccagcttgctttgtagctggctggggatctagtggctgtgggttgtaagtgactgagaacctgactcaaaccggcttgagtgaaatggggaatgttggggctcatagaactgaaaatgctagggttggattcaggtacagcttgatccaggctcaaatgatgtgactgggccttagcttagcaaattggaggctttgctggaggaagggggcatggctgctggggagtaatatcacaagctgactcttaatcttgactcttggcaacctggtagggtcactgactgggcttcggagccaacatctcgtccatggagggtctgaccctgaccttggctccctcaccgcaggtttcactgagtccttgggactgctccagcctcagccatctctttggtctctgctgatcagggtagagtgctgggggggatatcgtggtgctgcgtgtgatagatactcagtacgtttttgtcaagggtgacgggctcctgtcgtgtgggtaaatgagcaagtttgggctaagtggcatgatgctgtaaaggcatcttgtaaatcctgaagtgctttgcaaatgaaagttattacaaagtccctagtttagtataatctacgtttgactgcatataatgaaaacctcacaagaaaagtctagcggtaggctgttcagtgttggtgtggtggcttcatggtcttaagtgatctggaagccttctactactgtgctctgccatccttggcatgtggttttcatcctcaagataacctcattgtccaagttggctgctagagtgtcagcaatcacatcacattccaggcagcacagcaagaaggaaaaaatggtggggctttggggagcagatggaggaactgggggtaaaacagcgtgttccagtttcctccctcttagggaggaagaaaaccaatgtccacttcctttctattggccagaactgagtcacatggccacacctagctccaggggaagctggaaaggtagccttttagctgggtgtgctgatgctctgagtatggtttgggttttgtatgaaagagtaaggagagattgggctttgggtagtaactggcagtttctgatgctctccgtccattataatgatcatttaagtatcctattgggtgagcatttattaataataacaataataatgaaaataaagactatcattttgagctcttactgtgtccggtgcactgtacctggccgtttttgcacatgagtccctttaatgctcccctttgtagtggctctggttattcttggctccacatgggcacgtgacagacacacccgggatgctgggctggggccttgtgctgggtcctgctctggaggtctgtgatgggtgcagtcactcagccgggcaaccttggagctcctcagtgtgctccaccctgcaaagcacttctagatatttccttcagtcactcataccactttgtgctttgcatgtctttgggattagaaaccagcttctgggaaatgctctcggagcaccaaagcctgggccccactatcaagaacctcgatgggttaggacaggccaggttttgctgctgtgacaagcagccccggaatctccatggcttagaacaaccaagacttattcctttgcttgcactccacgtccagtgtgggtgactggggcacccgcgcttgtggtggtcacttggggatccaggctgagggaggctctgtcttgacacatacctccttggctgctatagcagcggcagagagcccggtgaaaggcgtgtgcacagtccttaaagcatccccccaagtgacatgccacttctcctttttcattgctcagggagctgacctggccatgctttattttatgctggagtagggtgtggtgggggtgatctgccatttacctgggaggaaagccagactctcctggagttaggaagggagggtggaacactgcagccacagaacccgggaccattcctcctagaaagctcccaagcctcctctcggtccccagacactgggcatttggcagtgaaccagatgctgggggccctgtccttctggtggagggggaggagggctcagcccagaatgttcagaccaggccggctcaatggcaggcctaagccttacgatgctgttccctgctgtgtctgtagctcaacaactccgactctgggctcttcacggtgttcacgggggtccagaacatcagcaggatccacctcgtggacaagtggaacgggctgagcaaggtgaggggcgagaggcgagggcccctgtcgccagggagaggggagggtgggcccggccatggctgctcgggagtggcagggaccagagagctccttcttcctttgtcgtgaagagggtgctgggaggatgaacactcttgaagttggaggagggattttacctctggttaaagcttgaccacccagaggggcaggtggggttagtgattgcttactgagcttactgagcacctggcatctgctgggaactgagtgctttcttcctttcgattctttacttacaaaaatgttttgaaggccgggcgtggtagttcatgcctgtaatcccagcactttgggaggccgaggtgggggggatcacctgaggtcaggagttcgagaccagccaggccaacatggcaaaaccctgtctctactaaaatacaaaaaattagctgggtgtggtgttgcatgcctgtaatcccagctactcatgagctgaggcaggagaatcgcttgaacacaggaggtgaaggttgcagtgagctgagatcacgcaatttcacttcagcctgggtgagaagagtgaaactcggtctccaaaaaaaagagaagagattcacattacaaaataaaacaagagagggagataagtgcccttagtatcacctcccacccctaccccttgccccagaggaaacccacaattatcagtttgggatatattcttcccatccatttttacccatgtgcacacctatatgtacgcagagaaatacggaattgtttcttctttgaacatcatgaaatcatactacgtgcattgttttgcaactggcttttttcaccttcgtgaccttttctcaatatgtgtgaaaatgactgtgtgacttcccactccccactccccgtggtagttactgcaaagaccctgagggctagggacaaatcgtaccccaaccggtgcccagagtggcaaaaatcaccatctgcaactggcagtagccattcacgatagatggagttcacattcattgtggcttgtatattccaatatactgtacatgtgcacgtgattttaaacatcctcatcatacagaagattggaaagtgagcagttggttttgtcgagtctgggtctcgctccccagagtcagttaacctgacaggttctgttttggggttgcccggtggtggccaccattatgattttaagtagtttgcctgtgtgccgattgttttcaggaggtgcctgttgacttccgctctgagggctgagcacagccgcgccccacctctcacctcacctgctcaccacacttcttttccagattcaggctggaaatgtgggtgataggcctattttgcagatgaaagaactgagtccctagcgaagttacacattcaggggtctgggagggggaagctgtggtaggcattctctctgtgtgtctacatagcctgccctcttcccaccgtgccagtattgggaattgagtggccgtgcgtgcaccagggtgagttaggtgtgcagcacctgagagggcttattaaggggccttggccctactgaggggtctagtctggatgcttccccccaggttgacttctggcattccgatcagtgcaacatgatcaatggaacttctgggcaaatgtggccgcccttcatgactcctgagtcctcgctggagttctacagcccggaggcctgccggtaatcactgggactcggggcctcctgggtttcctgggtagctcatggccaaattctgtggtgttggctgtgcacttggaaagcattttgactcatcgtggatttgactcagtagcccttggcaccagcttgaattctctttggtcacaccaccaaaagccaaactccagctgccaatgcctctacacagcccaaagagaggctgctggtggtggtttgcagccaggtggtgctgggctgggaggagggggcaggacatgtcaagtcacagggggccataaaatggaggcgagaggtgggctccctctggcgtctggctggtggcccccatgaccatctgggtgctgagacatcagctggctctgcttggccccttcaggctcagctctgtgtcccatggtcccagttgtggggtaagagtagacagtgggtggctcctacagcccttttctggaggccttgctgtgtcgtgttccattctggtcactctggaaaagtcctttacttaggaattcactcatgtggaccttgacttatctgccctcccagcaaaccctgtgaagccctactgtgtgccaggtgcccggtagtgagagggtgggccaagtctccgttccccaggaggctgtgtcctatcagggcaactcaggcaaatgcacaaacactagagtgtcagagagtgacagtgcttttgctctgtgtggccactttttactattttaagtttttacttatttatttatttaattttttagagatggggatctcgctatgttgcccaggctagtcttgaactcctagcctcaagggatcttcctgcttcagcctcccaaagtgctgggattgcaggtgtgagctactgtacccagctgactttaaaagctgaattttaaacttaaagaaaagttgcatgagaaatacaagtggcccccgtctccccttcacccaggttcactagccgtgttaagccccccaccccctcttctcgccgagtgtctttttccagaaccatcggagagtaggttggaggctgtatgcccccttacctccaaatactcagtgggtgtttttcagaaacgaggacattttcttacataaccataatgctgttatcaaaatgagaaaatttggcattgacataatactgttatctaagctggcactttcctataaatcaaaatatgcaaggcacacatgcaatttaaaattttttagtggctgcattaatacaagtaacaagaaattggtgaaattatttttaataatgtattttatttgacctcatatatcaaaaatgggatcatttcaagtgttattgatgaggttttttttttgttttttttgctagcaagtattagaaatctggaatgtattttatacttgcatcccaatttggactcaccccatgtcaagggcgggatggacagccatgcgtgctgagtggctgccgtggacagagtgggtagcacagtgcatgttcaagttcagaagtgcttttgagaaagtacaggagcatgaatggatggagggtggatggggtgggtgtgggggacggtgctgccacccgaggaagtgacagctgaactgagatctgactgaagggctgaagtctggtggatgaagatgccagaggagactgttcttaggcagagggagcagtgatgcaaagggcctggggcaggagtgagtgtgcttaggaactgcagggaggccctgggcacaggaagttggggcagggctgagcagagcttatgcaggggctagataaggtcaatgaatcctaatggtaggttagactagaaagggtcacagattttcagcaggggcatgatatattctgttctttttttaatttcataactttcaaaaacaattttatttttagagactgggtctcactatgttccccaggctggtctcacactcctgggctcaagtgatcctcccacctcggcctcccaaagtgctgggattacaggtgtgagccataatgcctggcctctgttcttttgtaaaactccatctggccacggctaatacattgatgtgggtggggaggcagagtcggagcggagaggcctgttaggaggtcgctgcagctccgcgggtgagagatgggggcggtttggacccgggaggtggtagcgcccgtggggagaagtggctggatctgggcagcctttggcagggcctggctctggccgccgggtctgggtgtcccctctcatcctgtctgtcccctgcagatccatgaagctaatgtacaaggagtcaggggtgtttgaaggcatccccacctatcgcttcgtggctcccaaaaccctgtttgccaacgggtccatctacccacccaacgaaggcttctgcccgtgcctggagtctggaattcagaacgtcagcacctgcaggttcagtacgtgccgtcccctgtgctgggatggcgggagggtgtgagggtggggccagctgagggtttatctgcccagtgctgtctgcttaatctctggcctctgtactcttgataatcccattaggcgaagataatgaggccgcaggaagataatctgaaaaggaagaaatgccaggtctattagttgctgtcacaatatattgccatgaacttcagggcttagaacaacacacactggttatcttgcagttctgtagtcagaagtctgcgtgggtctcaccgcgctcagaacaaggcggctgtgttccttctggaggctctaggagaagctgcgtctgccttttctggcttccagaggcccctctgtgtttcttggctcccgggcccttcctccacctttgaggccagcaacatggcatccttctgatccactctgtcctcatatctcttcctctcctccctcttctgccccctcttccagttctaaggacccttaagaccacatcgtgctctcctggataccccaggacaatctccccatcttgtttattattattttttttgagacagactctcactctgttacccaggttggagtgcagtggcgccatttcagctcactgcaacctccgcctcccaggttcaagtgatcctcccacctcagcctcccgagtagttgggaccacaggcgtgcaccaccacacctggctaattttttgtatttttggtagagatgggggtttcaccatgttgcccaggctggtcttgaactcctgacctcaagtgatctgcctgcctcggcctcccaaagtgctgggattataggtgtgagccaccgcgcccagcctatttttatattttgagacaaggtatcactctgtagcctggagctggagtatagtggtgcgattatagctcactgcagcctcgacctcatgggctcaagcgatcttcctgcctcagcctcctgagtagctgggaccgcaggtgtgggccatgatacctagctaattttatttttgtaaagtttttatagagatgttgtttcaccatgttgcccaggctggtctcaaacacctggcctcaagtgatccacctgcctctgcgtgttaaagcaatgggattacaggtgtgagccactgtgcccggcccaatttctggaccttcaaggcagctgctgagcaggcccagcgcccgtttaccctgtgacctgacatagtcatgggttctggggcttagggcatgtacgtgtcctaaatgacatgaaatgaggctggcgagggtctgtgtgttacgtaacatcttctcgttccgcagtgtgggtggctaggcagatgtgatgactgctgttggcgtcggtcccctgacattgttggtgtgtctcaattgtgtgccagtccctgagacacccccacctcaagttgctcagtttggaccctcgggcgtcagtttgtttccctgtcctcacccagctcttccagtgcgtcaacaagcccagatggctttacctccaggttgagtcctcactccttcctctctcttgctccccaccccaacccccgcctcattgtccaggccacggacacgtccttcctggtgatccagccctttcagtagcccatccctcaatgcagtgttgccgccttaccatccatcccctagaccatccagtgcggtcactgctggcctcttgcggctgtttaaattgaaattgatttaaacgaaatcaaattaaaaggcagttccttggttgcaccggccggaagttaaatgctcataagccatgtgtgtctagcagctactgtcttggatagcacagatagagaacatttccatcatcataggaagttctgtagcactcccgacagcagcggagggatcttttaacaatgcaggccgagtgtggtggttcacgcctgtaatcacaaccctgtaggaggccgaggtgggaggatcacttcaggccaagagttcgagaccagcctgggcaatatagcaagacctctctctggccaaaaaaaaaaaaaaaaaaaaaaaattagctaggcatggtggtgcatgcctgtagtcctagctacgtggaaagctggggtggaaggatggcctaagcccagaggtcaaggctgcagtgagctgtgatcaccccactgcactccagcctgggcaacagaggaagacccatctcgaaaaatatgcagatggccgccgtcctcttaaaatgtctggcagctctgtctgcattcatagtgaagtccaaactcccaccatggccctgggccctgcaggatccagcccctaccggcctctctgaaggatccagccccaccagcctctctgactccatttctccctacacgtcccctgttcattattctccagccctgatgccttcgccctttttctaaagtataccaaggtcagtgccttgcactgtggtttgcatgggttgcttcccctgcttggagagctctttgtctggatttctgagtggatcatccctcaccttcttttggcctgcatgcaaatgccacctcctccgggaggcctcctctgatttcctgttctaaagttgccccctctcccacctgctgctccctatggcttcctcttcttgtcttcttgtcttggtcttcttgtcttcctcttcttgtcttggtgctcattgctccctgaactcatggactgtggattttattcattgccccttccattcactgtcatccctgtaggcagggccccaagctcctcttgttggttttattcttagcttctagaactgtgccccgcatgtaatgggtactcatacagtatttgaatatagggatggtgagtgcgttctgtacttaggaaattgaggcctgatgctggatgcgaccaaggtcacagggttggtaggaccggaagcggccctctatttgactgtgtcttgccttctgggagcctttttggttgaagccccgtcctccagctggcaatggcgactctaaaggactggtctgcaacaggggtcaggaggaggggctgtcaacagattggatgctttcccctatttcaggcagaatggaacaacctgtgaatgaatggtttggagctggggcctgggacgcccgctgctgtctcctggtcctgtctggcccgtctgggcattggcctctgcttgcttcattctttgctggtatcggcggggatttctgctcctaaggttgaggatgttacacacccaataggtgtgctacagcaactgtcgcaagtggcagatgctggactccacctgatttaggccaaaagggcacttcttggtttgcgtaatgaaaaattccagggcagatctctgcattaggcacaaatccagaacttagatgttgtctggaagctgcctctgccaagtcccagctcagttttctgctggactggctttgctgccaagcaggctctccctcctggctgcctgtggaggctccaggctcacctccgcccagctccgagtcctgcagaaagggggccacctgtgtttccttcactccagcagaagttccagggtttgctctaattggtctgcctggctcccatgcccagctgtaaaccaatcacagtagccgaggtggactatgctgattggccaggcttgtgtcacatgctcagatggctcctgggtgggccggccccactccaagcacaaggctgaaagtagggaaggcttaaagtgggggtgtaggtaccaggagaagggggagaaacgacatgcccatcccctccaagggcgtgggacgaggtgtgtcccgccttctcttagcacatctgccaaaagaatttcaaaagcgcaaaggaattttaaaatctttatttaaatagagttttttcttatatttatttatatttttgagacagggtttctctgttgcccaggctcaagtgcagtggtgcaatcacagctcacagcagccttgacctcctgggcacaaatgattctcccacctcagcctcccaggtagctgggagcacaggtacacaccaccatacctggctaatttattttatcttatttcaattttttttttttttttttttttttttgtagaggtggggttgtgccgtcttgcccgggcttagtttttgcttctaaataaaatatacatagatacaaagaagttcccagatgactcatgcagtttttggggttttttgctttgttttttgagacagggtatcactgtcgcccaggctggagtgcagtggtgccatcatggctcacagcagtctgacctccatcactcaattgatcctcttaccccagcctcctgagtagctgggactacaagcggttgctaccatgcccagctaattcttaaattttttttaagagacggggtctcaccatattgcccaggctagtcttgaagtcctgggctcaagtgatcctcccgcccaaagtgctgggattacaggcatgaaccgctgcgcctggctgacacctgcagtttgaaacttcacaaagtcaacgcaccccgtggccagcaccctgactgagaaacagacaggacaggccctggatgccactcgcggtcctcccaccgccctgacatccagccccggagctcagctggtttgcatcttcatgtgaatggacccataatgctagactccttttcctccttttctggtccgtgcaccccttagcaccctggtgcaattcgtccgtgacgttgtgggtggtagcagcccctcctctccgttgctgtgtggtgttccatcgtgggtgccacctccatcttctccttccattgctcctaggcatccaagttcctgtttttcgaccgtgaccgtggtgcacacgtgtcgtttggtgcacctatgtctgtgtttctgtggcatgttatctaaagagtaaaggtaccatgcctttgcctttctgggccttgaaatctgttggactcagacaactccctcatctcaaacctccctgttgcgtgagggcatccgacttgcctcacagagccaactaattatcatcggtggcaatcctgggcaattatgtctggctagatatgccataaagctacaaattaattaccacttacagctgggaagatctctctcggcgtgcttggtaataacattggaagaaacacgtgcgtgggtccatgcaggctcggcctctgaagcaagggcgggggctggcaagttgttccatcccacctcggtctccacctggggctgtgggcaggccagggcttgtttgagattcctccagagttcggctccgtggctgcctcctccacggaggaggcacgagaggcagcgttttccagattgtggaggacactgtccctgcgggtgcttgggatggcttcagaaggtccaaggaggtgagagtgagcttctgggtccatgctcttttcctccttgccatcacctgcaggagaaggtctcttggtgttgagaggacttgaagagccttccacactcatcagccttttttgttttgttttttcttttaacagaaaaagagcagggctcccagttaaagcctcatgcagtaacaggttctagttagaacttacaacatcattattttccacggtattttttaactatgtcttttttttttttttttgagacacagtcttgctctgttgccaaggctggagtgcaatggtgcaatcttggctcaccacaacttctgcctcttgggttcaagcgattctcctgcctcagcctcctgagtagctgggattacaggtgtgcaccaccaggcccggctaattttgtatttttagtagagacggggtttctccatatcggtcaggctggtcgtgaactcccaacctcaactggtccacccgcctcggcctcctaaagtgctgggattacaggcgtgagccaccgcgcccggccctttattttattttattttttttgagacacagtcttgctcttttgccgaggctggagtgcattggtgcaatcttggcttactgcaacctccgaaaactattgtccaggctggagtgcagtgatgcgatttcagctccctgcagcctccgcaacctctgccgcccaggttcaagcaattctcctgcctcagcctcccgagtagctgggattacaggcacataccatgctcagctaatttttgtatttttagtagagacggggtctcaccatgttgcccaggctggtcttgaacttctgacctcaagtgatccacccgccttggcctcccaaagagttgggattacaggcatgagccaccgtgcctggcctctgattcaagtttttgttttgttttgttttgttttccttactgaggcaaaattcttgtaacataaaattaaccattttaaagtgaatgattcagtggcatttagcagggtcacaaggttgtgcagccatcacttgtatctcgttccagaacatttctgtcaccccaaaaggagacccagactcatcagaagtcactccccgccccctcccccagcccctggtcaccacccgttggctctgtctgtggattagcactgtctggatccttgtgagctttttaaaaaaaaattgtttttcttttgagacaggatcttgctctgttacccaggctggagtgcagtggcacggtcacggctcactgtagcctcaacctctgaggctcaagcgattttcctgcctcagcctcctgagtagctggaactacatgcaggtgccaccatgcccggctaatttttgtagagataggatcttgccatattgtccagcctggtctccaattcctgggtgcaagtcatctgcctgctgaggcctcccaaagtgttgggattacaggtgtaagccatggcgcctggccctcgtgagcttttgagagaggcccgctcgctgttccttgttaacttgtccttcaggcctgttgtccattgtcccgagggtgagctggtgtttgcctggtttggttggtcagtggcgaggttgagctcacatttgtagcaggtgtgtctacagggacacactcctgtggatgcagggagatctggccacaggtgcacacacctgagctccgatcattgctgcgtgtcctgcaggggacagtgtgggctgcttggcttgcgcttgagactcccctccccacacccaagttcaaatctggcgttgccttttccatccgtgcctccctagcacccttgtgcaccatgcatttccccctccccacgcttgcttctgccttcccttccacctggaatgcgcttcccgggcatccttcacctggctcctgtgaagaggcctcttccttcttttggtctctcctgtcagaatcagcggctcctgcctcaccccttctctggcgcagagcttgtccctcatcacagggcctggggctttttacagaatggaggaagggatcctctctgtctggttatcttgtcatcgccacgggggtgccctgcagaccacagctctgtgcagacctccggcctggcaggacctgccaatatactgtccttgtctgatgtcccctccctgcccctcttctaggtgcccccttgtttctctcccatcctcacttcctcaacgctgacccggttctggcagaagcggtgactggcctgcaccctaaccaggaggcacactccttgttcctggacatccacccggtgagcccctgccatcctctgtggggggtgggtgattcctggttggagcacacctggctgcctcctctctccccaggcagagagctgctgtgggctggggtggtgggaagcctggcttctagaatctcgagccaccaaagttccttacttcaccccgactccatagttcaaggtagttcaagggttttatgatccctgtactggtttctataaatgggctctaagacagtaaattaattagaacttatcagctgggatgtctcctacatgtgagctggaggcagccctctggatgtgtcaagataccataaagatctttaggtaccaagaagagcctggggtattttgcagataaatcacacagggaatttgtcccgtgtgaagttctgtctacaagcagggagctggacatgtggccctcccaaggacactccttcagcttgtggcctcttctcttggcacctccgttctctgtaaaatatgcccagttggtcttggtggctgctaccattgattcagaaatctgtggttttctgtttcctgggtgggcacttgtggtctatcccatgggcctttaacaaaattattattatttttgagacagggtctcactcggttgcccaggctggggtgcagtggcatgatcatggctcactgcagcttcgacctccctgggttcaggtgatcctcccacctcagcctccctaagtagccaggactacagacatgtaccaccatgcctggctaatttttatattttttgtagagacgcggttttgccatgttgcccagtctggtctcgaactcttgggctcaagcgatcctcctgtcttggcctcccaaagtaccgggattacaggcatgaaccgccgtgcccagccaaaattaattctctaaattgaagaagaaaagctgtctatttttgagtgtacaacatgatgttatgatgtatgtatataacttgtggaatacctaaatcaagccaattaacatatgcattacctcacatactgatgatgtattggtgctgagaacatttaaaatctactgtcagcaactttcaagcttacaatacattgctattcactctagtcactgtgttgtattgtatagtacaatacagtgactgttgctctatttcccagtaggtctcctaaacttactccccctgtctaactgaaattttgtatcctttgacggacttccccatccctgcccctggtagccagtattctaccctctgcttccatgaattcaactttttttcttttttttttctgagatggagtttcactctggttacccaggctggagtgcagtggcacgatctcggctcactgcaacctccgcctcccgggttcaagcaattctccctgcctcagcctctcaagtagctgggattacaggcacacaccaccacacccggctaatttttgtatttttagtagacacagggttttgccacgttggccatgctggtctcgaactcgtgacctcaggtgatccacccgcctcggactcccaggttgctgggattataggcgtgagccactacgcctggcctgaattcaactcttttagattccacatacaggtgaggtcatgcagggtttgctttcctgtgcctggcctattttacttcgcatagtgtccccaggtccgtcatgttgtcacaaataacaggatttccctgtttttatttatttattttttgagacagagtcttgctgcgtcacccaggctggagtgcagtggcatgatcgtggctccctgcaacctctgcctcctgggttcaagcaattctcctgcctcggcctccagagtagctgggattaaaggcacacaccaccacacctggctaatttttgtatttttagtggagacgggatttcaccatcctgaccaagctggtctggaactcctggcctcaagtgatccgtccacctcggcctcccaaagtgctgggattccaggcgtgagccgccgcgcccagctggatttccctctttttaaacgctgaacagtatcccactgtgtgtgcaccacgtttctgctgcccattcattcactgacggacacttcgcttgattccgtatcttggccacagcgtacatgggagtgcccctgtccctttgacacactgatttcatttcctctggggggatgcccggcagtgggatcactgatccgatggtagttctggttttcgttgtctgaggaagctccacacgtttgccacaatgctgtgcaccttaggcccttcccgaagctccatggcggatgctgttctgcaccatttttctttgtcctcccaggcctccttagccgctgactaggccctctcggccccggccccagccctggtctctgccttccctcttttagttaattcctcctccagcctctcttgctctgctggcttccggagaattccaccatgaacacagtctcctgtgcgctctcagtgatcgctttcctttcagggcacggattttctttcttcccctcacatcaagaaagaaggggttaagtttgggagcccagagagaggcaaacagctgttttgccgcagccactttagctgctgcgtccaattctacctccagatgagcttgaggccgacggggagaggaagtggcctttatttctttgttttttgagctgggcacgttggggagggggatcaggagatcagcttgctgcctgttggcctttagccttgaaaaacgaacgtgtgttggaagctgcttccgtgtggccacttttctgctcctgaaactgggggagggcatggggacgggggactcaacaggacgctgcttatggtggtatcacagctaagacttattgtaatgacagaattcaaagcaaaattagcaaagggaaaaagcaccttgggtgaagtcgggggaggccaggctggagcttccagagtcctcttccagggggttcctacaggatgcacttaatgtctttagcaatgagttgtgacaacatgtaggagatgttgtctagcagggaagctcattagaaattcagtgcccatggtgttttgctaggggccagtcatgtgggcacctctgcctggcaggtaccaaaattctaggctctgggaaggaaagcaggtgctgagcaagaaccatattgtttgtacaaataatttcggcccagtgaactactctcatcagttaggggatggtggggaccctcctgaaatctgggttcccagatgccagcagaattcctaaggagagcagcttcaggcctgtggcgtgaactctgttctactcacgggtgatctcatgcccatcccaccaggctctcgagggcaagcactccccagtcgtgggcgtaagtgaggcctttaatgagctcttctttgccacaggggcctggaaggtcctcagcatgctgggccataatgaagaaaacatcctttccctatagtgtacgtgataataacctaggcatttatggccctgcgtgtggctatcttgcataccttacttttgctcttgcaaaaattctgtcaggtcgggagagttctctctgttttacagatgaggacgcgactctcagttaagaagaaccaactgcagttctctgacctcaaatctagttttatttccactatcatttcctgacttcattctggaaccaccttcctgttgtttttgatgacacatgtgtgtcacttcggttatttacttaaaaaaaaaagtctcgttaaaaagagctgggtatagtggctcatggctgtaattccactgctttgggaggctgaggcaggaagatcacttgaggctaggagtttgacgccagcctgggcaacatagtgaaactctgtctctacaaaaataataatgataaataggctgggtgtggtggctcacgcctgtaatcccactttgggaggccaaggtgggcagttcgcttgctgccaggagtttgagaccagcctggtcaacatggtgaaaccctgtctttactaaaaatacaaaaattagccgagtgtgctggcgcacacctgtagtcccagctactggggaggctgaggcaggacaatcgcttgaactcaggaggcagaggttgcctgcactccagcctagatgactgagtaagactctgtctcaaaaagaaataaaaataaatttctgcacaaaggaagctttttcttactacctcaaataggaaattacaaaattctccaaaaaaagaagacaaccataaaaatgaacaaggaaaaaaatattaggctctatgtaaaatattgttgtctgtcagcaggagtgaacctggggccagctgtcagcaccattgttagaagtggagattttgtgtaggtgtattagaggggtattaaagaccatgcaaacacctggctgagacctactcttcaaaatgatcaggaggagttgggagtgaattgagaagggacttttgtctgttttattgaatgtggaggttgagagggagcatggacaaattgccattctgcactttgggaaacgctgtcttaggaggacaggtgaaagtgattaggtattttccaccctgagacagccttgctttatagaaggaacctctttgaggctgtgaacataactgtgtgggaagcacttgtttccctataaggggttagaatcaggagaggagatcccagtgcacctgcccagcatttctagaactgttgaccccccccagcctgtggcttgttttaggtaagatacaagcaagctccactgggcagttagctgggacgcccaccctcttgactgggaccagggagaggagggttgacggtgtccctggagcttgggggtggccagtctcctcactgtgtttgttgccgcaggtcacgggaatccccatgaactgctctgtgaaactgcagctgagcctctacatgaaatctgtcgcaggcattgggtgagtggggactgggagctggggctgcattgctcattgagagattaggtgctcagtgctccagtggtcccagactccagtgacataccccaggaaccagggcatggggaggggagagggtcctattgggggtggaatccagtccctgctgatcttctccctgaggggtcttggttttgagccaggtcctgacctgcatcctgatattccttccccagaacaccacttttctttctcttttttgttttgttttgttttgtttttgagatggagtctcgctcttgttgcccaggctggagtgcaagggcgggatattggctcaccacaacctccgcctcccaggttcaagcgattctcctgactcagcctcctgagtagctgggattacaggcatgtgccaccacgcccggctaatttggtatttttagtagagatggggtttcaccatgttggtcaggctggtctcaaactcctggcctcaagtgatccacccacctgggcctcccagcatgctgggattgcaggcgtgagccaccgtgcccggccttcacttttcttttttaacattcaccccctccctgccaattagccagagcttcaatccaagctgtttcctacacgacagagtggcagaaatgaaagcctggcaaaaccaaatgtttgaaaatggaaacgctgaggcaggagaatggcgtgaacccgggaggcggagcttgcagtgagccgagatcgcgccactgcactccagcctgggcgacagagcaagactccgtctcaaaaaaaaaaaaaaaaaagaatttttcaagcactgatttcctctttttgatttttaaaataaaacagctttatgcaaatataatgcatgtaccataaaactcacccctttaaaatgcacaattcaaaataaaaaaaataacccccctaataaaatgcacaattcagtgatttgcagtatattcacagaattgtgtatctatcaccacaatcaattttggaacattttcatcatccccaaaagaaaccccacactcattaacactcacttccctgtcccctcagccccaggcaaccgttcatccacttcctgtctctgcggacttacctattctgggcatttcatataaatggaatcatacactatgtggtcttttgcgactggcttctttcatttaggatcacgttttcaaggttcatccatgtcgtagcatggatcagtatattttatggctggataatattccattgtctggatagaccacatttatttatcggttgatggacgtttgagttgtttccacgcctgggccgttatgcataatgcagctgtaaatgttcttgtgtcagtcccagtgtggacatctgttctcgttttccttaggtatgtaccgaggggtggaatcgctgggtcctatgttaactctttgtttaaccgtttgaggaacagtcagacttgcacagcctctgccccccatccccattcttttttttttttttttttttttgagacggagtctcgctctgtcgcccaggctggagtgcagtggcgcgatctcggctcactgcaagctccgcctcctgggttcacgccattctcctgcctcagcctcccaagtagctgggactacaggcgcccgccaccgtgcccggctaattttttgtatttttagtagatacagggtttcaccatgttagccaggttggtctcgatctcctgacctcgtgatccgcccgcctcgggctcccaaagtgctgggattacaggcgtgagcaccgcgcccggccccatccccattcttagcagcagtgcagcagggttccagttcctccccacgcgcaccagcacttgctataacattacacgttgctagaacttggtgagggattatactgatttgttgctatgtcagtgtctgtacttcttagcatatctgaaatagtttcgttaaaaaaaattctcttagaaaaatccctgggttgcaggaatgtgagcatctattcagctttgtcaaatgcctctcggctggaaagaataacactttgtcagagcacggcagcgagtaataactgtgagctctcttccttcatcccgcccttgcattttatttttatattttgaggccacttagggaatttgttcttgatggatttgtgggtggggaaacagccccaggcatggaagaggcgtttgcagcccaagtcctccctctggttccaccgcgtggcacctgggctgctaactgggatgcaactggggccaagtgggtgaccagatagaagaggcgacctggggccgaggatacagccccttcccagcaccagctgactgtagccccatggaaatgcgggctcagtgtggccacatcctctgcatttttcaaaaggacttccaaatctgaattttaacaggagctctgtcaatttttacttattgggaggtaattcacattctttttttttttttttttttttttttgagacgaagtcttgccgtgtcacccaggccagagtgcagtggcatgatctcagctcactgcaacctctgcctcccgggttccagcgattctcctgcctcagcctctcaagtagctgggattacaggcgctcgctagtacacccagctaatttttgtatttttagtggagacaggatttcaccatgttggccaggctgttctcgaacttgtgacctcaggtgatccgcctcccagagtgctgggattataggcatgagccctgcgctgggcctaattcacattcttaacaaacagttcacgcgggcagctggattgtgcctgccagtgacctgtggaccggtcacccaacctctctgggccgcacagctgctgacctccctgtggactgggaacaaggcactccaggaaagtggtctcaacagcagatgtggagggccacgagggatggccgtgggaaaagtctagagacacagctgccgggaagcagagctgtctcgtgacctgtcggggaagcttctgtgctccttgctcgctaggtaaaggcagtggggttgcatgttacttgaatacaattcccattggttcttacaaagtctttcagagaaaagcagccaaagtaaatggtaccgtctgttgtctccccatcgtgtttcgtcctctgtagggtgatagtgtgagcccatttcactgtgcaataccctacttaacaaggggcctgagagacctccaataattgtgattgggggatttcagcctttttttttttttaagatggatcttgctcttgtcgcccaggctggagtacaatggcgcgatttcggctcactgcaacctccgcctcgggttcaagcgattctcctgcctcagcctcccgcgtagctgggattacaggtgcccgccaccacgcccagcaaatttttgtatttttagtagagacggggtttcactgtgttggccaggctggtctcaaactcctgacctcaggtgatcacctgcctcagcctcccaaagtgctgggattacaggcgtgagccactgcgcccggtctctgattgtggtatttgagccttttgtgctgactttcgtcaccgcccctcagtgacttccatctcccctccctactgctgtgcatggcaaagtgacagaatatttgtgtgtccatttctttgctgggatttaacaattataacaacaacaataataaatgtgccaagcacttttatatgccgggtaattttcgaagcactttacatgtattactgcattgaatcctccctagagtcctaggaagagttacgttataatatctcgcttatacagaagggacacaggctcagtagcacgcccaaggtcacagagctcgtaagtggctgtgtcaggggtcccaaggccaccgcaggctcgacgatttgctgggaagcctcaggacgaagcatatggttgtacacgtggctatgatttattacggtaaaaggattcaaagcaaatcagcaaagggaaaagccacacggggccaagtccagaggaaagcaggtgccagtttccagagccctctcccaggggagtcacccaattcttgctgcaaggagttgtgacaacccacgtgacatgtcatctggcagggaagcccgctagagagactgagtgcccagggtttttactaggggctggtcatgtggccaccctctgcctggcaggtactgaaattccagacccttagaaggcaagctggtggtcagtataaaccacattacttgtacagattgctcaggcacagtgagccatccttgtcagttagggagcaatgggaggcctcccgaatccaggctcccagacgccagctccgggccagcattgccagcagcctgtgtggggtggaagggctcgggcctgccacgtgagcacgtgcctgcacagcggcccaggtgggattcaaatccaggcagcgacgcttgagtgtgcactattaaccacctcgccacactgccttttctgctagacacctgttgtgggggggtctgtgtggggcaagtggtgagccagcccaccctgctgctccatactgagtgtgagttgctgtattcatttccttttgctgctgtcacaattttgccacaaatgtcatggctcacttttaaaaactatcttgcagtgttgggagtctgaagtctgaaaggaacacaacaaggctaagatcaaggtatctgcaggccttgttccttccagaggctccaggggagaacctgtgccttgccgtttacagcttctagaagctgcctactttccttagctcatgaccttaatcctagccctccctgttttgttgttgttgttgttgttgttgagacacagtctcgctctgctatctagactggagtacagtggcatgatctatagttcactgcagccttggcctcctgggcttaggcgatcctcccacctgagcctcctgagtagctgggactacaggcatgtgccaccataccctgctaatttttgtgttttttttgtagagacaggggtctcactatgttgcccaggctggtcttgaactccagggtgcaagtgatcctcccacctcagcctcccaaagtgctgggattacaggcgtgaaccactgcacttggcctctccctctttaaagccagcagtgtagcactgtccaatttctctctgcctctaacctcctgcttccctcttttttttttttttgagacggagtctcactctgtcgccaggctggagtgcaatggcatgatctccgctcactgcaacctctgactccctggttcaagtgattctcctgcctcagcctcccgagtagctgggattacaggcatgtgccaccacgtccggccaatttttatatttttagtagagatggggtttcaccatgttgcccaggatggtctcaatctcctgaccttgtgatccacctgcctcggcctcccaaagtgctgggattacaggcgtgagccaccacgccccagcccctctttttaaaaattaatttttctttttttagggttttaaaatttgtttttgttttttcgtttttctttctcttgcctgattgctctggctaggacttcccgcttctctctttaaggacttttgtgattctctggggcctacctaggtattccaggatactcttcccatctcagaaccttgatgtaaccatatctgcatggacccacctagatattccaggacgctctccccatctgagagccttgatgcagtcatgtctgcacggtccccttcgtcgtggcaggtcacagtttcccaggtgtcgcattggtcttccggtctccttaggcaccttttggctgtgacagtctctcatctctccttcattttgatgacagtgacacttttgagaagcactggtcaggtattttgtaggatgaccctctactgggattggtctggtgcttttctcatgattagactggggtgatgggttttgggaggaggaccgcagagagaaagttccagtttcagagcatcttgggtacattccgtcaacatactgtatcactgttgatgtcgaccttgatagcctggatgaggtcatgcctgtgacgtttctgcagtatcaagtttacttttattctccctttggattttattatctttttaacttgacgtgtaagttttaacttcacaggtaataagaacatatcttcctgaggggaagaatatggtttcctgtgactccccgccatccccagccgtacccaccatcatcaatttgctgtgcttccttccaggccttttcctacttatttacattcatatatatgtggccatagagaagatacatattgtcgtttgtctgtttgtctttgctagtccaagcaacactgaacatctttgtgcctctgtgtgcatgtgtgagcatctctagggcagtttctgaagagcgtaattgctgggtcgtgaggtatattggtggaattaggtttggcagtatagatcagtaaactcaacagttgtggctcaaatgggacaaaggtatattgttattttaaaaatcttcttttagaggatgtctggaggcagacagtccaagtatggcaagagacattcatagtccaagttccactcatctttctgttccattttcccaacacatggcttccatcctcaaggtcacctctggtcccagtgtctgcagagctccagcccttgcatctgcgtttcaggcatctgaaagggaggagggaaaaaaggttcacctcccagctgtgaaagcttctttttaagcagccctcccggccatcccacgtaacgcttctgcgaacatctcattaaccagaacttggtcacagagcctcacttgccacaagagaggctgaagtggagtctttaactgggtgcattgccatcctgagtaaaatttgggtcctgtttctaaaagggaccaatggattttggctgggtcactggtggtctctgccctgtaggagatgtgagtttttagtttaaaaagattattttcaagttgtcaagctctttgccaggggagattccttctggcagcacatcgaaacactggttccctcagcccatgccaatcaagtaccatggaccccttatccctgggggtatattccaagacccccagtggatgcctgaagctggggatagtactgaaccctgtatagcatatactatgcttcttcctatacacacacatctatgataaagttaatttataaattaggcatagccacaattaacaataactaagaatagggtaattataacaaatactataataaaagttatgtgaacatggtctctccctcaaaatatcttattgtactgtactgagggtaagaaatggcagaaatcaaaaccatggataaggagggatgactgagattgcagaatcaaatccctcctggcctcagagcttatgatcacaggttcaaagctgtgtgatgtcaaacagccctgtgggaaaacatctcaccttgtcaactaaagaaaaaaaaaaacaaaacgccttttaaagatttaaagttagtcttatttacaagtattattgagggctgtagactgagaccttcagcctggggacagttttgtcatatggctcctaaagtgtttcagctcattgtttatatttggtggtgagggtttagtgtgtgcaaaattatactaaacctgtttagatgttgtattcaagcagaattagatcaagtttgggtgtaagactttgtttcacacagctatgtcttgcttatttccagacaaactgggaagattgagcctgtggtcctgccgctgctctggtttgcagaggtaagggtgcgttgggcacagcgtcgggggcttttgttaagagccaatgtgggcatttgaggcaggaggcggggggagcagcttgtagaaagggagagggctgagccagggtaaccggactgtgacatggaccagcgtatcagaaacttcaccctgtccaagcaccctatgtcagttatcccaccaaggtgaaagggatccctagagatggggaagacagaagctgcatgaagaggtaaagtccctggccctgggtgtaaaataattttgttggggcatatgacctcttctcctgaaagtggggaagttggtttccaaggtgtcagcttttctcttaaacttacttctctcgcagcttttcagaattccttctggcctagcttgttttattttattattttattttattttatttactgtatttattgtttcttgcccacctcgttttaaatcagggctagctaatggccaggacaaacaagcctccgaatgtcaagtttacttcctactcacagccgaatctgaagtgggttgatggggaggcagagctctgctccctgcagtcatttagggttccagggccccggtggccccgccatcctggagagcctccattcagtggcagggaacgagatggagagtcacgtgaggccaggtccacctcccattggtcaggacacgatcatatggccctgcccaactgcaagggagtcggggaattgtagtctcaccttgtgtcctggagggaggaggtccctggcaggctccaacacatgctttagccgggaagcttgaggtggggaaaagctgaggcgggcacagaggaaggtgttgggtggcatctgcgctgtagcccgcagcctgcggccccagctcatgtgtttgtcattctgtctcctcagagcggggccatggagggggagactcttcacacattctacactcagctggtgttgatgcccaaggtgatgcactatgcccagtacgtcctcctggcgctgggctgcgtcctgctgctggtccctgtcatctgccaaatccggagccaagtaggtgctggccagagggcagcccgggctgacagccattcgcttgcctgctgggggaaaggggcctcagatcggaccctctggccaaccgcagcctggagcccacctccagcagcagtcctgcgtctctgccggagtgggagcggtcactgctgggggctgcgcagcacgcttgcgtcttttgcatgccgcgttgccactactctgcctgttctggaaggcctgggaccctcccttggagggggcacaggtgggctttgagtaatgagacctggtacttgcatcatccattcatcaagtcagcacccggggatgccaggttctgttaggggcgaggggacgtacagcagtagaggagacagctgagatccctgctcagggggattgaggggggctggcatcccagccggggagacagatgaaaaccaagtaaatcagcagaaaagataatttcactcatgataggagctgtgaggggttagagccaaatagaaatacagcgtgagccacgtgtgaggttttcagtttaaattttctaatagccacttaacagtcaaaggaaacaggtggaattaattttaatcttatttaacccaaatatatgcaaagtattatcacttcaacatgtaatcagtataaacggcatcaatatttttgcagtgtttttgcatgaagtctttgaaatcctgtgtgtacgatacatgtgcagcaggtctcattttggactggccccgtttcaagggctcaccaactgaatgcagcttccagactggagagtgcatgtctggagcaagtggggacaaggacagatggagcttcaggaaggcctctctgaagaggtagatagtgagctttgacatggaggccagggaggcactcagcacacagccacatgaggaatgctgcctggagcggccactgcaaaggccctgtggcagggacaggcaaggcacattggacggtcaggtagggccagggtggctggaggggagtgagggcagggacagaggtaggaggtggtgtctgagagtggacagggcgggccacccagggcctcgtggtgcacagtgagcagtttggaactgattctgggagtgacagaggcattggaggcttttaaagaggggaatcactaggtcagctgctggctggggaatgggccccgggctgggaggggtggaagcctgggcccagcggggaggccccagtgcgtgaggaagtcgatggcttgaacaggatggggcagctgctatcaggagggaacggaagtggggaagagctccagccctgggcttcagacctccagaagcagcaggaagaggggtgataacagtgtccctccttgcttcggggtcatttatttattcattcatgcattcactgcaaggccctttgcacaggtcaggggatgcagatgaccagaacataagatctgcagcaaagatgggcaaggcaggcctttaggcaagttactacagtcacacgaaggacaggagagctgtgatcacagagctcaaggggcagtggagatgggcgagtggctgccatggcaggggaagggatgctgcccactggcaggtcatcaggaaaggctgtttttggatgcatggaccagaaagccactctctgaggtggcccccacctgcatcatcctagggccacaggccgaggccttctgaggggccttggggctgccccgctgctctgctggtcttggctcctctgcagcacctgcttcctttagcactggtgaatgattcttcctcttcccctgtctcagggaaggcttgcctgcttccatgcttgcatgctgggtgacaataaagcattcctggttcttcaccttggctttcagacctgaaacccgacttcctttcaaaattcctgtcctcggggggaaaaggtttccacaatgtgagatggtagcctggacaccagctgtcatcatgttgctgctctagcgtttgagctcccgatgaacaatgaccattgggtccaaccagcccttttgggagcccccttctctgttactgccccagggggagccagaacccagcagggctgtgactccagcgagcaaaatggaactccctccagtttctagactgaattatgtagggaggacagaaggactcagaacccacactcccagaccatgaataccttcccgtggcagagcatcaccataggtgtccacaagtgacgacgcacagccacatgagggggtccctggggactggctgagggactgggccagaggaggccatgacagcctcatccctctgtctccttctgtctgtctccaaattgtccaccagaatggggacagggaaggagggtcaggaagcacagaaggtctaggctgtggctagggtccctttccctgccgcagcccccaaatcagcatcccaccctcaaatccagtaagaatgctacgatcggcagtgtggctccctccctgcaggtttcactggaggccacgtaagtgaaatttatcccattatgtgtgttttgatgtagcaggaccttaccagttttttttgtttttttatttttattttttttggtttcttttttgagatggagtcttgctgtgttgcccaggctggagtgcagtggcacaatcttggctcactgcaacctccacctcccgggttcaagtgggagcctcagcctcagcctcagcctcagcctcccgagcagttgggattacaggcacctgccaccatgcctggctaatttttgtatattgagtagaggcggggtttcaccatgttggccaggctggtcttgaactcctgacctcatgatctgccgccttggcctcccaaagttctgggattacaggtgtgagccactgtgcctggccggccttatcagtttttatgtaatttgtcctgatttaaaaaaaaaaaatcacatgcgggtaaactcaacatattttaatttctctttagagaaattttccacttgagccaggtatggtggctcttgcctgtaatctgagctactcgggaggttgaggtgggaggatcacttgagcccaggagttggaggctgcagtgagccatgatcgcaccattgcactccagcctggacaacagagtgagatcctgtctcaaaaattaaaaaaagcagtaattttttcttctcaagtcattcttttaaaataaatcaaaagtattttaacagaacaatctgttcctcgttgattttaaacagccccccagctaagtccactggttgtcggtctccatggcccatctccccaccttgcttcctcgctggcttaaattttcaagtggacgagcccttttcagcttggcttgtccacctcccaggtgtgtttcctgaagatgcttgtacttatgtctaagagcggcagctccccacatctcagccacctgcaatcgttgagggttgttggactctaaacttatgtgcctttcctgtttcctctttgccttttgcaaattgaagaaccgtgtaaaaccatttttatgtggcttcaacgtcaactataaattagcttggttatcttctaggagaaatgctatttattttggagtagtagtaaaaagggctcaaaggataaggaggccattcaggcctattctgaatccctgatgacatcagctcccaagggctctgtgctgcaggaagcaaaactgtaggtgggtaccaggtaatgccgtgcgcctccccgccccctcccatatcaagtagaatgctggcggcttaaaacatttggggtcctgctcattccttcagcctcaacttcacctggagtgtctacagactgaagatgcatatttgtgtattttgcttttggagaaactgcccttcctatgttctgagtgaatagcagtttttttgatcccagagggcaacttgtattctgtgggctggtgcctatttgcaaggtcacattagaaagacaggagcaaggcttaggcctgctgcttctggaatctcttgtgcaatagactcccctggggaagtctgctagaaatgcagatccctgggcagccttctagccttctggaataggatcatggtgggaccctggaatctgtattttaatggaccctaatgagattctgatgtagaaacatgtttgagaggcattgatctaaatctgggatgactggccaggtgcggtggctcacacctgtaatccagcactttgggaggccgaagcaggtggatcatttgaggtcaggagttcaagaccagcctggccaacatggtgaaaacctgtctctactaaaaatacaaaaaaaattagctgggtgtggtggcacacgcttgtaatcccagctactcaggaggctgaggcaggagaatcgcttgaacccgggagatggaggttgcagtgagccaagatcgtgccactgcactccagcctgggtgacagagtgagactccgtctcaaaaaaataaaactaaaataaataaataaataaatacatctgggatgactgaccaagaacaaagaatgtaggcatcaactgaacaccaactgtatacctgggactggatctgagggtaggattgccagattgagcacaaacaaacaaacgaaacacaagaaacaacagaagggtgcctgttaaatatgaatttctggtaagcaataagtaatttttattgtgttcctgtgcaatgataggacgcacgtatcctgaaaacctgtctgtagttcacctgaaattcacatttaactaggcgttctgattttatgtggccgccctatctgctgggaacataggctgatgcccctgggggttctgcgtttccttggccaggttcctgtagggctgaggtcatgggggagccgtggccagggatggtgtccttgccaggggaggtgacgggcagagctgcaggccctacaacttggggttgggcagggatgagtcgctctaccgtggtgcctctgataatagctgttattttagtttctgaaaaatgtgctgccctcaagagcttctgaggctaggcctacttgggtgaaaatagctttccagggagccacattgtggggacgtgaggcagcagccccactctttggggccacttggctgtctctaactcatctcacttgccagggctggacaaggagatgaaaaagaaaatgccaaggggtgggcaggcaggagcctgttggcgttggcaggcgctgccagccctgtgtcccagtcaagctctggggcgcccttcctgtccatctgggagtagggggtggagtctgaccatgttggggtggagtgttaatattaggagaggatcctccctgggacagggtccccaggcttgggggcaaggccttctgcctggacccccttcctttcctctctcccaggattcctccaggacaccgtagtgctgtgcacggtttggccccatcggtgtgcctgctccttccagccactgctcccttctgcagaaacttgcctgggattcccagggtgcaggggtgggggctggtcaggggctggtcagggcctggtcagtgtagagcagggagcttttcacttttagcatagatagagtggccagggccccatggctgcacctccctggacataaccaggatgtcctgtcatctgccccccaaacaaaactggggtctcccctttattttgccaacagaatccaatttttaggtgatgagacaagtgtttgacttgaaaagaccctcctgccctgcctcctggaaggtctggagcccagcccagcgccccggatcccctaggcatgtgaaacggggaatgcagtgtcctccagtggctggctgcagcttggggtgggcacctgggtggtggctggtggtccccctgcaggccactgctgccccctcttgggtcctgttctgagtctcaggcctgagtccctggggaaggccccacacctttgccctgtacctgggtatggggatggccctgaggggctgccttgcttgggagaaggggggaaaacagatatttttatataaataagaaaaagacagcccctctgggcagatgaggcctgctgtagggcagggggcttggtaaactgtgtgtccactggtctgtaacccttcagctgggtccttttgtgcagtgaacagcctggacaactgtccaggtggcccttcagggatatgttcctggacctttcttagcttctcaccgatctttcttccacgccaagtccatgttcctcagtcaaacaagtggcaaagaggaggaggaggaggggaaggaggaggaacctgcttcaccctctggcacctgcgggttttgttccacgtgtcttccttgggaaagacaaggggttcttttacagcctaggggtggtttcccctttctacttctgagtgagaccttctcaagtcacggctctttgggcccacatggctaaggtctagccacctgtgggtgtcctgtgctgcctcagtgggtggtgtgggggcggggctgacctcccccgcgcctggctcagtgcagcagaccctggcccctgtgcccgctctctgccctgagcaggagtttgattttcctaccccgtggtgaagcaagcacaggtgggcggaggtgggcagcggtttccagccccagccaccggggcagggaggcctctgttgctcagggcaagggaggcagggggcttagtgggacgaaggctcaccccacactcttatcattagcattatctgtatttttaatttttaagttgagaaattttctacaactgtcaaactagacaaatgacagtatccagttcccctcacccagacgcagccattgctgacagctgtcagtgttgaagatggccagcatctcatgcccttggtttcactcgttccctgggtggccctcgtccccctccccacgtcctgcgccccgcataccctgagcagccatggccaggaacttggcacgtgggtttgttttttctgaatctgcatgtgcgcagccatgagcatgaggtcactttttgaatgtgaccgaagctgcatcctgctgcgtgtattgctgtgtggctggctttcctccctgtcttctgttcaggaatactgttcaggctgaataccgtcctgtgacatgggtttaaaaacacaggccaggcatggtgtctcacgcctggaatcccagcgctttgggaggctgaggtgagaggatcgcctgagcccaggagttcgagaccagcctgggcaacatagacctgatctctacaaaaaattaaaaaatgagccgggcgtggtggtggcacgtgtcattgtcccggccacttgggaggccgaggtgggaggatcacttgagcccaggagttcaaggccgtggtgagccatgatggcaccaccgtactccagcctgggcgacagagagagaccgtctctaaaaaataaaaaataaatcaacacataaacatacgttctcctcctgagggacagagcttgccccggttgttccatgttgactgtgctgcacacaggccgccccccttgctctgcccctcactgtattaagtctctttgggcctcagtttctccatctctaaaggaggtcggggaggccaggcgggtgttgagtgagatgaagaggcccttggagtcattccaggagtctataggtgactccagtctcttctcacttctgacagcctggtggcgggggtggagtctctgctggggatgtgggtacagggctgtggtgggcggggatgagggtggggtttggtgacagggcgtgggtggtcacccagctttgcctttctccacagggtcctgaggacaccgtgagccagccaggcctggccgctgggcctgaccggccccccagcccctacaccccgcttctcccggactctcccagcggacagccccccagccccacagcctgagcctcccagctgccatgtgcctgttgcacacctgcacacacgccctggcacacatacacacatgcgtgcaggcttgtgcagacactcagggatggagctgctgctgaagggacttgtagggagaggctcgtcaacaagcactgttctggaaccttctctccacgtggcccacaggcctgaccacaggggctgtgggtcctgcgtccccttcctcgggtgagcctggcctgtcccgttcagccgttgggcccaggcttcctcccctccaaggtgaaacactgcagtcccggtgtggtggctccccatgcaggacgggccaggctgggagtgccgccttcctgtgccaaattcagtggggactcagtgcccaggccctggccacgagctttggccttggtctacctgccaggccaggcaaagcgcctttacacaggcctcggaaaacaatggagtgagcacaagatgccctgtgcagctgcccgagggtctccgcccaccccggccggactttgatccccccgaagtcttcacaggcactgcatcgggttgtctggcgcccttttcctccagcctaaactgacatcatcctatggactgagccggccactctctggccgaagtggccgcaggctgtgcccccgagctgcccccaccccctcacagggtccctcagattataggtgcccaggctgaggtgaagaggcctgggggccctgccttccgggcgctcctggaccctggggcaaacctgtgacccttttctactggaatagaaatgagttttatcatctttgaaaaataattcactcttgaagtaataaacgtttaaaaaaatgggatgcctgcctctgtgacagccttgtttgctgaggtcgtgggggtgggggcctctgggaagttccgggctcctcttctcttggtcaatagctcctttctggtggctgccaagagcgtctctcccagggccgggctgctggcttaccttcctgttgttttcaaatttcaaccttgtgcaatgttgagtttcatagaaatactgcatgagtacgcccttgtttagaagcagcagggtctgagtcccatcccacagcccccagtgcagacgcttttgccacttttgcatggggccccctggatgtgtttctgtgcatttatctacaaatcctggtgcccataggacatgccccgtgttgttctaggcctttgctttctgctcgttacataaatggtgaagaagagaagcgggtaagagaacagattggagccatctaaaagttctcatcttaagtgtagatcattgcaaaggatggaattttctccgattgtcatcatcgttgatgtttgaatatgagaccatttcatcagtatttaagtgtgcccgctgggatctaactaggagaggagagggtattcactgccgaacatttcaaagaatatacgaacaagctcttttatggtcagaaatgttagcccttttccccttaaacttgtatttcctttcttcttccctcctaaaattttatctaaatgatatttatatttgatgcttttaagccttttattaatcactcctatacttgcctgcaacataaatatataagttgaagcaaactttttttttttatttcttgtgaccatcaagggtaaatttttttaggtctggggctgccataacaaaataccatcaaggccgggcgtggtggcacacgcctgtaatcccagccctgtgggaggccaagaccggaggattgcttgatgccaggagttcaagactagtctgggtaatatggtgagaccctcatcaatacaaaaaaaatacaaaaattagccaggcgtggtggtgggcgcctgtggtcccaactactcaggaggctgaggtaggattgctggaagccaagaggttgaggctgcagtgagctgtgatcatgccactgcactccagcctgcgagacagagtgagacactgtctcaaaaagaaaaaataccatcaataggtggcttaaaccatttatttctcacagctctggaggctggaagtctgagaccagggttccagcagggttgggttctggtgaggcgtctcttcctggcttcagacggccgccttctctgtgtcctcacatggcctttcctcggtgtgaaagggggaagagagagggagagcgagagctctgtggtgtctcttataaggacactgatgctatcagatcagggcctcatttaattattttcttagaggccccatctccagacacagccacactggaggttagggcttcaacaggaattttgggtcaacacaaacatttagcctataccatctggattgcctttcaagtctcaggacacaattggtcaaaactatattactatgttttatgtgacatatcaaagtagcaaaattttattggaatgcatgtccttttggtatgcattttatatatctttttcatttacagattagagttgtgtgtgagtgtgtgtacaattccatgaattttgacatgtttatagagttgagtcattacccctacaatcaagacaaaacaatttcatcatcccccaagatttcctcatgtcttccctttgtttttgtttgttttacagtgggctcccataatttttttttttttttttttgagacagagtctcgctctgttgcccaggctagagtgcagtggttcaatcttgactcactgcagccttcacctcccaggctcaggagagcctcctgacttagccttccgagtagctgggaccacagatgtgtgccaccacacctggctaattttttttttgtagagatgggggtctggctctgttgcccaggctggtctcaaacttttggcttcaagcattagtcccacctcaacctaccaaagtgctgggattagaggcgtgagccactgcacccagcctgcgacctgtgctgccttcctcccactttgtagggaagtccctcatccccatgcttagcccttggccactagctatttttaccttttccagaatgttctaaatgggatctacagcctgtaaccctctgagcctggcttccttcactcagcactgtctctagatgcatgcctgttgttgtgtgtagcaatagttcctttcttttcactgctgagcagaactccatggggtgcacacaccagtgcttttcagccgttcacttattgagggacacgtagagtggttgcagcctttggcaattgcattagttggttttcacgccactgataaagacatacccaagactgggtaacttttaaagaaaaaaggtttcatgaactcacagttcatatggctggggaggcctcacaatcatggtggaaggcaaaggagaagcaaagtcatgtcttacatgggaccagagaagagagaatgagagccaagtgaaaggggaaacccccgatcaaaccatcagatcttgtgagacttactcaccaccaggagaacagtatggggttaaccgcccgtatgattcaatgatctcccactggctccctcccacaacatgggaattatgggaactacaattcgagatgagatttgggcagggacgcagccaaaccacatcagcaactatgaacaaagctgctgtgaacgttcatgtacagatttgtgtgtgaaggcgtacgttcatttccctggggtgtatacctcggagtggagctgctgagtcaaactggagctctgcgtttcacttttgggggactgccagtttcacagtcgctgtaccaggctgcattcccatcagctctgcgtcctcaccagcatcttggtgttttcagttttaaaaaacttcagcccttcgtagtggtttctcattgtggcttttatttgcttagaaatacttcttgtcctgagatgagtgggacttcctctccacccccaattaattcatgtatccgtgaatgactgtcacgtattgctagaatgaaaccaatttttaccatcaattctttgtccctgcaagtgcagagaagccttgttttcataaggaagtcactgggagtggaattcttatactccttctgggtagtatgcgaatgtcacacggcgatctgtcattggaagcgattctcactgatctcccagcagacaggtccgtttgacctttcttcaaatttgtagaaagcagcaaagtggaaaccaccggcttgcaaaagcatttcttacccaatctttagatgggttctcgaaacctgtgtccgggaagttccctctgattggggctggaggtcagggaggctttgcccgttggctgtagagtggaggggtggggggtcttgtgacctgcccggggaaatggcaggcgagtgacaagctcaggagagagtccaggccccgaggatggttcccttcaaactccccatgtctgatcctctgggaagctgaggccagctttggttatttgatagccacggtgaggattttgacttaatctgtgtatgcaacacatcacagacagttttaactcttgcattcaagtctacctgctcataaaacagaaaaaaagacaggccccagaaggcattcggtttttttttttttttttttttttttttggagacagggtctcactttgtcacctaggctggcacaatcactgctcactgcagcctcaacctcccaggctcaggcgatcctctcacctcagccagcctcccaagtaggtgggattataggcctgtgccactacacccggctaattttttgtatatttttgtaaagatggggtttcgccgtgtcgcccaggctgatctccaactcccaggctcaagcgatccgcccgcctcggcctcccaaagtgctgggataacaggcatgagccactgccctggcccttaagtcattcttgtgtttgtgtgtgtgtggggtgtgtgtgtgtgtgtgtgtgtgtgtgtgtgtgtgtgtgttcccgagggacttagcctcccgtgtgtctcattgggtgaacatcttgcttctgagtgaggtttgatttttttgtagggtgtgcgtttggacacatccttggtcttaagcccagccaacgaccttagccagggctcagggagggaagcaccgcctgccccacagctggagggctggggttcgggacacccggtcgagcttcagtgtctctgattctgagcatctttgactctgcgagactttcttctcatgccttcacttcaggcgccagcccctgccaacgatgggactccactacttaccatgttgatttaatttggcttactttttttcttaaagaattttattttaaaaggaaggcagtcatatctgtgaaattatgggtcctttgggcaagtaatagttttccagtcgccattaaaataaatacctaactattaaggacgttcctcccagtacctcgaagcagcctgctacctgcaatctctgcaccatcccatgattgtgtcccatgcacccttcttcctgctcggcctgcatcgcccctgcgtggccttttcccccctctctgcctctctcagtcttcgccatcatcaaaggcgcaattccagccatgccctctcctccaggaagcacccctcccccatcactcctgcttgctgttcttccctgtctcaggactcctggggcactttgtatctcagttgatactagaatgttctagaataccagaagtcctgacaccagttgctgtaaccccaaactccaaggacctgcagcataaaccccggtacatgcccttgtgctggaaacgaatatttttggccggggcggttactcacattccttagtactccttggctcacgcggacacccattctttcaacacatacttatccagtgctcactacgcgctaggcacagggggtgcaattgtggaccagacagaggcggcccttcctctcaaacaactttacagttctgccacttactagctgtgggaccctggacaagtcacacagcctctctggagacctactgttctctcctttaaagcaggtgactcagatctgctttgcagggacgtctcctgctttgcagcgatgtcacccaggagagatgggtgaagtggatagtgaatggagtgggccagggcggtggtcctcggctgaaaacaatgcctctcggggtcagcgtggggctcaagaggtggcggccccgtgggtgggtccagggccagggaccctgtgtccgagcccctgccctggagccatcctgtctcacctgaaggctctgccagtctggtccactggcctcccggctcccacgcgtgtcccgagccgtccattctccaggtagcggccctgaaatgttaatctgtcacaagggtcatctttgcttgaattgtgggtgacttttccccatcctgggggtaaagtccccccgacttgtctctccatccgcgatcccctgcaatctggctgcagcacgcgagacttcaggacgattccgagctcggccactggggggcgagctgtgcacacaggtggtccagaggctgctgcctgggaggggctgcggatcacccggttcctggagcggagtggattgattttaaactggggaagctgtggtccacagcctggcttcggaaacccgtgacccctagaaattgtattttacgtgtgtgtctgggcgttttattctgggaagcatttcctcaagtcttcagattttcaaaggggtcttaaccctttctctctggggccttgggaacaagagtgacaaccctataacagggcgaccagggtcacacgatgtctgctcctccttagcgtgctactcccagtacctgcgtgctactcccagtacctgcgtgctactcccagtacctgcgtgctactccctgctctgctcaagttgctgggtggccttggagcaattcataacctctctgagactgccgtgaggtgggagtgaagattgctgtgtacgaatctttgagaacccctgtaagggtggaatcgaaatggacgtgtgagggctgggcgcgggggctcacgcctataatcccagcactgtgggaggccaggggttcgagaccagcctgggcagtatggtgaaacaccgtctctactgaaaatacaaaaattagctgggtgtagtggcgggcacctgtaatcccagctagacgggaggatgaggcacgagaatcgtttgaacccaggaggtggaggttgtagtgagccgagatcatcccactgcactccagcctgggtgacagagtgagactccatctcaaagaaaagaaaagaaaagaaaagaaaagaaaagaaaagaaaagaaaagaaatggatgtgtgagcattctgtacacagcctgggacgattatgaaagctctcaaatgctgagcctccagcaaacatttatcacacacctactgtgtgcagagcacttgctgggctctgagagggagtcaagctctgagaagtctgtgtcgatttgttcattccttcattcagcaaatgctgtttgggtgctcactgtgtgtcacacaccctcatatttattgcgaatcggcttgggttaggttccccagaagcagacactgagaccaagattcctggccagggagtgtcccaggagggcaaaggggactctagcagcccagggtcacggacagctctcaaaggcagaccaacaggtcttgggttttggatacaaaaatgctccaaaatcaggggtgtgcaaatacagtaaaaagaggattcatttggatctgcttagaacaccaagggtatccgcttcagaaatacagaggtgaccgggtgcagtggctcacccttgggaggccgaggtgggcggattgcttgaggtcaggagtttgagaccagcctgggcaacatagtgaaaccccatctctactaaaaatacaaaaattagccaggtgtggtggcacacgcctgtaatcccagctgtgggaggctgagccacaagaatcggttgaacctggaagcagaggttgcagtgagccgagatctcaccactgcactctagcctgggcgacagagtgagactccatctcaaaaaaaaaaaaaaaaaaaagaagagaaaagaaaagaaaaacaacaacaacaaagctggacgaagctagaaagctccctgccctcacaaacttgccttctagtgggagagacagctggcgagtaaatgcatgagtaaggtcacgtatgagtaaggtcactcataagtaaggtcacacatgagtaaggtcactctgggaagcaacgatgccaggatagaaagaagagcagggggtgcaccggagaagaggtgctgggcaggggggctgcttagatgagagcacatttccggaagtttcctctgagaagtgccaactcctgaaggcttcatgggaatctggagaagagcactccaggaaccgggaagtacatgtgcaaagggcctggggtagcaacacgcagaacagaaacggtgcgctgtggctggagcccagagagtgggactgagtgggagaaacgcaaactgcttttcctcctctgttcaccccacaacaatcaacacagaagacttctgtgaccaaatatggggggctccccccacagcagatcaaatgaacacctaattctgcagcggatgccagctgggggccctctgattcaactcaattctgccgctgtctacctggaggcagtgtcagaccccacaggtcgagggttcagaccccagggcggccccttactcccgatgcccctctcaagccctgggatgtgtcacctgtgcttctcacagaccagctgtgaattggggttcccacgaccctgtctttgggttcaattaatttgttagaacggctcacagggctcagggaagcactgagcttatttattataaaggatgttagaaggatacagatgaagagatgctagggagaggcatgggggaggggcacggggaaagggcatggggaaggggcatggagctgccatgctctccaggacaccaccctccaggagccttcccatgctcaaaaactctgtcctcttgagtttttatggaggcttcattaggtgggcgtaatttttaaaattatatcattttaaatttttaaatgtttaatttttgtaggttcatagtaagtgtatacagttgtggggtgcatgagatgtgttgacacaggcatgcaatgtgacgtaatcacatcatgggaagggcgtatccaccccttcaagcatttagcctttgtgttacaaacaatccagttacactccttcagttatttaaaaatatacaatcaagttattcttgactatagtcaccctgttgtgggatcaaatagtaggtcttattcattctttctctatatgtatatggtttttgtatacatgggcatgattgattaaaccacaggccattggtgatcagtttgaccttcagcctctctcccctcactgctggaggttggggactgggctgaaagtcccagtcctgtagcgctgacttggtttttcctgagaccagtccccatcctgaagctgcctaggggctgctggccaccagtgagtcattggcaaactaaacactttggagattccaaggattttaaggcagaagaccaaataaatattttacacgatcacagtgggagggggttggagggagatggaggtggagagctggggggcctcgcagttaggattttaagtacagtgggaaaccactggagatttttccatcagggagggctgcgtttgctgtttctgctgtgggagaggctgcgggggcaggcgtggatgctggaggtctggctggaggcagtggccctcctcctggtgacagatggtggtggtggtggtggtggtggcctgggccagggcggagcagtggatgaagaagggacagatgcggggtgtatttttaggggctggagctcatagaacatggtgctaaactggatgtgggaagggaggggtgaggacgcgtccagtgagactctcaagtgtctgagcctgacggccagggggagggaggggctgctttttgtttgttagttttcatttgtttttgtttgcttgtttgttgtttgttttcttttttgagacagagtctcgctctgtcgcccaggctggagtgcagtggtgcaatctctacttactgcaacttccacctcctgggttcaagcgattctcctgtctcagcctcacaagtagctgggatcacaggcgcccgccatcatgcatggctgatttttgtatttttagtagagacgggatttcaccatgttggccaggctggtctcgaactcctgaccttgtgatctgcctgcctcggcctctcaaagtgttgggattacaggcatgagccaccgcgccaggccattttcatttgtttttgagacagggtctctgtcacccaggcttgagtgcagtcgtgcgatcatagctcactgcagcctcgacctcctgggctcaagtaatcctcctgcctcagcctcccgagtagctgggtctacaggcacatgccaggacacctggctaatttttaaattattattattattattattattattattattattattttagaaagagagtcacactatgttgcccagggtggtctcgaactcctggcctcaagcgatcggcccacctctgcctcccaaagtgctgagattacaagtgtgagccagagggaggtgccactaactgaggagggaggcaggaaggtggggctgggagcaagtagggccccgatcccccagtgcagacccgggcttagctcagcatggattgaatggctgtgaactccctgtgggggctgcagagggaggagtcaggacactgaggttgttgtgtcacccacaccggattcatcccctatcccggtccacccacccccagggcatctggaatgtgagaggccagagagagaaagcaccaccaggaatcccaacgtagcaacagcacaaataacagcagccccttttgatgctcaggggagcacatgtttcatggagctatccagtgacctgtacagcagggagacttgaggggaccatttcacagatgggaagacggaggctgaggggtgaggctatatttgcaaggtggatcttttttgtgtgtgtgagcaattggtcgcgctgtctccctctttagactttacgctgctgaaggcaggcaccgagttctgtggggttcgtggtccatgggcatgcatgcaaatcagtctttgctgagttaatgaataaatgatctggggtgtagcgaggctggggatgtggttgcgggaggggagttctgcagacctgcccagggcctgccagaggctgcacgtgcggattgtggccgccagggggcgctgtgggtccagccttcagggcggccccagattcagggaggccccagcagcccgggtctctctggcggtcccaggggctgggaaacgtctgttgtttgaggctctggacatagcaaagataaaaaatgaaaaactgatgaactaaggctgcaagaactatgttctcttgtatgtttacatgtaaaaatttaacagcttccatacatgaaatagtcatgcaatatatttttgtgaagttacaaggcttgcaaaattcttaatgaaccatgtccagagagggcaggatttagaaaggggaaattatcacagttcttttaatcttggtggtgtggggctctaggacagtacattcaagatcttctccaaaatctgatttgtggtgtttttgtgaactcagagtccaggccaaatggctggctgtggtctcccagggatgggcaatcctgatccaaacctcagatgcccagaagatataaaatctcaacactgggccaggcgcggtggctcacacccctaatcccggcactttgggaggccggggtgggcagatcacctgaggccaggggttcaagaccagcctggccaacatggtgaaaccttgtctctactaaaaatacaaaaattagctgggcatggtggtgagcacctgtaatcccagatactgggtaggctgaggcaggagaatcactggaacccgggaggtggaggttgcagtgagctgagattgtgccactgcactccagcctgtgcgacagagtgagactctgtctcaaaaaaaagaaaagaaaagaaaaaaaaagaaaatctcaatgccggccactcccagcccagtcaggcaagctcagctctggcatcctggcttgctctcctggaacagactgttgctagcattcattgaatctttctgagtgccgtgcactattttaaacccttggcatatgctcacttagttttcatcataacccaggcgagtgctgttatcatcatcatcttcattttacagatgaggaaactgaggcacagagaggcgaggtcattgtccaaggtcttatggctggaaaggatcggagtctggatatgaatattggccactggttggggggcatacatgcttatcagctactctgcatacctcctcattgactgggaaccagagcttgctgtgggtgctggctgaggcatcccactttatcttatcccttatcccaagtgaaactcaacttgggaacccagcttcaagaaacataatttccaggcaaaggcaatgaatgcacacaggtcctggctctagagcttctgaggagcctgggagaggaaaggaggttgcaaggctcatttcccccaaatccagtcccagctccatctagaaagaggccccccgcataccaagcatgtgtccaatcactccagaaaagcccctggcaggggagcatccaggctcattccagagaggtcaagaatgggaggggaagaagaggagtaagaataaacatgtctaaaaatagtgcttggatctccgaaacccacaacaa

SEQ ID NO: 104 - DNA, 110346 bp, Homo sapiens
ttgttgtgggtttcggagatccaagcactatttttagacatgtttattcttactcctcttcttcccctcccattcttgacctctctggaatgagcctggatgctcccctgccaggggcttttctggagtgattggacacatgcttggtatgcggggggcctctttctagatggagctgggactggatttgggggaaatgagccttgcaacctcctttcctctcccaggctcctcagaagctctagagccaggacctgtgtgcattcattgcctttgcctggaaattatgtttcttgaagctgggttcccaagttgagtttcacttgggataagggataagataaagtgggatgcctcagccagcacccacagcaagctctggttcccagtcaatgaggaggtatgcagagtagctgataagcatgtatgccccccaaccagtggccaatattcatatccagactccgatcctttccagccataagaccttggacaatgacctcgcctctctgtgcctcagtttcctcatctgtaaaatgaagatgatgatgataacagcactcgcctgggttatgatgaaaactaagtgagcatatgccaagggtttaaaatagtgcacggcactcagaaagattcaatgaatgctagcaacagtctgttccaggagagcaagccaggatgccagagctgagcttgcctgactgggctgggagtggccggcattgagattttctttttttttcttttcttttcttttttttgagacagagtctcactctgtcgcacaggctggagtgcagtggcacaatctcagctcactgcaacctccacctcccgggttccagtgattctcctgcctcagcctacccagtatctgggattacaggtgctcaccaccatgcccagctaatttttgtatttttagtagagacaaggtttcaccatgttggccaggctggtcttgaacccctggcctcaggtgatctgcccaccccggcctcccaaagtgccgggattaggggtgtgagccaccgcgcctggcccagtgttgagattttatatcttctgggcatctgaggtttggatcaggattgcccatccctgggagaccacagccagccatttggcctggactctgagttcacaaaaacaccacaaatcagattttggagaagatcttgaatgtactgtcctagagccccacaccaccaagattaaaagaactgtgataatttcccctttctaaatcctgccctctctggacatggttcattaagaattttgcaagccttgtaacttcacaaaaatatattgcatgactatttcatgtatggaagctgttaaatttttacatgtaaacatacaagagaacatagttcttgcagccttagttcatcagtttttcattttttatctttgctatgtccagagcctcaaacaacagacgtttcccagcccctgggaccgccagagagacccgggctgctggggcctccctgaatctggggccgccctgaaggctggacccacagcgccccctggcggccacaatccgcacgtgcagcctctggcaggccctgggcaggtctgcagaactcccctcccgcaaccacatccccagcctcgctacaccccagatcatttattcattaactcagcaaagactgatttgcatgcatgcccatggaccacgaaccccacagaactcggtgcctgccttcagcagcgtaaagtctaaagagggagacagcgcgaccaattgctcacacacacaaaaaagatccaccttgcaaatatagcctcacccctcagcctccgtcttcccatctgtgaaatggtcccctcaagtctccctgctgtacaggtcactggatagctccatgaaacatgtgctcccctgagcatcaaaaggggctgctgttatttgtgctgttgctacgttgggattcctggtggtgctttctctctctggcctctcacattccagatgccctgggggtgggtggaccgggataggggatgaatccggtgtgggtgacacaacaacctcagtgtcctgactcctccctctgcagcccccacagggagttcacagccattcaatccatgctgagctaagcccgggtctgcactgggggatcggggccctacttgctcccagccccaccttcctgcctccctcctcagttagtggcacctccctctggctcacacttgtaatctcagcactttgggaggcagaggtgggccgatcgcttgaggccaggagttcgagaccaccctgggcaacatagtgtgactctctttctaaaataataataataataataataataataataataataatttaaaaattagccaggtgtcctggcatgtgcctgtagacccagctactcgggaggctgaggcaggaggattacttgagcccaggaggtcgaggctgcagtgagctatgatcgcacgactgcactcaagcctgggtgacagagaccctgtctcaaaaacaaatgaaaatggcctggcgcggtggctcatgcctgtaatcccaacactttgagaggccgaggcaggcagatcacaaggtcaggagttcgagaccagcctggccaacatggtgaaatcccgtctctactaaaaatacaaaaatcagccatgcatgatggcgggcgcctgtgatcccagctacttgtgaggctgagacaggagaatcgcttgaacccaggaggtggaagttgcagtaagtagagattgcaccactgcactccagcctgggcgacagagcgagactctgtctcaaaaaagaaaacaaacaacaaacaagcaaacaaaaacaaatgaaaactaacaaacaaaaagcagcccctccctccccctggccgtcaggctcagacacttgagagtctcactggacgcgtcctcacccctcccttcccacatccagtttagcaccatgttctatgagctccagcccctaaaaatacaccccgcatctgtcccttcttcatccactgctccgccctggcccaggccaccaccaccaccaccaccaccatctgtcaccaggaggagggccactgcctccagccagacctccagcatccacgcctgcccccgcagcctctcccacagcagaaacagcaaacgcagccctccctgatggaaaaatctccagtggtttcccactgtacttaaaatcctaactgcgaggccccccagctctccacctccatctccctccaaccccctcccactgtgatcgtgtaaaatatttatttggtcttctgccttaaaatccttggaatctccaaagtgtttagtttgccaatgactcactggtggccagcagcccctaggcagcttcaggatggggactggtctcaggaaaaaccaagtcagcgctacaggactgggactttcagcccagtccccaacctccagcagtgaggggagagaggctgaaggtcaaactgatcaccaatggcctgtggtttaatcaatcatgcccatgtatacaaaaaccatatacatatagagaaagaatgaataagacctactatttgatcccacaacagggtgactatagtcaagaataacttgattgtatatttttaaataactgaaggagtgtaactggattgtttgtaacacaaaggctaaatgcttgaaggggtggatacgcccttcccatgatgtgattacgtcacattgcatgcctgtgtcaacacatctcatgcaccccacaactgtatacacttactatgaacctacaaaaattaaacatttaaaaatttaaaatgatataattttaaaaattacgcccacctaatgaagcctccataaaaactcaagaggacagagtttttgagcatgggaaggctcctggagggtggtgtcctggagagcatggcagctccatgccccttccccatgccctttccccgtgcccctcccccatgcctctccctagcatctcttcatctgtatccttctaacatcctttataataaataagctcagtgcttccctgagccctgtgagccgttctaacaaattaattgaacccaaagacagggtcgtgggaaccccaattcacagctggtctgtgagaagcacaggtgacacatcccagggcttgagaggggcatcgggagtaaggggccgccctggggtctgaaccctcgacctgtggggtctgacactgcctccaggtagacagcggcagaattgagttgaatcagagggcccccagctggcatccgctgcagaattaggtgttcatttgatctgctgtggggggagccccccatatttggtcacagaagtcttctgtgttgattgttgtggggtgaacagaggaggaaaagcagtttgcgtttctcccactcagtcccactctctgggctccagccacagcgcaccgtttctgttctgcgtgttgctaccccaggccctttgcacatgtacttcccggttcctggagtgctcttctccagattcccatgaagccttcaggagttggcacttctcagaggaaacttccggaaatgtgctctcatctaagcagcccccctgcccagcacctcttctccggtgcaccccctgctcttctttctatcctggcatcgttgcttcccagagtgaccttactcatgtgtgaccttacttatgagtgaccttactcatacgtgaccttactcatgcatttactcgccagctgtctctcccactagaaggcaagtttgtgagggcagggagctttctagcttcgtccagctttgttgttgttgtttttcttttcttttctcttcttttttttttttttttttttgagatggagtctcactctgtcgcccaggctagagtgcagtggtgagatctcggctcactgcaacctctgcttccaggttcaaccgattcttgtggctcagcctcccacagctgggattacaggcgtgtgccaccacacctggctaatttttgtatttttagtagagatggggtttcactatgttgcccaggctggtctcaaactcctgacctcaagcaatccgcccacctcggcctcccaagggtgagccactgcacccggtcacctctgtatttctgaagcggatacccttggtgttctaagcagatccaaatgaatcctctttttactgtatttgcacacccctgattttggagcatttttgtatccaaaacccaagacctgttggtctgcctttgagagctgtccgtgaccctgggctgctagagtcccctttgccctcctgggacactccctggccaggaatcttggtctcagtgtctgcttctggggaacctaacccaagccgattcgcaataaatatgagggtgtgtgacacacagtgagcacccaaacagcatttgctgaatgaaggaatgaacaaatcgacacagacttctcagagcttgactccctctcagagcccagcaagtgctctgcacacagtaggtgtgtgataaatgtttgctggaggctcagcatttgagagctttcataatcgtcccaggctgtgtacagaatgctcacacatccatttcttttcttttcttttcttttcttttcttttcttttcttttcttttctttgagatggagtctcactctgtcacccaggctggagtgcagtgggatgatctcggctcactacaacctccacctcctgggttcaaacgattctcgtgcctcatcctcccgtctagctgggattacaggtgcccgccactacacccagctaatttttgtattttcagtagagacggtgtttcaccatactgcccaggctggtctcgaacccctggcctcccacagtgctgggattataggcgtgagcccccgcgcccagccctcacacgtccatttcgattccacccttacaggggttctcaaagattcgtacacagcaatcttcactcccacctcacggcagtctcagagaggttatgaattgctccaaggccacccagcaacttgagcagagcagggagtagcacgcaggtactgggagtagcacgcaggtactgggagtagcacgcaggtactgggagtagcacgctaaggaggagcagacatcgtgtgaccctggtcgccctgttatagggttgtcactcttgttcccaaggccccagagagaaagggttaagacccctttgaaaatctgaagacttgaggaaatgcttcccagaataaaacgcccagacacacacgtaaaatacaatttctaggggtcacgggtttccgaagccaggctgtggaccacagcttccccagtttaaaatcaatccactccgctccaggaaccgggtgatccgcagcccctcccaggcagcagcctctggaccacctgtgtgcacagctcgccccccagtggccgagctcggaatcgtcctgaagtctcgcgtgctgcagccagattgcaggggatcgcggatggagagacaagtcggggggactttacccccaggatggggaaaagtcacccacaattcaagcaaagatgacccttgtgacagattaacatttcagggccgctacctggagaatggacggctcgggacacgcgtgggagccgggaggccagtggaccagactggcagagccttcaggtgagacaggatggctccagggcaggggctcggacacagggtccctggccctggacccacccacggggccgccacctcttgagccccacgctgaccccgagaggcattgttttcagccgaggaccaccgccctggcccactccattcactatccacttcacccatctctcctgggtgacatcgctgcaaagcaggagacgtccctgcaaagcagatctgagtcacctgctttaaaggagagaacagtaggtctccagagaggctgtgtgacttgtccagggtcccacagctagtaagtggcagaactgtaaagttgtttgagaggaagggccgcctctgtctggtccacaattgcaccccctgtgcctagcgcgtagtgagcactggataagtatgtgttgaaagaatgggtgtccgcgtgagccaaggagtactaaggaatgtgagtaaccgccccggccaaaaatattcgtttccagcacaagggcatgtaccggggtttatgctgcaggtccttggagtttggggttacagcaactggtgtcaggacttctggtattctagaacattctagtatcaactgagatacaaagtgccccaggagtcctgagacagggaagaacagcaagcaggagtgatgggggaggggtgcttcctggaggagagggcatggctggaattgcgcctttgatgatggcgaagactgagagaggcagagaggggggaaaaggccacgcaggggcgatgcaggccgagcaggaagaagggtgcatgggacacaatcatgggatggtgcagagattgcaggtagcaggctgcttcgaggtactgggaggaacgtccttaatagttaggtatttattttaatggcgactggaaaactattacttgcccaaaggacccataatttcacagatatgactgccttccttttaaaataaaattctttaagaaaaaaagtaagccaaattaaatcaacatggtaagtagtggagtcccatcgttggcaggggctggcgcctgaagtgaaggcatgagaagaaagtctcgcagagtcaaagatgctcagaatcagagacactgaagctcgaccgggtgtcccgaaccccagccctccagctgtggggcaggcggtgcttccctccctgagccctggctaaggtcgttggctgggcttaagaccaaggatgtgtccaaacgcacaccctacaaaaaaatcaaacctcactcagaagcaagatgttcacccaatgagacacacgggaggctaagtccctcgggaacacacacacacacacacacacacacacacacacacacaccccacacacacacaaacacaagaatgacttaagggccagggcagtggctcatgcctgttatcccagcactttgggaggccgaggcgggcggatcgcttgagcctgggagttggagatcagcctgggcgacacggcgaaaccccatctttacaaaaatatacaaaaaattagccgggtgtagtggcacaggcctataatcccacctacttgggaggctggctgaggtgagaggatcgcctgagcctgggaggttgaggctgcagtgagcagtgattgtgccagcctaggtgacaaagtgagaccctgtctccaaaaaaaaaaaaaaaaaaaaaaaaaaaccgaatgccttctggggcctgtctttttttctgttttatgagcaggtagacttgaatgcaagagttaaaactgtctgtgatgtgttgcatacacagattaagtcaaaatcctcaccgtggctatcaaataaccaaagctggcctcagcttcccagaggatcagacatggggagtttgaagggaaccatcctcggggcctggactctctcctgagcttgtcactcgcctgccatttccccgggcaggtcacaagaccccccacccctccactctacagccaacgggcaaagcctccctgacctccagccccaatcagagggaacttcccggacacaggtttcgagaacccatctaaagattgggtaagaaatgcttttgcaagccggtggtttccactttgctgctttctacaaatttgaagaaaggtcaaacggacctgtctgctgggagatcagtgagaatcgcttccaatgacagatcgccgtgtgacattcgcatactacccagaaggagtataagaattccactcccagtgacttccttatgaaaacaaggcttctctgcacttgcagggacaaagaattgatggtaaaaattggtttcattctagcaatacgtgacagtcattcacggatacatgaattaattgggggtggagaggaagtcccactcatctcaggacaagaagtatttctaagcaaataaaagccacaatgagaaaccactacgaagggctgaagttttttaaaactgaaaacaccaagatgctggtgaggacgcagagctgatgggaatgcagcctggtacagcgactgtgaaactggcagtcccccaaaagtgaaacgcagagctccagtttgactcagcagctccactccgaggtatacaccccagggaaatgaacgtacgccttcacacacaaatctgtacatgaacgttcacagcagctttgttcatagttgctgatgtggtttggctgcgtccctgcccaaatctcatctcgaattgtagttcccataattcccatgttgtgggagggagccagtgggagatcattgaatcatacgggcggttaaccccatactgttctcctggtggtgagtaagtctcacaagatctgatggtttgatcgggggtttcccctttcacttggctctcattctctcttctctggtcccatgtaagacatgactttgcttctcctttgccttccaccatgattgtgaggcctccccagccatatgaactgtgagttcatgaaaccttttttctttaaaagttacccagtcttgggtatgtctttatcagtggcgtgaaaaccaactaatgcaattgccaaaggctgcaaccactctacgtgtccctcaataagtgaacggctgaaaagcactggtgtgtgcaccccatggagttctgctcagcagtgaaaagaaaggaactattgctacacacaacaacaggcatgcatctagagacagtgctgagtgaaggaagccaggctcagagggttacaggctgtagatcccatttagaacattctggaaaaggtaaaaatagctagtggccaagggctaagcatggggatgagggacttccctacaaagtgggaggaaggcagcacaggtcgcaggctgggtgcagtggctcacgcctctaatcccagcactttggtaggttgaggtgggactaatgcttgaagccaaaagtttgagaccagcctgggcaacagagccagacccccatctctacaaaaaaaaaattagccaggtgtggtggcacacatctgtggtcccagctactcggaaggctaagtcaggaggctctcctgagcctgggaggtgaaggctgcagtgagtcaagattgaaccactgcactctagcctgggcaacagagcgagactctgtctcaaaaaaaaaaaaaaaaaaattatgggagcccactgtaaaacaaacaaaaacaaagggaagacatgaggaaatcttgggggatgatgaaattgttttgtcttgattgtaggggtaatgactcaactctataaacatgtcaaaattcatggaattgtacacacactcacacacaactctaatctgtaaatgaaaaagatatataaaatgcataccaaaaggacatgcattccaataaaattttgctactttgatatgtcacataaaacatagtaatatagttttgaccaattgtgtcctgagacttgaaaggcaatccagatggtataggctaaatgtttgtgttgacccaaaattcctgttgaagccctaacctccagtgtggctgtgtctggagatggggcctctaagaaaataattaaatgaggccctgatctgatagcatcagtgtccttataagagacaccacagagctctcgctctccctctctcttccccctttcacaccgaggaaaggccatgtgaggacacagagaaggcggccgtctgaagccaggaagagacgcctcaccagaacccaaccctgctggaaccctggtctcagacttccagcctccagagctgtgagaaataaatggtttaagccacctattgatggtattttttctttttgagacagtgtctcactctgtctcgcaggctggagtgcagtggcatgatcacagctcactgcagcctcaacctcttggcttccagcaatcctacctcagcctcctgagtagttgggaccacaggcgcccaccaccacgcctggctaatttttgtattttttttgtattgatgagggtctcaccatattacccagactagtcttgaactcctggcatcaagcaatcctccggtcttggcctcccacagggctgggattacaggcgtgtgccaccacgcccggccttgatggtattttgttatggcagccccagacctaaaaaaatttacccttgatggtcacaagaaataaaaaaaaaaagtttgcttcaacttatatatttatgttgcaggcaagtataggagtgattaataaaaggcttaaaagcatcaaatataaatatcatttagataaaattttaggagggaagaagaaaggaaatacaagtttaaggggaaaagggctaacatttctgaccataaaagagcttgttcgtatattctttgaaatgttcggcagtgaataccctctcctctcctagttagatcccagcgggcacacttaaatactgatgaaatggtctcatattcaaacatcaacgatgatgacaatcggagaaaattccatcctttgcaatgatctacacttaagatgagaacttttagatggctccaatctgttctcttacccgcttctcttcttcaccatttatgtaacgagcagaaagcaaaggcctagaacaacacggggcatgtcctatgggcaccaggatttgtagataaatgcacagaaacacatccagggggccccatgcaaaagtggcaaaagcgtctgcactgggggctgtgggatgggactcagaccctgctgcttctaaacaagggcgtactcatgcagtatttctatgaaactcaacattgcacaaggttgaaatttgaaaacaacaggaaggtaagccagcagcccggccctgggagagacgctcttggcagccaccagaaaggagctattgaccaagagaagaggagcccggaacttcccagaggcccccacccccacgacctcagcaaacaaggctgtcacagaggcaggcatcccatttttttaaacgtttattacttcaagagtgaattatttttcaaagatgataaaactcatttctattccagtagaaaagggtcacaggtttgccccagggtccaggagcgcccggaaggcagggcccccaggcctcttcacctcagcctgggcacctataatctgagggaccctgtgagggggtgggggcagctcgggggcacagcctgcggccacttcggccagagagtggccggctcagtccataggatgatgtcagtttaggctggaggaaaagggcgccagacaacccgatgcagtgcctgtgaagacttcggggggatcaaagtccggccggggtgggcggagaccctcgggcagctgcacagggcatcttgtgctcactccattgttttccgaggcctgtgtaaaggcgctttgcctggcctggcaggtagaccaaggccaaagctcgtggccagggcctgggcactgagtccccactgaatttggcacaggaaggcggcactcccagcctggcccgtcctgcatggggagccaccacaccgggactgcagtgtttcaccttggaggggaggaagcctgggcccaacggctgaacgggacaggccaggctcacccgaggaaggggacgcaggacccacagcccctgtggtcaggcctgtgggccacgtggagagaaggttccagaacagtgcttgttgacgagcctctccctacaagtcccttcagcagcagctccatccctgagtgtctgcacaagcctgcacgcatgtgtgtatgtgtgccagggcgtgtgtgcaggtgtgcaacaggcacatggcagctgggaggctcaggctgtggggctggggggctgtccgctgggagagtccgggagaagcggggtgtaggggctggggggccggtcaggcccagcggccaggcctggctggctcacggtgtcctcaggaccctgtggagaaaggcaaagctgggtgaccacccacgccctgtcaccaaaccccaccctcatccccgcccaccacagccctgtacccacatccccagcagagactccacccccgccaccaggctgtcagaagtgagaagagactggagtcacctatagactcctggaatgactccaagggcctcttcatctcactcaacacccgcctggcctccccgacctcctttagagatggagaaactgaggcccaaagagacttaatacagtgaggggcagagcaaggggggcggcctgtgtgcagcacagtcaacatggaacaaccggggcaagctctgtccctcaggaggagaacgtatgtttatgtgttgatttattttttattttttagagacggtctctctctgtcgcccaggctggagtacggtggtgccatcatggctcaccacggccttgaactcctgggctcaagtgatcctcccacctcggcctcccaagtggccgggacaatgacacgtgccaccaccacgcccggctcattttttaattttttgtagagatcaggtctatgttgcccaggctggtctcgaactcctgggctcaggcgatcctctcacctcagcctcccaaagcgctgggattccaggcgtgagacaccatgcctggcctgtgtttttaaacccatgtcacaggacggtattcagcctgaacagtattcctgaacagaagacagggaggaaagccagccacacagcaatacacgcagcaggatgcagcttcggtcacattcaaaaagtgacctcatgctcatggctgcgcacatgcagattcagaaaaaacaaacccacgtgccaagttcctggccatggctgctcagggtatgcggggcgcaggacgtggggagggggacgagggccacccagggaacgagtgaaaccaagggcatgagatgctggccatcttcaacactgacagctgtcagcaatggctgcgtctgggtgaggggaactggatactgtcatttgtctagtttgacagttgtagaaaatttctcaacttaaaaattaaaaatacagataatgctaatgataagagtgtggggtgagccttcgtcccactaagccccctgcctcccttgccctgagcaacagaggcctccctgccccggtggctggggctggaaaccgctgcccacctccgcccacctgtgcttgcttcaccacggggtaggaaaatcaaactcctgctcagggcagagagcgggcacaggggccagggtctgctgcactgagccaggcgcgggggaggtcagccccgcccccacaccacccactgaggcagcacaggacacccacaggtggctagaccttagccatgtgggcccaaagagccgtgacttgagaaggtctcactcagaagtagaaaggggaaaccacccctaggctgtaaaagaaccccttgtctttcccaaggaagacacgtggaacaaaacccgcaggtgccagagggtgaagcaggttcctcctccttcccctcctcctcctcctctttgccacttgtttgactgaggaacatggacttggcgtggaagaaagatcggtgagaagctaagaaaggtccaggaacatatccctgaagggccacctggacagttgtccaggctgttcactgcacaaaaggacccagctgaagggttacagaccagtggacacacagtttaccaagccccctgccctacagcaggcctcatctgcccagaggggctgtctttttcttatttatataaaaatatctgttttccccccttctcccaagcaaggcagcccctcagggccatccccatacccaggtacagggcaaaggtgtggggccttccccagggactcaggcctgagactcagaacaggacccaagagggggcagcagtggcctgcagggggaccaccagccaccacccaggtgcccaccccaagctgcagccagccactggaggacactgcattccccgtttcacatgcctaggggatccggggcgctgggctgggctccagaccttccaggaggcagggcaggagggtcttttcaagtcaaacacttgtctcatcacctaaaaattggattctgttggcaaaataaaggggagaccccagttttgtttggggggcagatgacaggacatcctggttatgtccagggaggtgcagccatggggccctggccactctatctatgctaaaagtgaaaagctccctgctctacactgaccaggccctgaccagcccctgaccagcccccacccctgcaccctgggaatcccaggcaagtttctgcagaagggagcagtggctggaaggagcaggcacaccgatggggccaaaccgtgcacagcactacggtgtcctggaggaatcctgggagagaggaaaggaagggggtccaggcagaaggccttgcccccaagcctggggaccctgtcccagggaggatcctctcctaatattaacactccaccccaacatggtcagactccaccccctactcccagatggacaggaagggcgccccagagcttgactgggacacagggctggcagcgcctgccaacgccaacaggctcctgcctgcccaccccttggcattttctttttcatctccttgtccagccctggcaagtgagatgagttagagacagccaagtggccccaaagagtggggctgctgcctcacgtccccacaatgtggctccctggaaagctattttcacccaagtaggcctagcctcagaagctcttgagggcagcacatttttcagaaactaaaataacagctattatcagaggcaccacggtagagcgactcatccctgcccaaccccaagttgtagggcctgcagctctgcccgtcacctcccctggcaaggacaccatccctggccacggctcccccatgacctcagccctacaggaacctggccaaggaaacgcagaacccccaggggcatcagcctatgttcccagcagatagggcggccacataaaatcagaacgcctagttaaatgtgaatttcaggtgaactacagacaggttttcaggatacgtgcgtcctatcattgcacaggaacacaataaaaattacttattgcttaccagaaattcatatttaacaggcacccttctgttgtttcttgtgtttcgtttgtttgtttgtgctcaatctggcaatcctaccctcagatccagtcccaggtatacagttggtgttcagttgatgcctacattctttgttcttggtcagtcatcccagatgtatttatttatttatttattttagttttatttttttgagacggagtctcactctgtcacccaggctggagtgcagtggcacgatcttggctcactgcaacctccatctcccgggttcaagcgattctcctgcctcagcctcctgagtagctgggattacaagcgtgtgccaccacacccagctaattttttttgtatttttagtagagacaggttttcaccatgttggccaggctggtcttgaactcctgacctcaaatgatccacctgcttcggcctcccaaagtgctggattacaggtgtgagccaccgcacctggccagtcatcccagatttagatcaatgcctctcaaacatgtttctacatcagaatctcattagggtccattaaaatacagattccagggtcccaccatgatcctattccagaaggctagaaggctgcccagggatctgcatttctagcagacttccccaggggagtctattgcacaagagattccagaagcagcaggcctaagccttgctcctgtctttctaatgtgaccttgcaaataggcaccagcccacagaatacaagttgccctctgggatcaaaaaaactgctattcactcagaacataggaagggcagtttctccaaaagcaaaatacacaaatatgcatcttcagtctgtagacactccaggtgaagttgaggctgaaggaatgagcaggaccccaaatgttttaagccgccagcattctacttgatatgggagggggcggggaggcgcacggcattacctggtacccacctacagttttgcttcctgcagcacagagcccttgggagctgatgtcatcagggattcagaataggcctgaatggcctccttatcctttgagccctttttactactactccaaaataaatagcatttctcctagaagataaccaagctaatttatagttgacgttgaagccacataaaaatggttttacacggttcttcaatttgcaaaaggcaaagaggaaacaggaaaggcacataagtttagagtccaacaaccctcaacgattgcaggtggctgagatgtggggagctgccgctcttagacataagtacaagcatcttcaggaaacacacctgggaggtggacaagccaagctgaaaagggctcgtccacttgaaaatttaagccagcgaggaagcaaggtggggagatgggccatggagaccgacaaccagtggacttagctggggggctgtttaaaatcaacgaggaacagattgttctgttaaaatacttttgatttattttaaaagaatgacttgagaagaaaaaattactgctttttttaatttttgagacaggatctcactctgttgtccaggctggagtgcaatggtgcgatcatggctcactgcagcctccaactcctgggctcaagtgatcctcccacctcaacctcccgagtagctcagattacaggcaagagccaccatacctggctcaagtggaaaatttctctaaagagaaattaaaatatgttgagtttacccgcatgtgattttttttttttaaatcaggacaaattacataaaaactgataaggccggccaggcacagtggctcacacctgtaatcccagaactttgggaggccaaggcggcagatcatgaggtcaggagttcaagaccagcctggccaacatggtgaaaccccgcctctactcaatatacaaaaattagccaggcatggtggcaggtgcctgtaatcccaactgctcgggaggctgaggctgaggctgaggctgaggctcccacttgaacccgggaggtggaggttgcagtgagccaagattgtgccactgcactccagcctgggcaacacagcaagactccatctcaaaaaagaaaccaaaaaaaataaaaataaaaaaacaaaaaaaactggtaaggtcctgctacatcaaaacacacataatgggataaatttcacttacgtggcctccagtgaaacctgcagggagggagccacactgccgatcgtagcattcttactggatttgagggtgggatgctgatttgggggctgcggcagggaaagggaccctagccacagcctagaccttctgtgcttcctgaccctccttccctgtccccattctggtggacaatttggagacagacagaaggagacagagggatgaggctgtcatggcctcctctggcccagtccctcagccagtccccagggaccccctcatgtggctgtgcgtcgtcacttgtggacacctatggtgatgctctgccacgggaaggtattcatggtctgggagtgtgggttctgagtccttctgtcctccctacataattcagtctagaaactggagggagttccattttgctcgctggagtcacagccctgctgggttctggctccccctggggcagtaacagagaagggggctcccaaaagggctggttggacccaatggtcattgttcatcgggagctcaaacgctagagcagcaacatgatgacagctggtgtccaggctaccatctcacattgtggaaaccttttccccccgaggacaggaattttgaaaggaagtcgggtttcaggtctgaaagccaaggtgaagaaccaggaatgctttattgtcacccagcatgcaagcatggaagcaggcaagccttccctgagacaggggaagaggaagaatcattcaccagtgctaaaggaagcaggtgctgcagaggagccaagaccagcagagcagcggggcagccccaaggcccctcagaaggcctcggcctgtggccctaggatgatgcaggtgggggccacctcagagagtggctttctggtccatgcatccaaaaacagcctttcctgatgacctgccagtgggcagcatcccttcccctgccatggcagccactcgcccatctccactgccccttgagctctgtgatcacagctctcctgtccttcgtgtgactgtagtaacttgcctaaaggcctgccttgcccatctttgctgcagatcttatgttctggtcatctgcatcccctgacctgtgcaaagggccttgcagtgaatgcatgaatgaataaataaatgaccccgaagcaaggagggacactgttatcacccctcttcctgctgcttctggaggtctgaagcccagggctggagctcttccccacttccgttccctcctgatagcagctgccccatcctgttcaagccatcgacttcctcacgcactggggcctccccgctgggcccaggcttccacccctcccagcccggggcccattccccagccagcagctgacctagtgattcccctctttaaaagcctccaatgcctctgtcactcccagaatcagttccaaactgctcactgtgcaccacgaggccctgggtggcccgccctgtccactctcagacaccacctcctacctctgtccctgccctcactcccctccagccaccctggccctacctgaccgtccaatgtgccttgcctgtccctgccacagggcctttgcagtggccgctccaggcagcattcctcatgtggctgtgtgctgagtgcctccctggcctccatgtcaaagctcactatctacctcttcagagaggccttcctgaagctccatctgtccttgtccccacttgctccagacatgcactctccagtctggaagctgcattcagttggtgagcccttgaaacggggccagtccaaaatgagacctgctgcacatgtatcgtacacacaggatttcaaagacttcatgcaaaaacactgcaaaaatattgatgccgtttatactgattacatgttgaagtgataatactttgcatatatttgggttaaataagattaaaattaattccacctgtttcctttgactgttaagtggctattagaaaatttaaactgaaaacctcacacgtggctcacgctgtatttctatttggctctaacccctcacagctcctatcatgagtgaaattatcttttctgctgatttacttggttttcatctgtctccccggctgggatgccagcccccctcaatccccctgagcagggatctcagctgtctcctctactgctgtacgtcccctcgcccctaacagaacctggcatccccgggtgctgacttgatgaatggatgatgcaagtaccaggtctcattactcaaagcccacctgtgccccctccaagggagggtcccaggccttccagaacaggcagagtagtggcaacgcggcatgcaaaagacgcaagcgtgctgcgcagcccccagcagtgaccgctcccactccggcagagacgcaggactgctgctggaggtgggctccaggctgcggttggccagagggtccgatctgaggcccctttcccccagcaggcaagcgaatggctgtcagcccgggctgccctctggccagcacctacttggctccggatttggcagatgacagggaccagcagcaggacgcagcccagcgccaggaggacgtactgggcatagtgcatcaccttgggcatcaacaccagctgagtgtagaatgtgtgaagagtctccccctccatggccccgctctgaggagacagaatgacaaacacatgagctggggccgcaggctgcgggctacagcgcagatgccacccaacaccttcctctgtgcccgcctcagcttttccccacctcaagcttcccggctaaagcatgtgttggagcctgccagggacctcctccctccaggacacaaggtgagactacaattccccgactcccttgcagttgggcagggccatatgatcgtgtcctgaccaatgggaggtggacctggcctcacgtgactctccatctcgttccctgccactgaatggaggctctccaggatggcggggccaccggggccctggaaccctaaatgactgcagggagcagagctctgcctccccatcaacccacttcagattcggctgtgagtaggaagtaaacttgacattcggaggcttgtttgtcctggccattagctagccctgatttaaaacgaggtgggcaagaaacaataaatacagtaaataaaataaaataaaataataaaataaaacaagctaggccagaaggaattctgaaaagctgcgagagaagtaagtttaagagaaaagctgacaccttggaaaccaacttccccactttcaggagaagaggtcatatgccccaacaaaattattttacacccagggccagggactttacctcttcatgcagcttctgtcttccccatctctagggatccctttcaccttggtgggataactgacatagggtgcttggacagggtgaagtttctgatacgctggtccatgtcacagtccggttaccctggctcagccctctccctttctacaagctgctccccccgcctcctgcctcaaatgcccacattggctcttaacaaaagcccccgacgctgtgcccaacgcacccttacctctgcaaaccagagcagcggcaggaccacaggctcaatcttcccagtttgtctggaaataagcaagacatagctgtgtgaaacaaagtcttacacccaaacttgatctaattctgcttgaatacaacatctaaacaggtttagtataattttgcacacactaaaccctcaccaccaaatataaacaatgagctgaaacactttaggagccatatgacaaaactgtccccaggctgaaggtctcagtctacagccctcaataatacttgtaaataagactaactttaaatctttaaaaggcgttttgtttttttttttctttagttgacaaggtgagatgttttcccacagggctgtttgacatcacacagctttgaacctgtgatcataagctctgaggccaggagggatttgattctgcaatctcagtcatccctccttatccatggttttgatttctgccatttcttaccctcagtacagtacaataagatattttgagggagagaccatgttcacataacttttattatagtatttgttataattaccctattcttagttattgttaattgtggctatgcctaatttataaattaactttatcatagatgtgtgtgtataggaagaagcatagtatatgctatacagggttcagtactatccccagcttcaggcatccactgggggtcttggaatatacccccagggataaggggtccatggtacttgattggcatgggctgagggaaccagtgtttcgatgtgctgccagaaggaatctcccctggcaaagagcttgacaacttgaaaataatctttttaaactaaaaactcacatctcctacagggcagagaccaccagtgacccagccaaaatccattggtcccttttagaaacaggacccaaattttactcaggatggcaatgcacccagttaaagactccacttcagcctctcttgtggcaagtgaggctctgtgaccaagttctggttaatgagatgttcgcagaagcgttacgtgggatggccgggagggctgcttaaaaagaagctttcacagctgggaggtgaaccttttttccctcctccctttcagatgcctgaaacgcagatgcaagggctggagctctgcagacactgggaccagaggtgaccttgaggatggaagccatgtgttgggaaaatggaacagaaagatgagtggaacttggactatgaatgtctcttgccatacttggactgtctgcctccagacatcctctaaaagaagatttttaaaataacaatatacctttgtcccatttgagccacaactgttgagtttactgatctatactgccaaacctaattccaccaatatacctcacgacccagcaattacgctcttcagaaactgccctagagatgctcacacatgcacacagaggcacaaagatgttcagtgttgcttggactagcaaagacaaacagacaaacgacaatatgtatcttctctatggccacatatatatgaatgtaaataagtaggaaaaggcctggaaggaagcacagcaaattgatgatggtgggtacggctggggatggcggggagtcacaggaaaccatattcttcccctcaggaagatatgttcttattacctgtgaagttaaaacttacacgtcaagttaaaaagataataaaatccaaagggagaataaaagtaaacttgatactgcagaaacgtcacaggcatgacctcatccaggctatcaaggtcgacatcaacagtgatacagtatgttgacggaatgtacccaagatgctctgaaactggaactttctctctgcggtcctcctcccaaaacccatcaccccagtctaatcatgagaaaagcaccagaccaatcccagtagagggtcatcctacaaaatacctgaccagtgcttctcaaaagtgtcactgtcatcaaaatgaaggagagatgagagactgtcacagccaaaaggtgcctaaggagaccggaagaccaatgcgacacctgggaaactgtgacctgccacgacgaaggggaccgtgcagacatgactgcatcaaggctctcagatggggagagcgtcctggaatatctaggtgggtccatgcagatatggttacatcaaggttctgagatgggaagagtatcctggaatacctaggtaggccccagagaatcacaaaagtccttaaagagagaagcgggaagtcctagccagagcaatcaggcaagagaaagaaaaacgaaaaaacaaaaacaaattttaaaaccctaaaaaaagaaaaattaatttttaaaaagaggggctggggcgtggtggctcacgcctgtaatcccagcactttgggaggccgaggcaggtggatcacaaggtcaggagattgagaccatcctgggcaacatggtgaaaccccatctctactaaaaatataaaaattggccggacgtggtggcacatgcctgtaatcccagctactcgggaggctgaggcaggagaatcacttgaaccagggagtcagaggttgcagtgagcggagatcatgccattgcactccagcctggcgacagagtgagactccgtctcaaaaaaaaaaaaaagagggaagcaggaggttagaggcagagagaaattggacagtgctacactgctggctttaaagagggagaggccaagtgcagtggttcacgcctgtaatcccagcactttgggaggctgaggtgggaggatcacttgcaccctggagttcaagaccagcctgggcaacatagtgagacccctgtctctacaaaaaaaacacaaaaattagcagggtatggtggcacatgcctgtagtcccagctactcaggaggctcaggtgggaggatcgcctaagcccaggaggccaaggctgcagtgaactatagatcatgccactgtactccagtctagatagcagagcgagactgtgtctcaacaacaacaacaacaacaacaaaacagggagggctaggattaaggtcatgagctaaggaaagtaggcagcttctagaagctgtaaacggcaaggcacaggttctcccctggagcctctggaaggaacaaggcctgcagataccttgatcttagccttgttgtgttcctttcagacttcagactcccaacactgcaagatagtttttaaaagtgagccatgacatttgtggcaaaattgtgacagcagcaaaaggaaatgaatacagcaactcacactcagtatggagcagcagggtgggctggctcaccacttgccccacacagacccccccacaacaggtgtctagcagaaaaggcagtgtggcgaggtggttaatagtgcacactcaagcgtcgctgcctggatttgaatcccacctgggccgctgtgcaggcacgtgctcacgtggcaggcccgagcccttccaccccacacaggctgctggcaatgctggcccggagctggcgtctgggagcctggattcgggaggcctcccattgctccctaactgacaaggatggctcactgtgcctgagcaatctgtacaagtaatgtggtttatactgaccaccagcttgccttctaagggtctggaatttcagtacctgccaggcagagggtggccacatgaccagcccctagtaaaaaccctgggcactcagtctctctagcgggcttccctgccagatgacatgtcacgtgggttgtcacaactccttgcagcaagaattgggtgactcccctgggagagggctctggaaactggcacctgctttcctctggacttggccccgtgtggcttttccctttgctgatttgctttgaatccttttaccgtaataaatcatagccacgtgtacaaccatatgcttcgtcctgaggcttcccagcaaatcgtcgagcctgcggtggccttgggacccctgacacagccacttacgagctctgtgaccttgggcgtgctactgagcctgtgtcccttctgtataagcgagatattataacgtaactcttcctaggactctagggaggattcaatgcagtaatacatgtaaagtgcttcgaaaattacccggcatataaaagtgcttggcacatttattattgttgttgttataattgttaaatcccagcaaagaaatggacacacaaatattctgtcactttgccatgcacagcagtagggaggggagatggaagtcactgaggggcggtgacgaaagtcagcacaaaaggctcaaataccacaatcagagaccgggcgcagtggctcacgcctgtaatcccagcactttgggaggctgaggcaggtgatcacctgaggtcaggagtttgagaccagcctggccaacacagtgaaaccccgtctctactaaaaatacaaaaatttgctgggcgtggtggcgggcacctgtaatcccagctacgcgggaggctgaggcaggagaatcgcttgaacccgaggcggaggttgcagtgagccgaaatcgcgccattgtactccagcctgggcgacaagagcaagatccatcttaaaaaaaaaaaaaggctgaaatcccccaatcacaattattggaggtctctcaggccccttgttaagtagggtattgcacagtgaaatgggctcacactatcaccctacagaggacgaaacacgatggggagacaacagacggtaccatttactttggctgcttttctctgaaagactttgtaagaaccaatgggaattgtattcaagtaacatgcaaccccactgcctttacctagcgagcaaggagcacagaagcttccccgacaggtcacgagacagctctgcttcccggcagctgtgtctctagacttttcccacggccatccctcgtggccctccacatctgctgttgagaccactttcctggagtgccttgttcccagtccacagggaggtcagcagctgtgcggcccagagaggttgggtgaccggtccacaggtcactggcaggcacaatccagctgcccgcgtgaactgtttgttaagaatgtgaattaggcccagcgcagggctcatgcctataatcccagcactctgggaggcggatcacctgaggtcacaagttcgagaacagcctggccaacatggtgaaatcctgtctccactaaaaatacaaaaattagctgggtgtactagcgagcgcctgtaatcccagctacttgagaggctgaggcaggagaatcgctggaacccgggaggcagaggttgcagtgagctgagatcatgccactgcactctggcctgggtgacacggcaagacttcgtctcaaaaaaaaaaaaaaaaaaaaaaaaagaatgtgaattacctcccaataagtaaaaattgacagagctcctgttaaaattcagatttggaagtccttttgaaaaatgcagaggatgtggccacactgagcccgcatttccatggggctacagtcagctggtgctgggaaggggctgtatcctcggccccaggtcgcctcttctatctggtcacccacttggccccagttgcatcccagttagcagcccaggtgccacgcggtggaaccagagggaggacttgggctgcaaacgcctcttccatgcctggggctgtttccccacccacaaatccatcaagaacaaattccctaagtggcctcaaaatataaaaataaaatgcaagggcgggatgaaggaagagagctcacagttattactcgctgccgtgctctgacaaagtgttattctttccagccgagaggcatttgacaaagctgaatagatgctcacattcctgcaacccagggatttttctaagagaattttttttaacgaaactatttcagatatgctaagaagtacagacactgacatagcaacaaatcagtataatccctcaccaagttctagcaacgtgtaatgttatagcaagtgctggtgcgcgtggggaggaactggaaccctgctgcactgctgctaagaatggggatggggccgggcgcggtgctcacgcctgtaatcccagcactttgggagcccgaggcgggcggatcacgaggtcaggagatcgagaccaacctggctaacatggtgaaaccctgtatctactaaaaatacaaaaaattagccgggcacggtggcgggcgcctgtagtcccagctacttgggaggctgaggcaggagaatggcgtgaacccaggaggcggagcttgcagtgagccgagatcgcgccactgcactccagcctgggcgacagagcgagactccgtctcaaaaaaaaaaaaaaaaaaaaaagaatggggatggggggcagaggctgtgcaagtctgactgttcctcaaacggttaaacaaagagttaacataggacccagcgattccacccctcggtacatacctaaggaaaacgagaacagatgtccacactgggactgacacaagaacatttacagctgcattatgcataacggcccaggcgtggaaacaactcaaacgtccatcaaccgataaataaatgtggtctatccagacaatggaatattatccagccataaaatatactgatccatgctacgacatggatgaaccttgaaaacgtgatcctaaatgaaagaagccagtcgcaaaagaccacatagtgtatgattccatttatatgaaatgcccagaataggtaagtccgcagagacaggaagtggatgaacggttgcctggggctgaggggacagggaagtgagtgttaatgagtgtggggtttcttttggggatgatgaaaatgttccaaaattgattgtggtgatagatacacaattctgtgaatatactgcaaatcactgaattgtgcattttattaggggggttattttttttattttgaattgtgcattttaaaggggtgagttttatggtacatgcattatatttgcataaagctgttttattttaaaaatcaaaaagaggaaatcagtgcttgaaaaattcttttttttttttttttttgagacggagtcttgctctgtcgcccaggctggagtgcagtggcgcgatctcggctcactgcaagctccgcctcccgggttcacgccattctcctgcctcagcgtttccattttcaaacatttggttttgccaggctttcatttctgccactctgtcgtgtaggaaacagcttggattgaagctctggctaattggcagggagggggtgaatgttaaaaaagaaaagtgaaggccgggcacggtggctcacgcctgcaatcccagcatgctgggaggcccaggtgggtggatcacttgaggccaggagtttgagaccagcctgaccaacatggtgaaaccccatctctactaaaaataccaaattagccgggcgtggtggcacatgcctgtaatcccagctactcaggaggctgagtcaggagaatcgcttgaacctgggaggcggaggttgtggtgagccaatatcccgcccttgcactccagcctgggcaacaagagcgagactccatctcaaaaacaaaacaaaacaaaacaaaaaagagaaagaaaagtggtgttctggggaaggaatatcaggatgcaggtcaggacctggctcaaaaccaagacccctcagggagaagatcagcagggactggattccacccccaataggaccctctcccctccccatgccctggttcctggggtatgtcactggagtctgggaccactggagcactgagcacctaatctctcaatgagcaatgcagccccagctcccagtccccactcacccaatgcctgcgacagatttcatgtagaggctcagctgcagtttcacagagcagttcatggggattcccgtgacctgcggcaacaaacacagtgaggagactggccacccccaagctccagggacaccgtcaaccctcctctccctggtcccagtcaagagggtgggcgtcccagctaactgcccagtggagcttgcttgtatcttacctaaaacaagccacaggctggggggggtcaacagttctagaaatgctgggcaggtgcactgggatctcctctcctgattctaaccccttatagggaaacaagtgcttcccacacagttatgttcacagcctcaaagaggttccttctataaagcaaggctgtctcagggtggaaaatacctaatcactttcacctgtcctcctaagacagcgtttcccaaagtgcagaatggcaatttgtccatgctccctctcaacctccacattcaataaaacagacaaaagtcccttctcaattcactcccaactcctcctgatcattttgaagagtaggtctcagccaggtgtttgcatggtctttaatacccctctaatacacctacacaaaatctccacttctaacaatggtgctgacagctggccccaggttcactcctgctgacagacaacaatattttacatagagcctaatatttttttccttgttcatttttatggttgtcttctttttttggagaattttgtaatttcctatttgaggtagtaagaaaaagcttcctttgtgcagaaatttatttttatttctttttgagacagagtcttactcagtcatctaggctggagtgcaggcaacctctgcctcctgagttcaagcgattgtcctgcctcagcctccccagtagctgggactacaggtgtgcgccagcacactcggctaatttttgtatttttagtaaagacagggtttcaccatgttgaccaggctggtctcaaactcctggcagcaagcgaactgcccaccttggcctcccaaagtgggattacaggcgtgagccaccacacccagcctatttatcattattatttttgtagagacagagtttcactatgttgcccaggctggcgtcaaactcctagcctcaagtgatcttcctgcctcagcctcccaaagcagtggaattacagccatgagccactatacccagctctttttaacgagacttttttttttaagtaaataaccgaagtgacacacatgtgtcatcaaaaacaacaggaaggtggttccagaatgaagtcaggaaatgatagtggaaataaaactagatttgaggtcagagaactgcagttggttcttcttaactgagagtcgcgtcctcatctgtaaaacagagagaactctcccgacctgacagaatttttgcaagagcaaaagtaaggtatgcaagatagccacacgcagggccataaatgcctaggttattatcacgtacactatagggaaaggatgttttcttcattatggcccagcatgctgaggaccttccaggcccctgtggcaaagaagagctcattaaaggcctcacttacgcccacgactggggagtgcttgccctcgagagcctggtgggatgggcatgagatcacccgtgagtagaacagagttcacgccacaggcctgaagctgctctccttaggaattctgctggcatctgggaacccagatttcaggagggtccccaccatcccctaactgatgagagtagttcactgggccgaaattatttgtacaaacaatatggttcttgctcagcacctgctttccttcccagagcctagaattttggtacctgccaggcagaggtgcccacatgactggcccctagcaaaacaccatgggcactgaatttctaatgagcttccctgctagacaacatctcctacatgttgtcacaactcattgctaaagacattaagtgcatcctgtaggaaccccctggaagaggactctggaagctccagcctggcctcccccgacttcacccaaggtgctttttccctttgctaattttgctttgaattctgtcattacaataagtcttagctgtgataccaccataagcagcgtcctgttgagtcccccgtccccatgccctcccccagtttcaggagcagaaaagtggccacacggaagcagcttccaacacacgttcgtttttcaaggctaaaggccaacaggcagcaagctgatctcctgatccccctccccaacgtgcccagctcaaaaaacaaagaaataaaggccacttcctctccccgtcggcctcaagctcatctggaggtagaattggacgcagcagctaaagtggctgcggcaaaacagctgtttgcctctctctgggctcccaaacttaaccccttctttcttgatgtgaggggaagaaagaaaatccgtgccctgaaaggaaagcgatcactgagagcgcacaggagactgtgttcatggtggaattctccggaagccagcagagcaagagaggctggaggaggaattaactaaaagagggaaggcagagaccagggctggggccggggccgagagggcctagtcagcggctaaggaggcctgggaggacaaagaaaaatggtgcagaacagcatccgccatggagcttcgggaagggcctaaggtgcacagcattgtggcaaacgtgtggagcttcctcagacaacgaaaaccagaactaccatcggatcagtgatcccactgccgggcatccccccagaggaaatgaaatcagtgtgtcaaagggacaggggcactcccatgtacgctgtggccaagatacggaatcaagcgaagtgtccgtcagtgaatgaatgggcagcagaaacgtggtgcacacacagtgggatactgttcagcgtttaaaaagagggaaatccagctgggcgcggcggctcacgcctggaatcccagcactttgggaggccgaggtggacggatcacttgaggccaggagttccagaccagcttggtcaggatggtgaaatcccgtctccactaaaaatacaaaaattagccaggtgtggtggtgtgtgcctttaatcccagctactctggaggccgaggcaggagaattgcttgaacccaggaggcagaggttgcagggagccacgatcatgccactgcactccagcctgggtgacgcagcaagactctgtctcaaaaaataaataaataaaaacagggaaatcctgttatttgtgacaacatgacggacctggggacactatgcgaagtaaaataggccaggcacaggaaagcaaaccctgcatgacctcacctgtatgtggaatctaaaagagttgaattcaggccaggcgtagtggctcacgcctataatcccagcaacctgggagtccgaggcgggtggatcacctgaggtcacgagttcgagaccagcatggccaacgtggcaaaaccctgtgtctactaaaaatacaaaaattagccgggtgtggtggtgtgtgcctgtaatcccagctacttgagaggctgaggcagggagaattgcttgaacccgggaggcggaggttgcagtgagccgagatcgtgccactgcactccagcctgggtaaccagagtgaaactccatctcagaaaaaaaaaagaaaaaaagttgaattcatggaagcagagggtagaatactggctaccaggggcagggatggggaagtccgtcaaaggatacaaaatttcagttagacagggggagtaagtttaggagacctactgggaaatagagcaacagtcactgtattgtactatacaatacaacacagtgactagagtgaatagcaatgtattgtaagcttgaaagttgctgacagtagattttaaatgttctcagcaccaatacatcatcagtatgtgaggtaatgcatatgttaattggcttgatttaggtattccacaagttatatacatacatcataacatcatgttgtacactcaaaaatagacagcttttcttcttcaatttagagaattaattttggctgggcacggcggttcatgcctgtaatcccggtactttgggaggccaagacaggaggatcgcttgagcccaagagttcgagaccagactgggcaacatggcaaaaccgcgtctctacaaaaaatataaaaattagccaggcatggtggtacatgtctgtagtcctggctacttagggaggctgaggtgggaggatcacctgaacccagggaggtcgaagctgcagtgagccatgatcatgccactgcaccccagcctgggcaaccgagtgagaccctgtctcaaaaataataataattttgttaaaggcccatgggatagaccacaagtgcccacccaggaaacagaaaaccacagatttctgaatcaatggtagcagccaccaagaccaactgggcatattttacagagaacggaggtgccaagagaagaggccacaagctgaaggagtgtccttgggagggccacatgtccagctccctgcttgtagacagaacttcacacgggacaaattccctgtgtgatttatctgcaaaataccccaggctcttcttggtacctaaagatctttatggtatcttgacacatccagagggctgcctccagctcacatgtaggagacatcccagctgataagttctaattaatttactgtcttagagcccatttatagaaaccagtacagggatcataaaacccttgaactaccttgaactatggagtcggggtgaagtaaggaactttggtggctcgagattctagaagccaggcttcccaccaccccagcccacagcagctctctgcctggggagagaggaggcagccaggtgtgctccaaccaggaatcacccaccccccacagaggatggcaggggctcaccgggtggatgtccaggaacaaggagtgtgcctcctggttagggtgcaggccagtcaccgcttctgccagaaccgggtcagcgttgaggaagtgaggatgggagagaaacaagggggcacctagaagaggggcagggaggggacatcagacaaggacagtatattggcaggtcctgccaggccggaggtctgcacagagctgtggtctgcagggcacccccgtggcgatgacaagataaccagacagagaggatcccttcctccattctgtaaaaagccccaggccctgtgatgagggacaagctctgcgccagagaaggggtgaggcaggagccgctgattctgacaggagagaccaaaagaaggaagaggcctcttcacaggagccaggtgaaggatgcccgggaagcgcattccaggtggaagggaaggcagaagcaagcgtggggagggggaaatgcatggtgcacaagggtgctagggaggcacggatggaaaaggcaacgccagatttgaacttgggtgtggggaggggagtctcaagcgcaagccaagcagcccacactgtcccctgcaggacacgcagcaatgatcggagctcaggtgtgtgcacctgtggccagatctccctgcatccacaggagtgtgtccctgtagacacacctgctacaaatgtgagctcaacctcgccactgaccaaccaaaccaggcaaacaccagctcaccctcgggacaatggacaacaggcctgaaggacaagttaacaaggaacagcgagcgggcctctctcaaaagctcacgagggccaggcgccatggcttacacctgtaatcccaacactttgggaggcctcagcaggcagatgacttgcacccaggaattggagaccaggctggacaatatggcaagatcctatctctacaaaaattagccgggcatggtggcacctgcatgtagttccagctactcaggaggctgaggcaggaaaatcgcttgagcctcagaggttgaggctacagtgagccgtgaccgtgccactgcactccagcctgggtaacagagcaagatcctgtctcaaaagaaaaacaatttttttttaaaaagctcacaaggatccagacagtgctaatccacagacagagccaacgggtggtgaccaggggctgggggagggggcggggagtgacttctgatgagtctgggtctccttttggggtgacagaaatgttctggaacgagatacaagtgatggctgcacaaccttgtgaccctgctaaatgccactgaatcattcactttaaaatggttaattttatgttacaagaattttgcctcagtaaggaaaacaaaacaaaacaaaacaaaaacttgaatcagaggccaggcacggtggctcatgcctgtaatcccaactctttgggaggccaaggcgggtggatcacttgaggtcagaagttcaagaccagcctgggcaacatggtgagaccccgtctctactaaaaatacaaaaattagctgagcatggtatgtgcctgtaatcccagctactcgggaggctgaggcaggagaattgcttgaacctgggcggcagaggttgcggaggctgcagggagctgaaatcgcatcactgcactccagcctggacaatagttttcggaggttgcagtaagccaagattgcaccaatgcactccagcctcggcaaaagagcaagactgtgtctcaaaaaaaataaaataaaataaagggccgggcgcggtggctcacgcctgtaatcccagcactttaggaggccgaggcgggtggaccagttgaggttgggagttcacgaccagcctgaccgatatggagaaaccccgtctctactaaaaatacaaaattagccgggcctggtggtgcacacctgtaatcccagctactcaggaggctgaggcaggagaatcgcttgaacccaagaggcagaagttgtggtgagccaagattgcaccattgcactccagccttggcaacagagcaagactgtgtctcaaaaaaaaaaaaaaaagacatagttaaaaaataccgtggaaaataatgatgttgtaagttctaactagaacctgttactgcatgaggctttaactgggagccctgctctttttctgttaaaagaaaaaacaaaacaaaaaaggctgatgagtgtggaaggctcttcaagtcctctcaacaccaagagaccttctcctgcaggtgatggcaaggaggaaaagagcatggacccagaagctcactctcacctccttggaccttctgaagccatcccaagcacccgcagggacagtgtcctccacaatctggaaaacgctgcctctcgtgcctcctccgtggaggaggcagccacggagccgaactctggaggaatctcaaacaagccctggcctgcccacagccccaggtggagaccgaggtgggatggaacaacttgccagcccccgcccttgcttcagaggccgagcctgcatggacccacgcacgtgtttcttccaatgttattaccaagcacgccgagagagatcttcccagctgtaagtggtaattaatttgtagctttatggcatatctagccagacataattgcccaggattgccaccgatgataattagttggctctgtgaggcaagtcggatgccctcacgcaacagggaggtttgagatgagggagttgtctgagtccaacagatttcaaggcccagaaaggcaaaggcatggtacctttactctttagataacatgccacagaaacacagacataggtgcaccaaacgacacgtgtgcaccacggtcacggtcgaaaaacaggaacttggatgcctaggagcaatggaaggagaagatggaggtggcacccacgatggaacaccacacagcaacggagaggaggggctgctaccacccacaacgtcacggacgaattgcaccagggtgctaaggggtgcacggaccagaaaaggaggaaaaggagtctagcattatgggtccattcacatgaagatgcaaaccagctgagctccggggctggatgtcagggcggtgggaggaccgcgagtggcatccagggcctgtcctgtctgtttctcagtcagggtgctggccacggggtgcgttgactttgtgaagtttcaaactgcaggtgtcagccaggcgcagcggttcatgcctgtaatcccagcactttgggcgggaggatcacttgagcccaggacttcaagactagcctgggcaatatggtgagaccccgtctcttaaaaaaaatttaagaattagctgggcatggtagcaaccgcttgtagtcccagctactcaggaggctggggtaagaggatcaattgagtgatggaggtcagactgctgtgagccatgatggcaccactgcactccagcctgggcgacagtgataccctgtctcaaaaaacaaagcaaaaaaccccaaaaactgcatgagtcatctgggaacttctttgtatctatgtatattttatttagaagcaaaaactaagcccgggcaagacggcacaaccccacctctacaaaaaaaaaaaaaaaaaaaaaaaaaattgaaataagataaaataaattagccaggtatggtggtgtgtacctgtgctcccagctacctgggaggctgaggtgggagaatcatttgtgcccaggaggtcaaggctgctgtgagctgtgattgcaccactgcacttgagcctgggcaacagagaaaccctgtctcaaaaatataaataaatataagaaaaaactctatttaaataaagattttaaaattcctttgcgcttttgaaattcttttggcagatgtgctaagagaaggcgggacacacctcgtcccacgcccttggaggggatgggcatgtcgtttctcccccttctcctggtacctacacccccactttaagccttccctactttcagccttgtgcttggagtggggccggcccacccaggagccatctgagcatgtgacacaagcctggccaatcagcatagtccacctcggctactgtgattggtttacagctgggcatgggagccaggcagaccaattagagcaaaccctggaacttctgctggagtgaaggaaacacaggtggccccctttctgcaggactcggagctgggcggaggtgagcctggagcctccacaggcagccaggagggagagcctgcttggcagcaaagccagtccagcagaaaactgagctgggacttggcagaggcagcttccagacaacatctaagttctggatttgtgcctaatgcagagatctgccctggaatttttcattacgcaaaccaagaagtgcccttttggcctaaatcaggtggagtccagcatctgccacttgcgacagttgctgtagcacacctattgggtgtgtaacatcctcaaccttaggagcagaaatccccgccgataccagcaaagaatgaagcaagcagaggccaatgcccagacgggccagacaggaccaggagacagcagcgggcgtcccaggccccagctccaaaccattcattcacaggttgttccattctgcctgaaataggggaaagcatccaatctgttgacagcccctcctcctgacccctgttgcagaccagtcctttagagtcgccattgccagctggaggacggggcttcaaccaaaaaggctcccagaaggcaagacacagtcaaatagagggccgcttccggtcctaccaaccctgtgaccttggtcgcatccagcatcaggcctcaatttcctaagtacagaacgcactcaccatccctatattcaaatactgtatgagtacccattacatgcggggcacagttctagaagctaagaataaaaccaacaagaggagcttggggccctgcctacagggatgacagtgaatggaaggggcaatgaataaaatccacagtccatgagttcagggagcaatgagcaccaagacaagaagaggaagacaagaagaccaagacaagaagacaagaagaggaagccatagggagcagcaggtgggagagggggcaactttagaacaggaaatcagaggaggcctcccggaggaggtggcatttgcatgcaggccaaaagaaggtgagggatgatccactcagaaatccagacaaagagctctccaagcaggggaagcaacccatgcaaaccacagtgcaaggcactgaccttggtatactttagaaaaagggcgaaggcatcagggctggagaataatgaacaggggacgtgtagggagaaatggagtcagagaggctggtggggctggatccttcagagaggccggtaggggctggatcctgcagggcccagggccatggtgggagtttggacttcactatgaatgcagacagagctgccagacattttaagaggacggcggccatctgcatatttttcgagatgggtcttcctctgttgcccaggctggagtgcagtggggtgatcacagctcactgcagccttgacctctgggcttaggccatccttccaccccagctttccacgtagctaggactacaggcatgcaccaccatgcctagctaattttttttttttttttttttttttggccagagagaggtcttgctatattgcccaggctggtctcgaactcttggcctgaagtgatcctcccacctcggcctcctacagggttgtgattacaggcgtgaaccaccacactcggcctgcattgttaaaagatccctccgctgctgtcgggagtgctacagaacttcctatgatgatggaaatgttctctatctgtgctatccaagacagtagctgctagacacacatggcttatgagcatttaacttccggccggtgcaaccaaggaactgccttttaatttgatttcgtttaaatcaatttcaatttaaacagccgcaagaggccagcagtgaccgcactggatggtctaggggatggatggtaaggcggcaacactgcattgagggatgggctactgaaagggctggatcaccaggaaggacgtgtccgtggcctggacaatgaggcgggggttggggtggggagcaagagagaggaaggagtgaggactcaacctggaggtaaagccatctgggcttgttgacgcactggaagagctgggtgaggacagggaaacaaactgacgcccgagggtccaaactgagcaacttgaggtgggggtgtctcagggactggcacacaattgagacacaccaacaatgtcaggggaccgacgccaacagcagtcatcacatctgcctagccacccacactgcggaacgagaagatgttacgtaacacacagaccctcgccagcctcatttcatgtcatttaggacacgtacatgccctaagccccagaacccatgactatgtcaggtcacagggtaaacgggcgctgggcctgctcagcagctgccttgaaggtccagaaattgggccgggcacagtggctcacacctgtaatcccattgctttaacacgcagaggcaggtggatcacttgaggccaggtgtttgagaccagcctgggcaacatggtgaaacaacatctctataaaaactttacaaaaataaaattagctaggtatcatggcccacacctgcggtcccagctactcaggaggctgaggcaggaagatcgcttgagcccatgaggtcgaggctgcagtgagctataatcgcaccactatactccagctccaggctacagagtgataccttgtctcaaaatataaaaataggctgggcgcggtggctcacacctataatcccagcactttgggaggccgaggcaggcagatcacttgaggtcaggagttcaagaccagcctgggcaacatggtgaaacccccatctctaccaaaaatacaaaaaattagccaggtgtggtggtgcacgcctgtggtcccaactactcgggaggctgaggtgggaggatcacttgaacctgggaggcggaggttgcagtgagctgaaatggcgccactgcactccaacctgggtaacagagtgagagtctgtctcaaaaaaaataataataaacaagatggggagattgtcctggggtatccaggagagcacgatgtggtcttaagggtccttagaactggaagagggggcagaagagggaggagaggaagagatatgaggacagagtggatcagaaggatgccatgttgctggcctcaaaggtggaggaagggcccgggagccaagaaacacagaggggcctctggaagccagaaaaggcagacgcagcttctcctagagcctccagaaggaacacagccgccttgttctgagcgcggtgagacccacgcagacttctgactacagaactgcaagataaccagtgtgtgttgttctaagccctgaagttcatggcaatatattgtgacagcaactaatagacctggcatttcttccttttcagattatcttcctgcggcctcattatcttcgcctaatgggattatcaagagtacagaggccagagattaagcagacagcactgggcagataaaccctcagctggccccaccctcacaccctcccgccatcccagcacaggggacggcacgtactgaacctgcaggtgctgacgttctgaattccagactccaggcacgggcagaagccttcgttgggtgggtagatggacccgttggcaaacagggttttgggagccacgaagcgataggtggggatgccttcaaacacccctgactccttgtacattagcttcatggatctgcaggggacagacaggatgagaggggacacccagacccggcggccagagccaggccctgccaaaggctgcccagatccagccacttctccccacgggcgctaccacctcccgggtccaaaccgcccccatctctcacccgcggagctgcagcgacctcctaacaggcctctccgctccgactctgcctccccacccacatcaatgtattagccgtggccagatggagttttacaaaagaacagaggccaggcattatggctcacacctgtaatcccagcactttgggaggccgaggtgggaggatcacttgagcccaggagtgtgagaccagcctggggaacatagtgagacccagtctctaaaaataaaattgtttttgaaagttatgaaattaaaaaaagaacagaatatatcatgcccctgctgaaaatctgtgaccctttctagtctaacctaccattaggattcattgaccttatctagcccctgcataagctctgctcagccctgccccaacttcctgtgcccagggcctccctgcagttcctaagcacactcactcctgccccaggccctttgcatcactgctccctctgcctaagaacagtctcctctggcatcttcatccaccagacttcagcccttcagtcagatctcagttcagctgtcacttcctcgggtggcagcaccgtcccccacacccaccccatccaccctccatccattcatgctcctgtactttctcaaaagcacttctgaacttgaacatgcactgtgctacccactctgtccacggcagccactcagcacgcatggctgtccatcccgcccttgacatggggtgagtccaaattgggatgcaagtataaaatacattccagatttctaatacttgctagcaaaaaaaacaaaaaaaaaacctcatcaataacacttgaaatgatcccatttttgatatatgaggtcaaataaaatacattattaaaaataatttcaccaatttcttgttacttgtattaatgcagccactaaaaaattttaaattgcatgtgtgccttgcatattttgatttataggaaagtgccagcttagataacagtattatgtcaatgccaaattttctcattttgataacagcattatggttatgtaagaaaatgtcctcgtttctgaaaaacacccactgagtatttggaggtaagggggcatacagcctccaacctactctccgatggttctggaaaaagacactcggcgagaagagggggtggggggcttaacacggctagtgaacctgggtgaaggggagacgggggccacttgtatttctcatgcaacttttctttaagtttaaaattcagcttttaaagtcagctgggtacagtagctcacacctgcaatcccagcactttgggaggctgaagcaggaagatcccttgaggctaggagttcaagactagcctgggcaacatagcgagatccccatctctaaaaaattaaataaataaataagtaaaaacttaaaatagtaaaaagtggccacacagagcaaaagcactgtcactctctgacactctagtgtttgtgcatttgcctgagttgccctgataggacacagcctcctggggaacggagacttggcccaccctctcactaccgggcacctggcacacagtagggcttcacagggtttgctgggagggcagataagtcaaggtccacatgagtgaattcctaagtaaaggacttttccagagtgaccagaatggaacacgacacagcaaggcctccagaaaagggctgtaggagccacccactgtctactcttaccccacaactgggaccatgggacacagagctgagcctgaaggggccaagcagagccagctgatgtctcagcacccagatggtcatgggggccaccagccagacgccagagggagcccacctctcgcctccattttatggccccctgtgacttgacatgtcctgccccctcctcccagcccagcaccacctggctgcaaaccaccaccagcagcctctctttgggctgtgtagaggcattggcagctggagtttggcttttggtggtgtgaccaaagagaattcaagctggtgccaagggctactgagtcaaatccacgatgagtcaaaatgctttccaagtgcacagccaacaccacagaatttggccatgagctacccaggaaacccaggaggccccgagtcccagtgattaccggcaggcctccgggctgtagaactccagcgaggactcaggagtcatgaagggcggccacatttgcccagaagttccattgatcatgttgcactgatcggaatgccagaagtcaacctggggggaagcatccagactagacccctcagtagggccaaggccccttaataagccctctcaggtgctgcacacctaactcaccctggtgcacgcacggccactcaattcccaatactggcacggtgggaagagggcaggctatgtagacacacagagagaatgcctaccacagcttccccctcccagacccctgaatgtgtaacttcgctagggactcagttctttcatctgcaaaataggcctatcacccacatttccagcctgaatctggaaaagaagtgtggtgagcaggtgaggtgagaggtggggcgcggctgtgctcagccctcagagcggaagtcaacaggcacctcctgaaaacaatcggcacacaggcaaactacttaaaatcataatggtggccaccaccgggcaaccccaaaacagaacctgtcaggttaactgactctggggagcgagacccagactcgacaaaaccaactgctcactttccaatcttctgtatgatgaggatgtttaaaatcacgtgcacatgtacagtatattggaatatacaagccacaatgaatgtgaactccatctatcgtgaatggctactgccagttgcagatggtgatttttgccactctgggcaccggttggggtacgatttgtccctagccctcagggtctttgcagtaactaccacggggagtggggagtgggaagtcacacagtcattttcacacatattgagaaaaggtcacgaaggtgaaaaaagccagttgcaaaacaatgcacgtagtatgatttcatgatgttcaaagaagaaacaattccgtatttctctgcgtacatataggtgtgcacatgggtaaaaatggatgggaagaatatatcccaaactgataattgtgggtttcctctggggcaaggggtaggggtgggaggtgatactaagggcacttatctccctctcttgttttattttgtaatgtgaatctcttctcttttttttggagaccgagtttcactcttctcacccaggctgaagtgaaattgcgtgatctcagctcactgcaaccttcacctcctgtgttcaagcgattctcctgcctcagctcatgagtagctgggattacaggcatgcaacaccacacccagctaattttttgtattttagtagagacagggttttgccatgttggcctggctggtctcgaactcctgacctcaggtgatcccccccacctcggcctcccaaagtgctgggattacaggcatgaactaccacgcccggccttcaaaacatttttgtaagtaaagaatcgaaaggaagaaagcactcagttcccagcagatgccaggtgctcagtaagctcagtaagcaatcactaaccccacctgcccctctgggtggtcaagctttaaccagaggtaaaatccctcctccaacttcaagagtgttcatcctcccagcaccctcttcacgacaaaggaagaaggagctctctggtccctgccactcccgagcagccatggccgggcccaccctcccctctccctggcgacaggggccctcgcctctcgcccctcaccttgctcagcccgttccacttgtccacgaggtggatcctgctgatgttctggacccccgtgaacaccgtgaagagcccagagtcggagttgttgagctacagacacagcagggaacagcatcgtaaggcttaggcctgccattgagccggcctggtctgaacattctgggctgagccctcctccccctccaccagaaggacagggcccccagcatctggttcactgccaaatgcccagtgtctggggaccgagaggaggcttgggagctttctaggaggaatggtcccgggttctgtggctgcagtgttccaccctcccttcctaactccaggagagtctggctttcctcccaggtaaatggcagatcacccccaccacaccctactccagcataaaataaagcatggccaggtcagctccctgagcaatgaaaaaggagaagtggcatgtcacttggggggatgctttaaggactgtgcacacgcctttcaccgggctctctgccgctgctatagcagccaaggaggtatgtgtcaagacagagcctccctcagcctggatccccaagtgaccaccacaagcgcgggtgccccagtcacccacactggacgtggagtgcaagcaaaggaataagtcttggttgttctaagccatggagattccggggctgcttgtcacagcagcaaaacctggcctgtcctaacccatcgaggttcttgatagtggggcccaggctttggtgctccgagagcatttcccagaagctggtttctaatcccaaagacatgcaaagcacaaagtggtatgagtgactgaaggaaatatctagaagtgctttgcagggtggagcacactgaggagctccaaggttgcccggctgagtgactgcacccatcacagacctccagagcaggacccagcacaaggccccagcccagcatcccgggtgtgtctgtcacgtgcccatgtggagccaagaataaccagagccactacaaaggggagcattaaagggactcatgtgcaaaaacggccaggtacagtgcaccggacacagtaagagctcaaaatgatagtctttattttcattattattgttattattaataaatgctcacccaataggatacttaaatgatcattataatggacggagagcatcagaaactgccagttactacccaaagcccaatctctccttactctttcatacaaaacccaaaccatactcagagcatcagcacacccagctaaaaggctacctttccagcttcccctggagctaggtgtggccatgtgactcagttctggccaatagaaaggaagtggacattggttttcttcctccctaagagggaggaaactggaacacgctgttttacccccagttcctccatctgctccccaaagccccaccattttttccttcttgctgtgctgcctggaatgtgatgtgattgctgacactctagcagccaacttggacaatgaggttatcttgaggatgaaaaccacatgccaaggatggcagagcacagtagtagaaggcttccagatcacttaagaccatgaagccaccacaccaacactgaacagcctaccgctagacttttcttgtgaggttttcattatatgcagtcaaacgtagattatactaaactagggactttgtaataactttcatttgcaaagcacttcaggatttacaagatgcctttacagcatcatgccacttagcccaaacttgctcatttacccacacgacaggagcccgtcacccttgacaaaaacgtactgagtatctatcacacgcagcaccacgatatcccccccagcactctaccctgatcagcagagaccaaagagatggctgaggctggagcagtcccaaggactcagtgaaacctgcggtgagggagccaaggtcagggtcagaccctccatggacgagatgttggctccgaagcccagtcagtgaccctaccaggttgccaagagtcaagattaagagtcagcttgtgatattactccccagcagccatgcccccttcctccagcaaagcctccaatttgctaagctaaggcccagtcacatcatttgagcctggatcaagctgtacctgaatccaaccctagcattttcagttctatgagccccaacattccccatttcactcaagccggtttgagtcaggttctcagtcacttacaacccacagccactagatccccagccagctacaaagcaagctggtgaccagtgtccaggctgtgtgaggggaagacaggacacaggcctgaatctttggcttctcaccaggccacacgtacctcagcaaataatccgaacttgtccttgaaggggaacatgcctggaaagtacttgttgatgagattcacaagggggtccttgtagccccacatgatctcacccacagtgcggttcatgaaggcacgttcgccgagggtggtgaatgccaaggtcatgatgagcttcagggtcatgggcttattctccatcatcaccgccgcaccctgcaaggcgaagggacactagtgtcagaggctggacgtggctggcccatcctcccttggccccagctgggcctcacagcaaagagcccatgaagggaaatgctggggtgcaggaggcccctggagtggccacgtggggcatctgggacaccagaaccaccctctgctcctccagtgccaaggccacatgtgctcccgagaaccccttctcccccttgcaccccactggactcaggctaagtgaactccagccccagtcccagaggcgggcctgtggctcagccctcaacaagacagccccttttggagatctcagaaatgtaaattgaaaagggaaaaaaaagtactttggccaggacttccaaaccaagacaggtggacccacctgggaaactcagaacccactgggggtggtggagacagcacagggccgaaagccacccaccaggcgtgagtccccacgctccgaccacctcagggactgctctctgcacaaggggcaggcgggaggagagacaggggacgaggtcagggtgcgaggcggcgtgggccacagggcagcctcaccaagaccaggatgttgggcatgacgatgtagtcgctctccgagccgtgggacttggagggctggaactggaaggtgcggtactcgaggaaggacacggtgtcgttgttgttgaaggtgatgttgcttttgtgcctgaactccctgtgggggaagccagtgggtcagacgccccgccccgctgcatgggacgtttcccttctactcgcctgcaatgcctgcctgggaaccaggggccctggacgtctgtgcacacctccggccccacagccaaagctgagctcggccccttcgccaagtctgtccctcccgccgcctgcccactgcaggacatggtgtcgccgcccacccggcctcgttctgctctcccccacccaacacggccatcgtctctccatctacaaaaggaagtaatcacaagccctacttcacagggcagctgtggggattaagcaatcagatacccagaaagcaatcaacacagccgccgggtgcagagaaagcacgaggtaaacatcagctgctgtgactgttgctgctgctgtccttatgatctctcatctctccaagccactctccaccatccagaagaatctttgaaaagtggaaatcaggtcgggagcagtggctcatgcctgtaaacccagcactttgggaggctgaggtgggcagatcacctgatgtcaggagttcaagaccatcctgcccaacatggcgaaaccacgtctctactaaaaatacaaaaattagctgggcatggtggcagatgcctgtaatcccagctactcgggaggctgaggcaggagaatcgcttgaacctggggggcggacgttgcagtgagccgagatcgcgccaccgcactccaacctgggtgaaagagagactccgtctcaaaaaaaaaagtagaaatcagatcgtgccatgctctggaccacaaccccactttgcatgcaggttaaaatcaggctcctaacgtgacctctgaggccctcagcaaggctcaggcctcgtctctccactgtctccctccctcgtaaccccagccgcacaggcctctgtcccagccttcagacctttgcacatgctctgcccgggactctgtctccccagggcctcttcccaccatgcgggtccagtgagtgtccctttgcagatgtgctcccgaccctccagtcagaccgagccccaaggccaccctccctcctgcactccggcttcacactgttttgtctgcacaatactgatggctgcctgatttccccttatttgtccacttctttactctctccccatcagaacatcagcttggtgaggcagggccttggtctgcctgcgcccccagcacacaggaggtgctcagtcagtgctcacagaatgaaggagtatagagagctttggcatttttgcccattctgtccactgctgggtcccctgtacttagaacggcagccaacacctagcaggtgctcagtaaacatttgttaaatgaacgagcgaatgagtgaatgagtgaacggaatgcagcagctgattcatgtttcccattcccaaacctcaggcacatttgctgggttttcatcttggctttcccagaaccagactgtgggtctccaacagcgggaacaccctctgcccgccccatccctggaacaccgtgtgccgggggcaagtcagctcccctgtctgtgaactgggaagtgggggtgtggaggaggggaggtgctgtgaaaacgccaggaggtaagggagttgtaacaggcacatccgccagccgtctcagagctccgagtgcatcctgagtgtcccggtgaccccatgaaggggctcttgtgtctctccagtctgcagacgggcaaactgaggctcagaggaatgaagtcacttcccctaggccacagccaggtacaggacaagcagaaagcaaaggcacaactctgtggtccttgggccagcatgttccacaaacagctgaccccttcccgtgctgacccacccggtcctctggcccagatagggtctggggggtcggtccctgctcctggtcatgcatgtgtgtgtgtgtgtgtgtgtgtgtgtgtatgtgtgtatgcatgtgtaggtacatgtgtgtgtatgtatgtgtgtgtgtatgtgtatgtacgtgtgtatgtatgtatgtgtgtatgtgtatgtgtatgtgtgtgtatgtatgtgtgtaactcacacatgcaccctccacccagacgcacaccattggtccctccctgctccataaagaacctctctaggcaacgtctggtgattcgcacctgtaatcccagcactttgagaggctgaggcggaggatcgcttgagcccaggacttcaaaaccagcctgggcaacatagcaagatcccatctctaaaaaaaaaaaaaaaaaaaaaaaaaaccctaaaacaaaaacttctctgggactagcacttaccccgactatgacttgcctgcttccggaacaatctctggggctcagtcagcagcctccccatcccgtccactctgagacccctcccctgcccagcctcagccggcccctccaccctcacctggacacagcctcacctgtacacgtagggcccgcgctcccgcacctgcggcttctcgcccttcaggatctcgctggggttcatgacgtcaaagaagtagacggagagatagaaggggatagggatctccttccacatgttgaaggacaggctactggggtcgatgcgcacgttctgcaggggaagggacaagtacgcttgtgaggagagtgatgagggccccacgccccaccacaaggctccggaacagctgcccgagcccggccagggaaggggctcctcggcgggagcttgggataggaggtggtgggaaagcccttcgcacatgaggctgtcgcacctggagcttatggaattaaacaggcaacctatccatgctgtcataatgcatcttaaaatatgtcctaacagcaacaggtgacaccagtcaagggactgtggtaaacaggggcccatgcaccacctaaagggagcgccggagctcagggtagcggatgggctcagggcagggatagcctcatgcaggaacatgggctccgtgtggccagggggatcattcattcattccacaagcaagcactgagcactaccacctgccaggcgggttctaagagctggggatgggagaatgaccaggacagaccaaaagcccagctatgtggggctttaccatagcggaggaaaggcaggcaccaaacaactcaggtaaaacgcatgccacgtgacagagcacagagaaaacacagcagggattggggagagactgggatttgagacagtcatcacgtaagtgaaatataggccaggcaccatggctcatgcctgtaatcccagaactttgggaggccgaggtaggaggatcaccagagcccaagagtttgagaccagcctgggcaacatagcaagaccctgtctctataaagaataattttatttatttatttattttttgagatggagtctcactctgttgcccaggctggagtgcagtggcatgatcttggctaactgcaacctctgcttctgtgttcaagcgattctcctgccttagcctcctgagtagctgggactacaggcccccaccatcacgcctggctaatttttgtatttttattttattttatttttttgagagggagtcttgctctgtggcccaggttggactgcagtggcgcgatctcggctcaccgaaacctccatattccgggttcaagcagttctcctccctcagcctcccgagtagctgggactacaggcacccaccaccatacctggttaatttttgttttagtttttgtttttgttttagtagaagtggggtttcaccacgttggccaggctggtctcctgacctcaagtgatccgtctgccttggcctcccaaagtgccaggattacaggcatgagccactgtgcctggcctataaaaaataattttttaaaaagtagctgggcatggtgctgcacacctgtagtcccagctacttgggaggctgagatgggagggtcacttgagccaaggaggtcgaggctgcagtgagctgtaatggcgccatttgtactccagcctgggtgtccaagcaacaccctgtctcataaaaaaaaaaaaaagaaaagaaagaaagaaaaagaacacacacaaacacaacctagacccaaaatcaaaacagaaggcagtgaggaagggagctcacaaatctagaaggtgaggcgcaggggacattccacagcaaccacagcctgtgcaaaggccctgtggtagggagacgctgggagagagcctccctgtgtggctgagtgagccagtcggaagatgagaacacagaagttttccatgaaaaccagaaataaagaaatgtatatgaaatctcctgatttaaaaatgttgcaaaaacatggttttcttaaagggactataggaaacacgcctggggtccacttggactcctctgccagctttcctcctctagatctataattcgctgccccagtgtcacagggaggtcccccctagtccacctgacccccaccctcaacccagccgggacatatctcgggcccctcagtgcccacaccacgtcagagcccggcaggagtgacccagcccattagactagagctgatgtcgcaaagccaggcagctgcgtcaccttccaccctcttttgaacatggccttctaagacaaggacagccagaaccaacaggcagaggctctacaggaggcagacagctgagctggccagtcagggccagccccatgtcccccggaaggagcagatttggaggcagccagaccctgggtcgcactccacggggccacttgggcaagtcagcccctgtgaacctcaagtttctcatctgtacgaaggagctagtgacactgtagctacaactgtgtctagtttgacctacgtggcgtgtcaatgaagaagctgaattctttgtcaagaaactggaagatgtaatgtaaaatctggatttcagagttctcttggaaaaatcaggagatcagagactggccttcaagtgccataattgtttattgataaacgtgtcttcctacccagctgccagcaccagaaggatcaccttatggtctgagcagcccataggtgcaaacgaaggcgcataaactgaatattaatgaggtaacagaagcgagcatttccggggtgcgccatgagcctggtgatgctgttcactgtgttctcatcctctgaacagcaccattactctttgaggcagccacctccactattattacccccatgttacagattaggaaactgaggcacaactaaggctggagagagattcaaccaatagttggagggcactgaggagtccgggaggtcttcctgggggaggtggtatgtgagctggatcaaagagcagtcctgccccctcggtaacgccctccccaccccatggcggctcccaccaccccatgcgaccacagcccacaggcaccagctccagcccctcccagctctcaggccccgatcgcccagcccttccttcagtcctggccttcacccagcctcaaagcccatgcactgcaggtccctctgtctgggacagaccctgcagccctggggaccctgctcaccacaggccagaccccttcaccagcctgggggacacatccagctgctggtgctccccccatagaaaacacagcatcaaaacccagaaccctggaaaatgtgttcggggagtagagcacgaactatatgttctcaccacagaaaacagtggggggcaggagggaaccgtagaggtgacaggtatgttcagcacctggatctcaggggcgggtttcccggtgtgcacacaccagcccatcaaactgcatatattaaatatgtgccattgttttatatcaatcacaccttaataaagctgcttttttaaaaaagcaaaacaaggcccagtgcggtggctcacacctgtaatcccagcactttgaggggccgaggcaggcagatcacttgagcacaggagttcaagaccagcctgagcatggagactccatctctacaaaaaatagaaaaatcagccatccgtggtggcaggtgcctatagtcccagccgcttgggaggctgaggtgggaggatgacttgagcccaggaagcagaggttgcagcaatctgtgatcacaccactgcactccagcctgggcaacagaacgagactccatctcacacacacacacacacacacacgcacacacacgcgcacacacacacacgcagcctcaatttccctttgcagcctccctctcccacctggtttctcagcagaggctgctgggctggagatacctttctcctttggaatctcaccatgctttcctcctcccctggccgcttggcctggttctgaagatgaatcagggctaaaccaagaagtcatgggatccggccgcgtgtccatgtctcaatctctctctctctctctctctccccaaagaagaggctttcaggccctgggtttcagcccattcattcagcactgcccaaagggaatcttcagagacccagcgcagccctgtccaactgggtgatcagggatgggtcactgaccttctccgagtctcagtttcctcaaccatacaatgggcgtaaggagagtgtcgcctcatgggctgctgtgaggtttgaatgagtccatggaggtaaagtgcttagaacaaggtctgaagaccccgggcaccagagggtcagccctgcagtcattaagtgacccttcctcctctgccccacctccacccgggttaagggatggactttgccctgcttttgatcagcaggatgacttttttccaccacactagaccaggcagctgattagataacagtggtggggacactgtggccttttgcctaacatggctgattctatgattctgtccccaccacccccaaggtcaaagaccatggccctggaacacagagttgggatagaatgccaaggtgagcccttgttggacgccactccctcccatctggcgaaatagaccctttgagcccaggaaggctgcctggaggaggggacatctgagctgggaattttaaaataagctgggctttgctaggaaaagaagatggtggaggagtgcctggcagaggacacagcctgtgcaaaggctgggaagcctttaagagcgtgacttgcctgaatgttcaccaaaaacaaatatggaatgatatatccatatttgatagttggaaacaactcaaatatccatcaacagataaatgaattgccacatatccacacaatggaatgctacctggcaatcaaaaagaaccaaccatggatgaacaccacaacacaggtgagcctcagaagcactaccccaagcaaaaaaaagaaaagaagaatcatactacacaacaccatttccgcgacatcggggaaagggaatactctagagagagaagccagaccagtggctgccggggaccgggatggagggaggggactaacgtgaactggcccagctatcttgattttggttgccatataggtgaagtgtatacatctgatgcaactcatcaaattaggccaggcatggtggctcacgcctgtaatccaaggactttgggaggccaagccaggagaatttcttgaagccaggagttcaagaccagcctgggcaacatggtgaaaccgtgtctctactaaaaatacaaaaaatattagccgggcatggtggcgcacacctgtggtcccagctactcaggagactgagctgggaggatcacttgagcccaggagttcaaggctgcagtgagccgtgatcatgtgcctgcactccagtctgggccacaaagcaagaccctgtctgaaaaaaacaacagcaacaccaccacccatgacatgctatatttaccgctatggaacaatctccagaatattttaagtaaaaaaaaatttaaaaatgaatactattactacctttaaaatataatgcaatcatgttgatcaaaaggcagatatgtgcatacacatataatcccatttatgtgacgttctaaaacaggcaagactaacatatcaatagaaaccagaacaggggtcacctgggaggttgggggataagcgggtgaaaattctgtttcctgatctggttgctggttacccgggactatgttcactgaaaaatgtatggtgttattccctttatatgtgggcttttctatacgtgtgctacacttcactaaaacccttttgaaactataatgtgaaattttaaaaataaaagattaactgcaaatgggcaaacgacttgaaaagaccttgctccaaagaaaatacacaaatagccaacaagctcatgaaaaggtgcttgacatcatcagggaaatgcaaatcaaagtcacaatgggccaccacttctcacccaccaggatggctagaattttttttcatggaaaatagcaagtgttggcaagggtgtgggaactggaacctttatgcattgccggcagaagtgtaacgtggaacagccactgtggaaaccagtctgaccgttcctcaaacgatcaaacgcaaagttaccgtatgaccctgcaactccactccccagaacagacccaagaagaactgaaaatgggtgtaaaaaacaacacgtacaagaatgtgcacagcagcactgttcgcaatgggcgaaaacgacccaagagtccgtcaacagatgaatggctgaacgcagtgtggtctgtccagacagcggcatctgactcacttagaaaaaggaatgcatgggttggctctttactactgcgtaaaaaagaaatgtatttaaagagccaaaaaaaataattttaaagaaaggaatgcggccaggtgtggtggctcacatctgtaatcccagcactttgggaggctgaggcaagtggatcacctgaggtcaggagttcaagaccagcctggccaacatggtgaaaccccgcctctattaaaaaaaaaatatatacaaaaattagctgggcatggtggcagccaactgtattcccagctactcgggaggctgaggcaggagaatcgcttgaacccgggaggcggaggttgcagtgagagccgagatcgcgccgctgcactccagcctgggtaacagaccgagatttcatctcaaaaaaaaaaaaaaaagagaaagaaagaaagaaaaagaaaggaatgcaacactgacacatgccaccacatggacaaacctcaaaaacctgacatggagtgaaagaagccagtcaaaaggccacacttagtgtctgaccacacttacgaaatgcccagaataggcaaatccagagacagcagattggtggttgccaggggctggggcagaaaggaatggtgggtgactgcttaatgggtacacggtaatgagaatgctttggaactagatcgtggtaacgattgcgcaaccttgcgaacgcactaaatgccactaaactgtacatttgtaaatggttttggtgaattttacgttaactggatcttaatcacaatttcaaaaagaaagattaactccaaattaaaatgagatatcatttcccagtagatgagcaaaaattaggacatccaagaaaacaactacaggcaaagatgtttggaaacaggaccgctgtgcacagcgggggtcaggccactggggagtcgggacagtttctaatcgggtcaggtgtgagcaaagccccatggtctgtgggttccctgttcagacatggtgcagagcaccagcttcccagctcctgccaggctagggccacgacctgcacacccaccagaagcctcatgagggaatacgcaccttcccagcatgatgcaacttacgttatgactccattattcgcccctctggtattctatcctattccattctgtttttaaaatgctgatcccaggccaggtgcagtggctcacgcctgtaatcccagcactttgggaggctggggcgggcaaatcatgaggtcaggagatcgagatcatcctggccaacacagtgaaaccctgtctctactaacaatacaaaaaaattagccaggcgtggtggcagatgcctgtagtcccagctactcgggtggctgaggcaggagaatcgcttgaatccaggaggcggaggttgcagcgagccaaaattgcgccactgcactccagcctgggcaacagagcgagactccatctcaaaaaaaaaaaaaaaaaaaaaaagctgatccccacccaccccacttatttcacaacccacaatctgatcacatctgacagtttgaaaactctgccctagaaagattctcctaagtgtgcaagaaagcgccagaagaattgtcagacctcaaaaaaagaacagagggccaggcacgggggctcacgcctgtgatcccaacactttgggaggccgaggcgggtggatcacttgaggtcaggagttccagaccagccgggccaacatggtgcaaccccgtctctactaaaactacaaaaattacccaagcacggtgacatgcacctgtagtcccagctactcgggaggctgaggtgggagaatcgcttgagcccaggaggcggaggttgcagtgagccgagatcacaccattgcactccaacctgggtgacagagcgagaccctgccttgaaaaacaacagagagcccagccaggttctcagtcaaagataagctgggcttctgcacacggtggctgcacagtgagtaaacgccatcgacttgcagatatctcaaaggcagaatcttgacagaaggacaaatactgcaggacaaatacttccagatttgtcttttagaggtgaggaatctgaagacattgaatacacagagagttgaatggtgcttacggggcggaggctggggaggtggggagatgcaggtcacagggcgcaaagctgcagtcatgtgggatgggtggtctggaggttgcatgcacaacacgaggactgtgattaatactgtactgtatactggaagcagatttcaggtgctctcaccactaaaaacaaagaggtggccgggactcatgcctgtaatcccagcactttgggaggccgaggtgggaggatcgcttgaggtcaggagtttgagaacaacctgggcaacatagggagcccatctctataaaaaatacaaaaattagccaggcacagtggcgcgcacctatggtcccagctactcaggaggcttaagtgggaggatcacttgagcctgagagttcaaggctgcagtgaaccgtgatcaccccactgcactctagcctgggtgacagagcgagaccctgtctcaaaaaaaaaaaaaaaaaaagaggtgactatatgaggagatacatatgttaatctgcttaactgtagtaatcatttcactatgtgtgtgtatatagcaaaacagcatttggatgccttaaatatacataatttttattatttatttattttgaaacagagtctcgctcagttgcccaggctggaaagccttgacttcccgatctccccagatcaagcaatcctctcacctcagcctcctgagtagctgggactacaaggcacataccaccacgcccggctatttttttatttttttatttttttgcttttagtagagacaaggtctcactatgttgcccaggctggtcttgaactcctgagctcaagagatccactcgcttcagcctcccaaagtgctgggattataggtgtcagccactgcacctggcctcaatttttatttttaaagaaaaaaaaatcttgagtgaagaaaaggctaaagaaagaaacaattgacatgggcctcttgatgtgaattttccaaacacatgaaataatactctatattctttctgaagacaaacccatgtggaaatgtagaaaaacattcagggaaatgatacctgcaaacaatctcaggagagggctgggggctggggatgtggggaaagctttaactgtcattgtgaacatgttatttcttgaaaataacatacgagccaccgtccgaacattggcctacaagcccctctgcctggtctggcccctgtgttctctctggccccacatccaactgtagcaggacaagtcacagacaaaactcctcagacaccggattaaagaaggaagaggtttttattcggccgggagcatcggcagactcgcgtcttaagagccgagctccccgaaaaagaaattcctagcccttttaagggcttacaactctaaggggtccatgtgaaagggtcataatagatcgagtaagtgtgaggaacgtgactgggggctacatacatcagctaacagaacaaaaagttttacagtgctttctcatacaacgtctggaatttacagataacaccagtagttttggtcaggggttaatattattattattattattattttaaccaccagggccaggtggtggcgccaaggtcgtctagctatttatcttacttctgtttctttccatctttttgctttctcccttttctcctgtcttataaactagggaaaaggggaggctggggagaagctgggaaggacaacagcagaagcggtggtctcattccacaaccactgtctgttactcagcccagccccacagcctccttgctatcctgtccaagaggccacgctcctgccccagggcctttgcacccactgcttcctcctaaacacgtggtcaaatccctcaccccttcgaatctctgcttacatgcccccttctcagaaggctcatccaacctgcccctaaaactcctgacctcccgacctgccgtgttgtttccatgctgcttgtggccttcgagcacacggtataattagcttatcaggtttattgctgtccatctgtatcacctgcctggccataaacccacaagggcaagatcctcagctgctttgtttggcgatgtgtctgtcctcagggcctgggacagctcttggcaccttgcaggagctctgtaaatattttctgggtgaatgagcaaaagtgagacctgaaaccatataatcaacgtggaaatgtctagcgggtggtaacgctagtcctcctttgtgtgttttaaacagctcatacttaagaagggatttttttttttttaaatacacagagagtaccgcctgtttaggccggggcaacaactcggtaaatgtgtgatggatgagatgaagatttcatagacattaatttttagcattctcttcctaccacccacagcactctcccctgcacctggagaggcccctgacctccaaacctaacaccccgctcgcccaggtgccacctcctccatgaagcccactggaacgacctcggcctacagtgaggctgctctgacctcattgggattgcagttcatgccctgtacaatcatccgccccatgctagatgctatgctaggaatttaaagacacagggatgaacacgatggggcccctgccctgagacgcccctgccctcagacaccaggggagcagaatcgtctggacgatctgcccggccctgttcaggtagcgaaacacttccacctacttcacctcttaaattctcaatggctcatctcatcgaagcagacactgaggctccaaagccaaatgcctgaccaaggtcacaggagcagggagagacagagccccaggctccgtatccacgtctaggcctgtgccctcacgcttctctcctaggccatccccgctgggctccttgcacgggagcttcacaaatgaatcattaacttgacctggccactgaattgcaaggtctaattcctcctcctatgagaagagaaaacaggcttccaagaaacacacctctgaccaaatgagccaagaagccaatttgcccagacgaagcctagttctgggacaaggccaggccctgcccactctggaccagcagtcagtggctgactacactctcaatcccagggctccaggcatccccagctccatggggccttaagatgcaggaacaactacgacacaggctaatccaatctgggacttgggaacaccacacccttggctcatgttccaacttcttttgatttttaaaggactaaggtaagaagactaaaataaaaggtttttacaagaaacccacgcttgtaagttgcttaagcgaagaggttgagtcattcctgagtcctccattttcctcccacctagcaccctccatcagcaaggctgggctgctctcgctttaaagcatgcctcaaatccatccacttctctccaacaccatcctggcccccatcctggcttgtatggatgggtgccgtagtttccccgctgttttcctgcctctgctcttgccccccgccccgttctccccacagaatccaagttatccttttaagattaaagtcagagcatgtcattctgctcaaacctcccccatgcctccctatttatctcagaatagaatctaaattcctgacagtgacctatgaggtcttgcacaacccagctccctatagtcactccagtctcctcccccattcctatctgcctcgctcactctgctccagccacactggccttgctgtgctcctgagccaccaggcaagtttctgccacagggcctttgcactgactctttgctcctccaggggcaatctttcccctgatgcccacaaaagtgagcccctcacttctcaagtctaaagtcactttctccgtgagaccttccctgagcaattttcaatcccttaaccatctctattgagccccactgtatggcaggctctgctctaggcctgggcacttcaatagtgaacaaaatggatgaaaataccattcttcctaaagcagcccttcccccatcacattatattcatcaccctgttttatctccctgacattatcaatatctgaaatttctatgtagttgttgataagtcccccttcctgctgcccggaattcagtcacaatggatggagctagagcagccatcttggatcatgaggcacccttaagaatgaaagccacacatgaagaagggcggagcagaataggagataggagaaaggattcctgtgacttcctggagccacccaccagccctgggtggcttagtcatcagagaaatgtccactggactcacagtgagatcccatgccatacaccagaatggctacaatgaaaaagactgacaataacaagtgctggtgaggatgtggagcagccagagtgctcacacattgctggtggaagtgcattagtgcagtcactgtggaatatactttttctaccaaagctggacgttcaccctacaatatagcaatcccacccccagtatttgtcccagaaaaatgaaagcatgcacccacacaaagattatccacaaatgctcatagcagccgtacccataacagcccaaaactggaaacaacacaaatgtctacaagcaagtgaatgcatgacaaatggggacacactcataccatggaatgctacccagagacaaaagggaatgaccaattgagacacacaatgacagggtaaatcacacacagggaccacgtgcatgagtccatataagtgacgtcccggggaatggcaaaaccaatccatggggatagaggtgggggcagcaggacctcaggggtggatactgacagggaggggtgcgggggaggcgtttacacttggtatagggggtcattacaagcgtgcatacctaggtgaaaatccatcaacctctaaccgaaattgtgcacttttcttaatgcatttgatacttcaatttttaaaaagaaaaaaattaaagcaaaaaaaattttttcttttttcagacagagtctcactctgtcgcccaggctggagtgcagtggtgtgatctcagctcactgcaacctccacctcccaggttcaagcaattctcctgcctcagcctccagaatagctgggactacaggcatacgccaccatgcccagctgatttttttttttttttagacggagttttgctctgtcacccaggctggagtgcagtggcgcgatctcggctcactgcaacctctgcctcccgggttcaagcaattctcctgcctcagccccccaagtagctgggattacagatgcccgccaccacacctggctaatttttgtatttttttaagtagagacggggttttgccaaattggccaggctggtctcaaactcctgacctcaggtgatctgcctgcctcggcctcccaaagtgctaggattacaggcatgagccaccgcgcctggactgatttttgtatttttgacagaaatggggttttaccatgtcggccaggctgaggtctccaactcctgacctcaggtgatcggcccaccttggcctcccaaagtgctgggattacagacgtgagccactgcgcctggcctaaagcaaaaaattattgatccagggttgggtactcttcagatgttcaatacaccctcaagtggtgtcgctaataagagagcacctacagccaccaaggcccaatcagggtcccagtgccccgtcaaatctgatttctgaagcagagcagcgaggccagccaggagaccaccaggggccctggagagacgtgagaggtctggggtcccctctttaccagcaaaggggctctgtccactccctgtcccctcaaccccctgcccatcctccacctaccagcaggcgcctgatacaacttcctgtgcctgtttctttacctgtaacaaggaataaagaataggacccatgcagcagggacaggtcatgttgacataatgtgctgggaacagcccttcgtcactgcgatcttccttccaaaacccggaactagggcctaatcaatagaagaacaacagacaaatcccagcagaggggcgtcctgcaaaattcctagccggtgctcaggaacgcaatccaggtcatccaaagccaggaaagtctgagaacccacagagaccagaggatcctaaggcaacgtgagggacaaacgcaatgtggggccctggattgggtcctgggacagaaaatgatacgaaggagaaacgaaggaaacgtgaatcctgtctggatgttagttattactgatgtatcaacactggttcattcatagcaacaaatgtatcccattcctttaagatgttaatagcaggggacactggctgtgggatatgtgggaactcagcactatcttcccaatttttctgaaagttgaactgttctaggccgggcgcggtggctcacacctgtggaatcctagcactttgggaggccaaggcaggtggatcacttgaggtcaggagttggagactagcctggccaacatagtgaaatcccgactctactaaaagtacaaaaattagccaggtgtggtgtcaggcacctgtggtcccagctacttgggaggctgaggaaggagaatcacttgaacctggaaggcagaggttctagtgagccgagattgtgccactgcactccagcctgggcgacagagtgagacttggtctcaaaaaaaaaaaaactgttctaaaacagaaagttattttaaaacaagcaggctctgtcgcggcaatacagggagggccaaatcagtgcctcaccgaatcatattacagcttcaagcaaaaggaaaaaatgtgcaccccatatttatactttttccagaacattaaggtctttttgtaaaaacactgacaatttcaaaagttcacatattaacacaacattattttaagtttaaatattttatttaagcccacccaaaccagattatactatcatgttaatgacctggctttaatggaagcattttcattgtattagcttcccactgctgctgtaagaattaacaattaacactggctcagatcaatacaaagttattatcttacagttctcggggggagaagtccaaactgggactgcccctgagatgggatgaaagtcacggtgcaggcagggtgcttccttctggagctcagggggaatccattgccttccgtttcccagcttctaagaggcctccgcattccttggctcctgtccccttatcactccaacccctgcttctgaggtcacatctcctactctgaccctcctgcctccctctgtcaaagatccttgtgaaagcattgtggcccctgggacaatccaagttcatctcccatctcaagatccttaactttttttttttttttgagacagggtctcactctgttgccaggctggaatgcagtggtgtgatcacggcttactgcagcctcgaactcccgggctgaagcaatcctccttcctcagcctcccacataactgggaccacaagcatacaccaccacgcctggctaatttttaaattttttatagagatggggtctcactatgttgcccaagctggtcttcaactcctgggctcaaaaatctcccaccttggcctcccaaagtgctgggattacaggtgtgagccatcatgcctggtgtaagatccttaacttaatcacgcctacaaagccacttttgctgaggaaggtcacatattcacaggtcctggggatcaggacgccagcaccttttggggacattgttcagcctgccacacccacccagagaccccagagcatcctcccacacagccccctccaccccagggaacacccctgcaccagggagtgtgacatttgccccgtgcaccccttcctctccccacagccctatcttggccagaaggcaggcttcgctagaaacaaggtggacccggcaggaagcccagtgtcctctttaatgggaagctccacgcccaggatgctcacacgtcccccgcttttgaaccctgctgtgttttggcctgagctgtcctaagagaaacccgggccggggaatgatctgcggagcaggacactctcccgcagctgctttcaagcagctcagcgggggcactttgttcttgcagctgggatctgaaaagcaagccctctgggctgcggacgtgcccgtgctgcctgcactgcctcctcgtgactcccgagacctcctgccagtgacacgagggtgtccagaaacacaaaccgaggcccgccctgaaaagggctaagccagcttcatcctcagccacatgggaggaagaatgcaggcaacagccagcaggggcctgaggggccctgcaaggccagagccaggggtcttgtcaaaagcaggcctcccaagccagtgagctcccacgggacacacggggggacagggaggcagccagaggtcagaaccactccagggtcctcaggttcccagaaacttccaggctgggccgggaccagaaacagacgtcaccggtgccagtcccttgtgctggtccctgagccacagcccctgaggcccccaaaaggggcccaaccaacaaggggctgagggtccgggcagagcctcccactccaggcatgaggtctcgggcaatttctgaacactggagcaggtccacctttcaaacctcattactgccctacagaacgacttttggtgtgagcatagtactgtggtcatgcttggggattttcttttgctttatcattgtggtggtgtttactaggtacctgttcgggcagtggttcttgaagtgtggtccctggctgagcgtggtggctcacgcctgtaatcccagcactttggaaggcaaagataggaggatcacttgagcccaggagttcaacagtctgggcaacatagcaagatctcatctctagaacaaaatttttttacaatagccaggcatggtggcatgtacttgtagtcccagctacttgggaggctgaggcaggaggattgcttgggcccagaaggtcgaggctgcagtgagctgtgattgcaccactacactccaggctgcacaacagagcaagaccctgtccacccccccaaaaaaaaggcggtctccaaaccagcaacatcagcatcacttgggaactcgataaaaaagcagattcccaggctccatgccaggtctgccgactcagacactcaggggctggggcctggtgatccgtgttttagtgagccctccagcgtccagactccaatgcaccatgaagtgccgtggctatactagagacactgacggatgaggcaatgtctgacatgagccccagaacaatgtggaaaaggggaaagtgtatggaggcacgtgcagaaggcaagacttggtatctcctcagcaagttacagggcccgtgaccatcgcaccggtctatttttatgtatgtttgaattttttttttttaagagacagggtcttgctctgtcaccctggctggagtgcactggtgcagtccgagctcactgtagccttgaactcctgggctcaaaccatcttcctgcctcagcctccttgtagctgggaccacagcagcttctgtcaccatactcagctaattttttcattttttgtagattttattttttgtaggggtctcgctatgttgcccaggctggtctgaaactcctggcctaaaccaattctcccgcttcaacctcccaaagagctggattacgaacgtgagacactgcacccagcccttgaaatttttcataaattttttttaattcactcaaaatttcttatacaccgcatcctccccgcccccactaaaaaaaacacaaactaggtcttgtctcttcctgaaacagatgccacaaactgggcccatgggccagattttgccagtagatgggttttgaatcacatatttcaaaatatttgaatctgttgacagtatcttaaaccagcaggtaaattcctgccttctggcttcttttgggaacctgggtgatgtccagctctgggcctgcatgccacgtggcccagcccgctggagcaaagcaggagccgcttcacagttggggtgtgccctccagcttgcaacgggccccaccactccctatcacctcatgccagggcccttcccccatgtatgttcctgcacagtttgcaatccctgtcctatagtaacacacgatgagaacgtggcattcattcattcattcattcactcagtcattcattcatttcaaccctgcctgagcatccaaagcgggcgatcagtgctacaggggtaaagttaatccaacaggattcctgccctcgtggactgagcaggaagtggggaagaggacacgcaattcacaagtgactcaggtacccagtaggaagagctcagggacatcacacgtattcactggcacgcactggcaagcaccagaggtctcgcgcatgtgtcactggccagaatgtccatcagtacagccacctcggagagccactgggcaaaatctactgaggcagagcacgatgttctgaactgctgaacgcatctggaaaccaccacctcccatctctcaggaagcacaacagtaaacatctgcattacagaagccactggaggcaagttttatgttgtttccagctcaaagcatcccatttaaagcaatgctttcatttatttaaacctaacaattaggctgggtgtggtggctcacacctgtaatcccagcactttgggaggctggggcaggaggatcactggagcccaggagttcgagaccagcctgcgcaacacagtgagccccatctctacaaaaaatgtttaaaaatttgccaaatgtggtagtgtatgcctgtagacccaggtacgtggaaggctgaggcaggaggatcccttgagcccaggagatagaggctgcagtgagccatgatcgtgccactgtactccagcctgggtgacagagcaagaccctgtctcaaaataaaatgaaataaaataaaatagaataaagctaataatttgtctccattttactgatgaagaaagtgaagtacagggagattaaaccactcgcttgcccaagagcacaaacccaatgttggcacagagtcttgaccttgggtctgaccaaaggctgggcactgccttggtaaaggcccagcacaggcgtggcaagtaaggagctcagaccagcgaagagaatgctggaaggtgcatacagtcctggtccccgggcacagagatgaatcaagcacaacctctccttccccgccaaatcagggcctcatcctgctccccagttgcacctgcatgacgggaactccaggcagcccacctctacttgcttttttggacaaaaacaatttctaccagggctgatcccagccccactgtttccacacaagtcagacagtgaatatgccttctttcaaacaccccaacctcaataaagctggctgttttcaagcaaaaacattattcttctctgttcttagaaaggtttcaacaagctacagcctgtggaccaaatccagcctgatgcctatttctactcaccccacaagctaacaatcattttgcattttcaaatggaaagaagggaaagaggggaagaaagggaagaaagaaaagaaagaaagaaggaaagaaagaaagaaaggaaggaaggaaggaaggaaggaaggaagggagaaaaaagaaaagaaaggaaagaaaaagaaagaaaagaaaagaaaagaaaagaaaagaaaagaaaagaaaagaaaagaaaagaaaagaaaagtcagccagctgggtgcagtgctgcacgcctgtaatcccaacactttgggagaccaaggtgggagggtcacttgaggccaggagttcaagacgagcctgggcaacatagtgaggaccccccctacacacccacccaccaacctataaaaaaaaaaaatgagccaggcgtggtggcacatgcctgttgtcccagctactcaggagagtaaggtgggaggataacgagcccaggaggtctaggctgcagtgagccatgatggtgcccctgccccccagcctgggtgacacagtgagaccctgtctccaaaaaatatgttaaaaataaataaacaaacaattgaaagaaaaatgccatttcatgacatgtgaaagttatatgaaattcacattttggtgttcataaatgcagtggcactggcccacagcggccacctcgacttatttctgtgtcgtcaatggcagcctcagcatcacagcagcagggctgagtagctgagacacaacccgtgcagcctgcagagctgagcatattgactatctgtctctgtacagaaaagcatgccaaccccagcctagaccacacagaaattcaggaagggccatcccctgccaggccagcttcacgggtgaggccggatctggccattagggagagggccagggcgcagacctagttctggcctcggctcagtcagcccctcccaccccggtcccctgatatgccacatggagacgtgactgcctccccatcctccccgtggcagtgcagagagaatgagatgacccaggacatgtgtctgttgtgaagagggcacccggctataaacatgcctcagggaactattgttacaggagcctccctgagctcaccactggctccagttcaagaacacgtcatgaagccagccaaggtcttgtaaaatagggcaacggtggtttgggcctggaggaatcagaagctcagggctgcctgcttcaaaggctaagtcttctgcaacaggctcagcatgttggaatttgaccctggccaacaggctgggccgtctggtctaccatctacaaaccaacagcccaacccattcaagcaggaggggccggtaccatttctcccttcaggttaaaccctgccacagtttttaattttaattggggtaaacataaaatttaccaacttagccttttttttttttttttttgagatggagtctcggtctgtcacccaggctggagtgcagtggtgtgatctcagctcactgcaacctctgcctcccaggttcaagaaattctctgcctcagcctcctaagtagctgggattacaggcgcctgccaccatgccaggctaatttttgtatttttagtagagacggggtttcaccatcttggccaggctggtcttgaactcctgacctcgtgatccacccaccttgggctccaaaagtactgggattacaggcatgagccactacacgcccagcccaacttagccatttttaagtgtacagttcagtggcattaaggacatttgcaatgttgtgcaattatcagcaacatccatctaaagaactctttcatcttgcaaaagtgaaaccctgtacccactgaaaaagagctctgcaccccctctcccccagcccctggcacccaccattctcttttctgtctctgtggatctggctactctagggagctcatgcaaatggaatcgtacggtatttgtcctgttgtggcttatttcactcgcataacttcctcaaggcccgtgcatgtcgcagcgtgcgtccaaacgtccttccttttccaggctgaatcctattccaacgtgtggatgggccccagcttcttacccaccacccatcagcggacactcgggttgctcccaccgttgggccatcgtgaacagcgctgcaatgaacgcggtggccagattcctcttcaagttcccacttccatttctttgatacccagaagtggggttgccccaccatatggtaattctatgttaaattttgggggggcctccacacagcagctgcaccatcctacattcccaacggcacacatgggccccgatttctccgcaccctcaccccaacggcacacatgggccccgatttctccgcaccctcaccccaacggcacacatgggccccgatttctccgcaccctcaccccaacggcacacatgggccccgatttctccgcaccctcaccccaacggcacacatgggccccgatttctccgcaccctcaccccaacggcacacatgggccccgatttctccgcaccctcaccccaacggcacacatgggccccgatttctccgcaccctcaccccaacggcacacatgggccccgatttctccgcaccctcaccccaacggcacacatgggccccgatttctccgcaccctcaccccaacggcacacatgggccccgatttctccgcatcctcaccaatatttgagattttctgttttctcaagtgaccatcctaatgggtatgagtgtgtctcactgattctcatttccctaacgatgagcgagtgtcgctgagcacacttccatgtccccgttggctatctgcattttttttttttttaagacagagtcttgctctgttgcccaggctggagtacagtcttggctcactgcaacctctacctcccaggttcaaacgattctcctgcctcagcctcctgagtagctgggattacatacaggcgcctgccaccacacccggctaatttttgtatttttagtagagacggggtttcgccatcttggccaggctggcctcgaactcctgaccttgtgatccgcccaccttggcctcccaaagtgctgggattacaggcgtgagccaccgcgcctggctgcctgcatgtcttctttgcaggtgcttggtccgtgttttaatggggttgtctgactcttgttgttgagttgtcctcgcttgattttaggaccagagttaaggcccacactccatctgctctcaacctccctcccccgatcttctcgtctcggaaaatggctccaccatctaccaaactcctcaaaccttgaggaaccacccttgattcctctccttccctcgcaccccagtccactgacctatcttgttgactctccctgaaaaaaaactcgaatatgttcccttctttccatttagaaaactacccccacctggctcaaatcaccatcttctctgcctccccgcttccagcctggcccccgacactcccttctccagacagcagccagagagctcttcaagactgagtcaggctgggcgtggtggctcacacctgtaatcccagccctttgggaggccaaggcaggtggatcacctgaggtcaggggttcaagaccagcctgcccaacatggtgaaacaccatctttacgaaaaatacaaaaattagccgagtgtagtggcacgcacgtgtaatcccagctactcagaaggctgaggcaagaaaattgcttgaggctgggcgcggtggctcacgcctgtaatcccagcactttgggaggccgaggtgggcggatcacgaggtcaggagattgagaccatgctggctaacacggtgaaaccccgtatctactaaaaatacaaaaaaattagccgggcgtggtggcgggcgcctgtagtcccagctacgcgggaggctgaggcaggagaatggcatgaaccagggaggcggagcttgcagtgagcggagattgcgccactgcactcccccgcctgggcaacagagcaagactccgtctcaaaaaaaaaaaaaaaagagaattgcttgaactcgggaggcggaggttgcagtgagctgataccatgccactgcactccagcctgggcgacagagaaagactctgtctcaaaaaaaaaaaaaaaaaatactgagtcagatcatggctcttccctgctcagaaccctccatggaattgaaaaccaaatctgaactcctccaggtgtcctgcaaggcccccacatgcctgtcccctttcaccccctccagtcacttctcccaaccccactggcctgctccctcttcctccaacacagcaggctccttcgcacctccggcctttgaacctgctgtgctctttgccagctgctccccagctcatagagcccctcctctgagaggccctcctgactcccacatcagaaggagtccccttcccagcagtggctccatgtcagctcacctgcctcgtccccttcctagctcttctcgccaccccacctcttccatgtgcttctccatggcccatccctcctgctaaagcgtagctgccgtgagcaggaccaggtctcttttgtccacggctgtagctccaacacttggcacgagacctggcccacaatttgtgagcagtaaacatgggccgaaaggatgagtagctttccctgccacttcagccctgggggtccctcctcctcctcccacagtcctgtgtgccccattcaggtggttcataaacagctgcccggagcagattctccactggggtttgtcccatctgtaaaatgagggttgtaaatgtgcccaaacagctggggatgaatgcaaagcgccccacgccccgtgtcactcccagccaggagcaagagggcaccatgccagtgctgcctctggcccaggcagtcacctgtccaggggaaacaggcctctaaggctccaatggcctcacgcactggagttcatcaataacacaagccgagaaagccccaggaaagctggagacgctgccggaaatgcaaagctgctcattcttccatccgtcccagctaaaggggttcgaggaagctcctccccacacacctcccagggtggaaggggacctcatatctcagcggggctctggccctggccccagcatcccagtccctgtctcttctccctgcccccaccaaggacacagatgcccaggcctgctggcagcttcatcacacttatctgcactcccaagccacagattacagctgtcaggcccagaggaaacgtggcggtcacatcaaccctgactctgaaaacagccctgaaagacacaggggtgtttccagcacagcaaggtcttactggaaaggacccctggaccccaatgtcctagaggtgtgccccacgaccccacatgcccctcttcactgctctggcctttgggaaacacagccctgtcctttacaaggtcctatttgcaaagcctgctgggagacagaggcccagggctcggatgaggatgggttctgtgcgggaacaagagatgccaagatccacctaggtgccccagccaagaggcagaaaagcatgggaaccgtgtgcccttgtgggacgtgtgccacggacgggaaggatacgggtgtgggtccccctctgtggacgcaaacatgtttattgcaggaaggaaaaacaaggaactattaacccaagtcacctctggagcaaagaccagctggggccaggggagcagtgtcgtgctgtgatctttccagaaggctgactctttttccgtacacttttaatttgtttgatcatatccctattttaccttccttatttttaatgccagccagggctttctgggtaagagctgggcacacccagggagaggcacgtgaccatccgcagctgctctccttggcctccagtttgttttgtttttgtttcttactttctgtggagatgggggggggggtcttactatgttacccaggctggtcttgaactcctggcctcaggcgatcctcccacctctgcctcgctaagtgctgggattacaggcatgagccactgcgcctggccttgacttctggtttgtgagatggaagaacattggccccatgtgcagaggtggaaatcggcttttaggaaaaaagtgagtttccacaggacccaagtaatgggacctggatttgaacccagagctctgcagatctgaggattgggcacctgcacacatagtgctggtctgaagcatgtcccctgccaaattcatgcccacctagaacctcagaatgtggccttatttaaaaatagggtctctacagatgttaccaagttaaggatcccaagatgagatcatcctggatttatgaagggccctacatccaagctggaggccctccaagcccaagctggtggggtctagccccagtttgctctgtgaccctccaacatggccctcaaaatctctgagcctcagacccccacctgaggacttatgaaaggaagaagactcaaattcacacctcagaaaagcacatgagaacaatgctgcaccacgtaccctcactgagaccccagacattctcgaagactaaatcgtctcaggtgctggagaggatgtgagagctgggagggtgaacagcagtggcccttctggaaggcatgttgggtgaaaatggctccccctctgccctacagcaattccactcctgcgcatccccaggaaattgtggagaagtacaaggcagcagggtccagcatatttgctgtttgtggaggcaggagtcagacataaccaaggtacccccgtcgctaagggaataaatacaacaggatgaacatgaattagggggtccaggcagcagaaggaagcaataagcctgatacacacataggaacacggatagattttaaacagggcagcacgaggaatgttgacacgagttaccgtgcatggcatggaaaagccgccctctcctcagacgtgacaggccacatgaagggggcctccctgtgccacccccagctcaaagcacttccacctctagctccctcggtcctcactgaatcctataggaaggcatggttttagcccattttataggcaccctactattatgagctgaacagtgtccccccaaaattcccatgttgcagccctaaccctcggtgcatcagaatgtgactgtattggcgcggggggcagggcctttaaatcggtgattacgtttaaatgaggtcagtggggtgagccctaatccaatctgactgacgcccttaaaagaggagattaggacccgcagagagtcaccggggatgtgcgcacacagggagaaggtggcgtctatgaggccgggagaggggtctccggagaagccagccctgccaacatcctgatctcagacttccggcctccagaactgtacgggaatacatggtctttggcccatgcacctgttatggacatttttttctttctttctttcttttttttttttttttgagacagagtcctgctctgttgcccagactggagtgcagtggcacgatctcggctcactgcaacctctgcctcccatgcagactcagacacccaccagagaccagagactcgaagagcctgtccatggtcacacagcagcaggaggcagggccgggatctggacccacacctgcaggctccggaatctaggactgcacaaggtccaaggacacactcaggtttacagacgcagccacacagaggatgggcgcaggggcagggcgggctgaagagcgagaggggtgaggggaaggagggcataaaaggagaccactgaaagcagaagccaagcgagttcccgaacatgcgcgctcccagcagcaccgctcccggcagccaccagcccagacgcccatccacagaggcgcggaaaaacagcatgcagtgcacccgcaccgtggaggcctgctcagctacaaaaaggaaagcagcactccacatgccacaccacggatgaaccccaaaacatgacgctaagcggaagcagccaggcacttaaggccacacattgcatgatttcatttataagaaatgtgcagggccgggcacggtggctcaggcctgtaatcccaacactttgggaccgaggcaggtgtttgacctgaggtcaggagtttgagaccagcctggccaacatgtgaaaccccgtctatattaaaaatacaaaaaaaaaaaaaaaaaattagccgggcgtggtggcgggcgcctgtagtcccagctactggggaggctgaggcaggagaatcgcttgaacccaggaggcggaggttgcagtgagccgagatcacgccactgcattccagcctgggtgacacagcaagactctgcctcaaaaaaaaaagaaatgtccagggccgggcacggtggctcaggcctgtaatcccaacactttgggaccaaggcaggtggatgacctgaggtcaggagtttgagactagcctggccaacatggtgaaacccgtctctactaaaaatacaaaaaaaaaaaattagccgggtgtggtgacaggcgcctgtagtcccagctactcgggaggctgaggcagaagaatcgcttgaacccgggaggcggaggttgcagtgagccaagattgcaccactgcactccagcctgggcgacagagcaagactctgtctcaaaaaaaaagaaagaaagaaagaaagaaatgtccgtaacaggtgcatctgtagagacagaaagaaaatgagtgattgccaggggctggggagctgcaaagagtggagaatgggcaattctacttgggagggatggaaatgttttgaaactaggtagaagtggtggtatcactgaattattcgatttacaaggattaattatatgttatgtgaatttgaactcaataaattattaaatgaaaaacaaatgataggattggaaacgctgcaaccactttggacaagagcttggcccttctccatgcaggtgaagacacgcacgccatgaccagaccccctactctgactgtcgggccctagagggattcaggcacatgtcccttgcaggcagggacacgagtgtgtcataacccagaagtgaacacagtcaccggcatcagggttaaaacagatgaactggccgggcgtggtggctcacgcctgtaatctcagcactttgggaggccgaggcaggcggatcatgaggtcaagaggtcgagaccatcctggccaacatagtgaaaccccatctctactaaaaatacaaaaattagctgggcatggtggtgcacttgggaggctgaggcaggagaattgcttgaacccggggggcagaagttgcagtgagctgagatcgcgccactgcactctagcctggccacacagcaagactccatctcaaaaaaaaaaaaaaaaaaaaaaaaaaaaagacagatgaactgtgatactcagcttcttccgattagcatcatgaactgtgatatgacatggccatgaaaatagagtgcagcttatcgcagcaatgtgggtggatcccacaaataccatatgaagtaacaccagcaagaccaaaccaaacaaaaatactgagagtatgcctgcatccaagttaagtccaaaaccggaccaaactaatcccggtgtttagggatggctatgagggagtgatactataaaaagcaaagcaagctgggaccaaacacagtgtcttctgcaggggcttcggggcagatgagctttccctcttcttcacgtggggtgattgcatgcatgttcatcttagttacatatttgattgcatatgtcttacactttcctcaaagtgagcaaatttcacaaaaaacagaaatccaagactctgggtggaaagtgcaaagcgaggggttgcagcaggtggagtccaggagcctgggaacagacagtggaaggaaatcccaaggacaggggagacttggctgttcccagagctgccaagggatcctggctgcaatgggctctcggccaagtaaggccagtttgacctccacctgcctgccaggaggccagacagggccaagatgatctggcacaagaatttccacaaggctctgaggcctgggcatctgggctagtggctgccgggaggcccagttagggagaggcaaaacaggaaaagcccccacctgccactccatccagcctcccgtttccacccgaccagccctgagaccccagggtttccacaatcttcctggcccaggggatgagtcagggatcagatccgccatctcttcccatgtgatggcactggggtgggcagaggctggccgagggccgctgaaggatggacacatcaccgctcaaaggcaaggaatgagagccagaaattttagaaagcaggtggaggaagggaccaggaggaattgcaggcttcttcaacccaagaggttcagacttgcactgtgactgccaggctgggagctgggggaggatccaggcacccaaccccggctcatcagaaacactctgctccaatctgattcacacaatgaggcttttgtgtgggagtctgtgggaagaccacgtgcactcctgagaaagcaatcagacaaatccaaatcaagggccatcctgccaaaagcacccgcctggcccctttacagatgccagtgtcctgaaagacccagcaaagagaaaagggctggagaacaggtctggattaaagaggaaaaacacatgaggcaaccagacacagcatgcaaccttggattcaaaaaaaaattttctttttctgagacggagactcactctgtcgcccaggctggagtgcagtggcacgatctcggctcactgcaacctccgcctcctgggttcaagcgattctcctgcctcagcctcccgagtagctgggactacaggtgtgcgccaccatgcctggctaatttttttacttttagtagagacagggtttcaccatgctgcccaggatggtctcaatctcttgaccttgtgatccacccgcctcggcctcccacagtgctgggattacaagcgtgagccaccacgcccggccaattcaaaattttttaatgaacaactatgacaaaaagtgttattggggccgtaagggaatctgaacacagactgtcagattaaaggtgtggatcctcgtggccttcttgagtggggccgtggtccacggccatggagaaggacgtccttgtccttaggatgcacccaaaaggctcagcaacgagagagagaggatgcacatgcagcaacttgtacttttcttcccgtttttacaaaataaaatctttgaaaatagaaccttgggtgatgtggtggtggaagaacacactgggctgctttattttacaagctggatgcctccctcgtgagaacggcagaacgagccgtggtacatccgcaccgtggagcgtttccaggcatctagagaatcagagcgtgatcatcaccagaaaatcccagctgactgaggacgacatggacaagcgatgacagcgtgagaaacccacggtgcagcaaagcgtgcatagtatggtcccatttcagcaaactgctgacagatggatccctctctatgtctgtgtctatccggttaagatgttggaaacagccagcccttacttgacacttgccgagctgctatttgaagtgtgacatgtgccaattctgccaccttaaaagccctatgtaggagacacttttattaacttcattttacagaaaagtaaaaaaggcacagagagggtaagtcacttgcctgaaggcacccaactgggaagtggccaagccaggatttgaacctgggctgcctgccttcaaagtccatatgctggggtccacctgagctgctggaagctaaagccctgccaaaggctggagagaagcctgggatgctgctgggacacactgcagggtaaacccagtggctaggattccagatcaactcctccacgggtgcatctgggcagctcatccctcccacccctacctcatcccctctctgcccacggcacacccctgcagcctctcaccttgggtggacaaagcctgaactttggcacaccagccctgatatctccccaactttttaaaaaatgcctcatcccagtcctgccgccaggatgtgaacaggcaggggtatcaatgggaccctgggaactttctgcctgaagaacattcgttagtgacttcctccggcacccacccaggccccttccacccttgctgcccgggccctcctggcctccatccagctagcctgggacagtcggccccacccagcactggctgctaactatctccgtggccttgagtaaacctctgctacctacagaatttggtttccaaaggaaaaataaaagatagaactgagcttcggaacccaagtcagtccagatctaacaatctgacagctgatgaaactttccccgttagagcaattaggccaggtacagtgattcatgaatgtaatcccagcactttggaagaccaaggtgggaggattgcttgaggccaggagttcaagaccagcctgggcaacatagcaagacccctgtctctacaaaaaatctaaaaattagctgggcatggtggtgcacacctgtagtcccagttattcaggaggccaaggtaggaggatcgattgagcctgagtggttgaagctgcagtgagccgtaatcatgccactgcactccagcttgggtgacagagtgagaccctgtctcaaaaaatctaaataaataaataataaagggtgggcactgtggcatatgcttataatcccagcactttgggaggccaaggtgggtggatcatttgaggtcaggagttccagaccagcctggccaacctggtgaaacctcgcctctactaaaaatacaaaaattagccgggtgtagtggtgggcacctgtaatcccaactactcaggaggctgaggcaggagaatcacttgaacccgggaggcggaggttgcagtgagccaagatcatgccactgcactccagcccgggcgacagactgagaccatgtctcaaaaaaataaataaataggccgggcttcgtggctcacacctgtaatcccagcactttgggaggtcgaggtgggcggatcacctgaggtcaggagttcgagaccagcctggccaacatggagaaaccctgtctctactaaaaatacaaaattagctgggcacagtggcgcagcctgtaatcccagctacttgggaggctgaggtgagagaatcgcttgaacctgggaggcaaaggttgcggtgagccgagatcacaccattgcactccagcctgggcaacaagagagaaactccgtctcaaaataaataggtaagtaaatataagtaaatacatacataataaacagctggtaagctactacctcctcaagaggccttggtaaacagaatagtcagccaaacaaaataatctctaatactgtaacagccagagacagtgaaaggcaatgtggggatgaagtgggaagctacctgggggcaaaggggctcagccccatttttgctgcctatggccgcctcttcccccgacaacagcccctcctttttgccttttgggaaccaccctactcctacctgagtctctgtgggcaagaactacttccctccctggctccaaatgggcaggcgacccaaggctgaccaatcacagcagtccattactcgagccacagcaattggtccaaggatgcacatgtgatcccagctcagccaatcacagccaatgagcattgactccataagttgtgccagccactgagaaaattctttaattctccttcaatatccctcaggaaggttcccttccaagagcttctgggaattccaaagcagtcagtttctccctgacgtggtgcagatgccatttattttctaagcgtcagaggaagccactggcaagtgagactggggcgtacatataaaaacataggaatctaattctagaatcgcattcagcctgtccagatgccctgtcacgggacccaggaagaacagcagggtcacaagaaactcactccctacattgacactaaccaagtctacttatgagggtcactgctgttttcctttttttttctaattgaatgcatgtagatgattttgcatgaatgacatgcttatgggccacacctccacattcctgcacggagcaaaatcacaagcagaatggacctcggtctcctgactcagcctcgcacagtcctgctaatgagaacaaagtgaaacataaaggattccatttttttttttttttttttgagatggagtctcactgtcacctaggctgaagtgcagtggcgcgatctcagctcactgcaacctccacctcccgagttcaagcagtcctccgcctcagccttccaagtagctgggactacaggtgtgtgccaccatgcccagctaatttttgtgtttttagtagagatggggtttcaccatgttggccaggctggtctcgaactcctgacttcaagtgatccacccacctcagcctcctaaagtgccgggattacaggcatgacacctgtaatcctaacactttaggaataatgtaataatggcgcccggcctataaatggttccattctaaataatgaaccttggcttaaatgctcagggagagaaacactcccagccccagccccatccaagacacctgatgggaccaagatgccaacaggaggatccctgcttcctcctggaggcaggaggtggccccagaaacagcctccacgcttcctgtggcccttccaccatgacaggtgctgtctctttacccaccatccacagacagccccgatgacatctttatacacccgcatcccttccttctggctactccaccttcatgctggggcaggaaaggggtcaatcaaaagccaccaaagctcagacagggaaacagcccagcactggaaccaggcagaagtcattgaaatccagatggagtgtgttaagactcaggcctacaatctgtggatgcatcccagggacccaggctttggggtgttccccagggcgtatgacctcccttacccctcgctacagcccgaggagggaggcccggagaaacacgcccggcagggttatgcaactcacccacagccacagagacaggaagtgcaagagccactgctgaactcagggagtctggttccaaagtccacgctgcggaggacccccactggggcctctctgccttagcccaaggtcctacgctaggtggttctctgccctggacaagggtctccaactatggaatgcagccatgaacgagacagataaagtctctgtcctcatggaactcacacaagtggatgagataatttcagagactattaagggctcagaagggaatagcatggtgtggttataacacagatggcgcaagccaggcgcggtggctcatgcctgtaatccaagcactttgggaagctaagacaggtggatcacctgaggtcaggagttcgagaccagcctggctaacatggtgagaccccatctctactaaaaataccaaattagctgggcatagtggtgcacgcctgtaatcccagctactcaagaggcaaggctggagagtcgtttgaaccggggaggaggaggttgcagtgagccgagatggggccattgccctccagctgaaaaaccacacagatggcacagacagtggacgtggggggcaactgtccattgggtggggtgggcaatcacggggtgtcttcttcaaaaggttacatttaagcttcaaaaggttacatttaaacataaaagaggaaccaagcataagagccagggagacaaaaagacggtccaggcagaaagaaaagcacttccaaaggccctgaggcaggacagcatgtgacacgttggaggaaaaggaaggcctgtgaggttgcagtggggtgagaatgctgagttgagatgggcagggcccacgaaaatgaggctcacagctttgataccaaatgcaggaagattttattcagcttcttgaaatgatccagtttgcatagttttgttttttttttttttttttttgggagacggagtctcgctctgtcacccaggctggagtgcaatggtgcaatctcggctcactgcaacctccacctcccgggttcaaacaattctcctgcctcaacctcccgagtagctggaattacaggcacatgccaccacgcctggctaatttttgtatttttagtagagatgaggtttcaccatgttggccaggctggtcttgaactcctgacctcaggtgacccacccacttcggcctcccaaagtgctgggattacaggcatgagccactgtgcccggcccaatttgcatgttttaaagagcatcctggctttgatggggagaagtgacaacagtgtggtataaatcagcagagcaaacagccccatgatgacactccagcatccactgggaaacaacggtggcagctcggtctggggcgacggccacggcaggtggaggagtaggccccattgccctgcacaggaccacaacctgccactggtcacgaaccatcctgtgaaacaacccttgtcttttaaacatcctttcaataaatatttgagaacctgcgattatgtgctaggcatcgttccaggggcttgggtcacggcaacgaataacacaaaggtccctgccctcacagtccgacattctcatggggagaaatagacaataaacaatcaacatgatacccagggaagttccagggtatctacagtggctgacaggtctaagcagagcgggtaaggagggctggcagcacagggggacaagggggaacctgcatgatgcacaaacggaatcaggggagggtctccgtgagcaagtgagagctgaacagagacctacgggagatgagagggcttgtgtcaggagagctaaggcgattgggcccatggggctgaggaatggccaggaggccattgtgcaagggaaaagggaatgcggacgtcgccagaaaagtggcaggggtggatggcacaggccctgggccaggttaggacctggctgtgactcctaggggacgggtctggccatgtcagggctttgaggggaggaggtgctaagtgcaatcttgatgggctcccatggctgcttattgagaaaccccactggggagcaaggatgagcacagggaggccagtgaggaggcggatgcaggaatctgggggagaggtgatggtgccttggaccagaggtgatggcgcctcgggcgtggtgagaagtagttggaatctgggtatatttagatgatgaagctagaaaactttctgacgggttctctgagggaagtggagagaacagagtcaaggctgagtgcaagatgttggcccgggcaactggaagatgggggggctatgatggagtgggaagctggtgggagccacaggtgtggccgagggtgatgaggagccagccggggcgagcgtgagctgcctttgaccccgagttgagatacggactctgctgttggacactcgggggtggggttcaggggaaaggtctgggcccagggataccaatttgggagtggtcaggacagagatgccattcaggcgcaaggctggaggagcccaccccagggatgagggatgaggacacacagaaaggatgcctggagctccaccagcaggaggcaggaggccagggagatgaggaggcatcagcaggcaagaagacagagcagccaggaaggtgggaggaaaacccagagaatggagatttaaagcgcctcaagggtccttctagaagcttccagagaaggtgtaaggaacttcacccaaaatgccaggaagtgaacaaggtcaggcccctcccgttccttccccctccccagcacaggcaatcagtgaacaggaagaaacagtggagtggagggaaagaaaacaagaaaattaagacggccaggccttgggccatgaggcttcctggaacccgggacctggggagcttctgagcaggcggagtgtctccatatctcacgcaggctttgggaggaaaatcgcccccaacacccacagggagccagcccctgggccctttaaggcttcaaagtcaagaacgcagctttttgtgttgtttttgtttctctttgcaagacagctccagcctggccacttgtgggccagcagagctcaaggtcatgtccaaacagggggagggagacgaggtaaataaaagggattctctttttgttttgcgtttttgatttttgactgagccctagcgttgaattctccgcacaattaatgtgtctgtggtgtcggagctgccagcgcctcctggagcagaaggcctggaccgaactctcctccacagaatcctccaggcccaagatttaaaccacaaactctctgggttcagccttggggggtgtggcttatggccccaggggcctctcttttgctgaccacagacatggaatcaccctctggacactaaggaacctccatgcaggacccacgaatgacagtgccaacaagcctgcagcaaatcgccactggggccaagactcatccaggaaaaacaccttcatggagcaagccctccatggggactcacttccatcccatttgctagaaaccaaaggccagggtaaggcgattccaggtggctgagcttcgccacgttctagttaatcagggtgcatctcccggcggaggcacagcaagtaccggccattccgggaagggacagggaatgtttcctggaaaccccaggtgctgggcctggccccagaaaggccaaccacagcgggacacatcaacatgtatgtgcagacacatcaacacacaaggacatgcataaacacgtgtgttcatgtgtgtccatttgcatgtacagacacaccatgtgtgcctgtgtcaacatatgtaggcacacatcaacacaggtgtctgcatacacatcatcacgtcgtcacacatcaaggcaggtgtgtgcatgcctacacaggtgtgtgtgtcactgttttcaccatcagcacttgtgtacacacaccaacacacgtgtgtgcaaacacacacacactcacgaagacagggagaggcaaatctaccaggagcaaataaactagactcacacaaactaaaaatagcccatgtttttcagccgtcgccagggagtaagttgaagctgtctctcacatgctagaaggagtaggaagttcaatggcaggaaagaggaagaaaaacaaaacagaattggcacacacctgtgatccaagctgtcctcgaggagccccctccccacctgtgcccagtgatcagttctagggctttgccccacatgtccaaacaagggggtcctacaggaaacgcccggtaggtggagacactgggcctcccccccaggttccgcaggggggctgataaaggcgcagagcgggcggcccctgcaggatgggtgggagtccagcccccggggtcactgggagccctgggctaggaacaggtggcctccccgggagcctcacttggtgcctttgattggagaacatgtccctggtctcagactacccccggaagggagaggccagggtgcactctgcaccagcaaagtttggcggggtgatgattaggacaaagcctcgaagggaccctgctgttccctggtgatgcacagaaaaggaaggggcagcccaggaagagaatataagaagggcaccccccgccgcccgccttaagcatgcagtcgacctgctcagacacacggagaaccgggaggacgcagtgcgcagaggccaccgggaccagctgtggagtcggcccccagacttgaaatcctgattcaaccgcttggagctatgtgacatggggcaagttactttccgcctctgtgcatccatttccctcaataaaataagacacaatagtacctattttagatactaaaatgaataatgcacataaacacttggaacagtatccggccacaacgagtgcccattgactgttatctcccatcaacccccatcttttaactgattgacaaagatttcccaaaaggcacaaactcagggacagccggtgacatccctggctggccctggtgccggggctccccaaggctcactgtgtggctctggctgagggaggcaggggtgagctaaagagcctgaggccagggctgggggtcgcgcccgcctcattcattctgtaacctgactggtgttgaaggggtggcaaggagctcaggcgctgctatggccctcggggacgctgcagtgacagtgatgggaaagcccctgcctcagcagatacaggggtatcaggaaaaaagcatgcaggcaaagatgaccgaaggtttttgcctctaccccaggggaaacaaaaggaggtgccgtttattgagacagggatcataggtgggggaagcccagcagcaggacaaggcaaccgaggttgagtccatctagaaaaccaacttaaagacagcagaggggacccaggttctctcctggacatggaagaaggccatgaggcctatcattgaagatggtggtcttggaagatgaccccttccctgcagcccagcagtagtgaggggcctctccccacgtccaccagctgggccttccttggaggaccagagacatacgggaacttggatgtgtgccccccaggacctgaaccaggccttcgttactcacccacatacctgagcacagctgcatgccaggctcagatccagggaatgggagcaagagtccccattctcatggcatctgcctctgggacagacagacaccttcacacacacacacacgtgcacacatgcacgcacacacatacactagcgaggtcacttggggcaaattactctcttcagcttgtctccttaacggacactgaagacaataaatcatatgtcacggccctctgcagggactaaatgagacaattttcacaaaggtgctttgaaccctgcctggtgcacagtaagctgcccatgaatggatgccatgaagttcacaatcgcggcccttagtgtgcctgtccaaacacctctctccaatcctacccactggcagaagggaaaagaaatgagttgcgcttccccaaagcctctccaagcaacctcgaccacagggcccctttgcagtgtgcctcatcggtctgtgtggcgcattcatctggccagtctttgaggaaaactatgtatctgttcattcgtaattttttttttaagagatgggattttggccgggcgcggtggctcacacctgtaatcccagcactttgggaggccgagacgggcggatcacgaggtcaggagattgagaccatcctggctaaaacagtgaaaccccgtctccactaaaaatacaaaaaactaggtgggtgcggtggcgggcgcctgtagtcccagctactcaggaggctgaggcaggagaatggcgtgaacccggaaggtggagcttgcagtgagccgagatcgcaccactgcactccagcctgggcgacagagccagactccgtctcaaaaaaaaaaaaaagagatgggatttcactttgttgcccaggttggagtacagtggcacaaacacagctcactgcagcctcgagctcctgggctcaagatatcctcccacctcagcctctcaagtagctaggactataggtgcatgccaccatgcaccagcttagttttgttgttgttttgttttgtagagatgggggtctcactatgttgcccacgctagtcttaaactcagggcttcaagtgaccctcccacctcagccccataaagtgctgggatcgcaagtttgagccaccatgcttggccttgtaatttttaatcaaacacgtagcatgtggatacattttctctgttaaaacaaaaataatggccgggcatggtggctcacgcctgtaattccagcactttgggaggccgagaggggaagatcacaaggtcaggagatcaagaccatcccggctaacacggtgaaaccccatctctactaaaaatacaaaaaaaaaattagctgggtgtggtggcaggcacctgcagtcccagctcctcaggaggctgaggcaggagaatggtgtgaacccaggaggcagaggctgcagtgagccgagatcgtgccactgcactccagcctgggcgacagagcgagactccatctcaaaaaagaaaaaaaaaaatagcattacagataaagtattaggtttcctttggccacacccccagtgtcctgccttctctcattagagtagccacttctgttagtctcaccttttcccaaactttaacatattctaatattaagccattgaaaataatggcagggcgcggtggttcacacctatcatcccagtgttttggaaggccaaggcagaaggatcacttaaggccaggagttcgagaccagcctgggtaacatagtgagaccttgtctctacgaaaataaaaataaaaatggaaagaaaatatagaatattgtttggtgggttttttttaaacataaatagcaccagagcttttttcaattagtaatgtgtttttatggcctacccatgctgagacatatttctaagttccttcatttttttttttttttttttgagatggagtctcactctattacgcaggctggagggcagtggcgtgatctcagttcactgcaacctcagccttccaggttcaagctattctcctgcttcagcgtcccgaatagctgggattacaggcgtgcaccaccatgtccagctagtttttgtattttttagtagagacagggtttagccatgttggccaggctggtctcaaactcctgacctcaggtgatccggtgaataatgaagacatggttcagatccctgggggcacacatccaagttctgtgaaaaggacatagacatgaaatgtggacaagaagccattcttaagaaattcagtctaaagaagcaggccaaagggaaaaagatgtcaactagtgtgacaatatccacatcttcaccccagctcatcattgaagacagcagcctcggaagatgagcatcccttttttgcagcccagctgcagtgaggggcctctcccccatgtccaccagctgggccttccttggaggaccagagacacacgggaacttggctaccaaaaaatggtaatgataaatcagtaattaccagtgatggcagagataggggaagtagcacagtcccataccttgtgggtggatgcagcaacagagctgtgcagaagggcaatttggccgtaatcatcaaaactcaaactgagcacacctgctcccaaggccccacttctagaaatccaccctatggaaatgttcatgaaccacacgaagagggatgtgtcgggatatcgctgtcatttgtgacagagaaaatgatcagtcaatggagaaacaggtaaacaagtctataaccattcaaaggaataccagcagtgatgaaggaaaacgcggggtagacttattgctgagacatggaaaatttttcagctggtatctttgaattgaaaaacaaattgcaagataattatacatgttcaagttcacctacacttagttcaagttatgtaaaatatatattaatatgtatacatacaggctcctggtacacagaaaagggtctagaaagatccacatcaatgatggtgataatagctcaggaggggaataaaatgggggaaactttctctcttttcctccatttgaacttttttttacgagcaagtattcatatattttatataaagtcgtccctcaatgtcagaggggaattggtttcaggacccccatagataccaagatctgcagatgctcaagtccccgacataaaatgctgtggtatttgcatatcacctatgcgcatcctcccgtattctttaaatcatctctaggttacttataatacctaatacgatgtaaatgctatgtcaatagttgttatacagtattgtttttatgtctttttttagttgtattgttattttggggggattttttctgaaaacttttcatctgcagttgattgaatccacggatgcagaacctgcagacacagagggccaactgtagggacttctgttgttaaccaaaaagcacattaaaaaaaaaaaataaaagcacaaggcctcccattcaagttgcacacagactcatgtagccaaagaaaacaccagcgggcagtccctgcttatgcgtgtgtctcacccgcctggtcccctgaacacaggctctcttcttccatgctaaggcacttggccgctgctccagcctgggcggttccagaagtggccgtcttgggctgggcgtgtcttcctgccttcacaccactcggccccaaaccaatcgcctttgggatatccacagaaggatgctgggaggctcctgttcaactttaagccagatgctcctagctccaggacaattgaggacaatgtggttttcctctttagaagcccaggagaggagtggggaaatttggtggtgcatgcatgtgtggtgcacacacacacacacacatcctactgacatacttaacctgatgacatcctgagaaagaaaacaccttgaaataagcccccgaataactgagttggcaagactctttacctggcataagtccccacactcccatagcaagagaccaggtgctcactcacagcacagggtcacatgcttgaactgcctgagtgatagcccctctagggaccctgcatacacacagtggggtcctggcactgcagcagccacaaggctgtcactgacacacacgtttcagtatgagtaggccacagaaaaataaagctccctcagtgtaacagagaaagcctctgagctgtcatgggggagaagaggccattctgctgattttcctgccatccccagagacagtgtcaccatccaccgggacctctttgcagtcagattacaggctttggcgggacaagatttgaaaaatcaaaaatagacacaacgtggctaagatgccctagacaactgctcacccagagaccttgagagagaccatatgttgctccatctttaaggccagctagctgggtcccaagaagtgtggcagccagatctaagcagatccttcattcattcactcattcattcgctctgtgaatgagggaacagacatgaaatgtggacaaggaaccattcttaagaaacccagtccaaagaggcaggccaaggggaaaagacgtccattagagtgacaatgtccacatcttcaccccagctctgcatctggctagaactttgataagagtgagccccagtttcccctccccgccactgcatgtgtgggttcccagggcttcaaaactctaaatggcttttagttcaaatgtgatactctgcaatctcccagcccttccctaactccaggctcattcaaacaggccacccaggcacccagggcagagtctgtccgtctgcagaccagctgaccgcctaatctgtctccctggttgaaagggcaatggtatgcaaagttaggatcagaggaaagacctaaggctgcgtgcactcagaggaccttgggctgctgcctgcctctgcatgaatctggggagaaaagcggcttatagtttccagactgaatcatggaggcagtgagcagggagaacagagtcgcgcattctgcctctgggagagggttcctatggggagattctgggcagtggaggatgctcagctgagcacctaccatgtgagctgggcacccacgtgggtctcacagaaggttcctgtcctcctgggctcacaggatacaagcaaagtgcagctctaattttaccggaccctgctaccggctgctgtgaaagcagacgttcacacactcttgggctccttcgggcggcaccacggaagcaacctgtccacactcctgatccgtcgtgggcgcccagaccctttagggcgggtcaggcgcccgggtggtctcccgtccaggcctccccaaccctggcctgcgcctccagcaaagcccctgggttcccccctagcctcagtctggggcggtgagggtggtggggaggcgggcagcagcccctcccgaagcgcctggcctccctcgtgctctgcggcgccaggcccgggcgccgattccgctgcggtcgcccacccaccgcaacgcgcgggtcctcccggcgcccagcgcccaacagcccgggtccgtgcgcggaccccctggggtctccctcacccaccttaaggacctgctgcttgatgagcgacggcaccatcacgatcatgacagcgcccagcacagcgcacagtagccccgcgacgcccagcgccccggcagcccagcgcgctttggcggagcagcccatgtctgcgcgcctggggcccacccgcggctcgcagggctccgcgcctggcaggagacggggacggcgacagagacgacacaggcggggactccgggcacgcaggccgcagaggcacggtggatccgggacggcagcgcacgcaggagcagcccggcaggtggccagtggttttatgccccatcgccggcgccgccggaccgcccccgggcagccttgggcttcaggattccggcggcaggggcggggcctgagcgggcccggggcggggtcggggcggggacggggcggggcgctgatcggacgggcagggggcggggccatggccgccaagacaagccccgccatgctgccgctgcccccacggcctcgcttccgttttggggcgggagctgaggaggcctcgtggccgctgagccaaaacgtctatggggcctggtgcccctcaccctcttgctcccttcccctttctcctaccccttcccccacctatgtctcccctcctcccagctctcccctctgagcccctcacccttccttttccctcctcctccctctcctcctctatcgggaccatcatcatggttggtcactgtgagtaggacttcgccagcccacccaggaaccccagagcccttacaacggtccacatgccccgccaccaccttctagaccctcatctccgcagtccatctccagcctcactgtccctggaagaagccccgcaggctccagccccagggcctccatacaccctgcacaggcaattctgttctcccaggtatccgcctggccctatccttcgtaacgctggtgccaccatcaccctatgactgagcaccccctggcaggttcacgttcatttgcgtccttgcattctgaccatgtgctccaactgggatgccaacccgtgaggcgggcccccccccccacgcgtcctgagctctagaacgtggcctggcagggaatgcctgctcacagtaaatattctagaatgaatgactgaggagccttctaggtgctggcccctgtcctgagtgctttgcacacaatggctccattttacaataagaaaactgggaggtggctcacgcctgtaatcccagcactttgggaggccgaggcgggtggacttcatggatcacctgaggtcgggagttggagaccagcctgaccaacatggcgaaaccccgtctctactaacaatacaaaattagccaggcgtagtggcgcatgcctgtaatctcagctactcgggaggctgaggcaggagaatcgcttgaacccgggaggcggaggttgtggcgagccgagatagcgccattgcactccagcctgggcaacaagagcgaaactccatctcaaaaaaaaaaaaaaagaaaagaaaaagaaaaagaaagaaagaaatgaaaactgatgcacagggaagcttagttaacccaaaccaagtccccactttctaatgaagagggaaaccaatgatgagcacgtgagcaaatgaatgaaggataattgcaggcaagtgctccaagaaaacagaacaggcccggtgcatggtggcccacaactgtaatcccagcactttggaaggtccaggtgagggatcacttgaggccactagttggagaccagcctgggcaacatagtgagaccagtctctacagaaaatgaaaagattaaccagccacagtggcatgcgcttgtcgccccagctactcaggaggctgaggcagaaggatcccttgagtcccagagttcaaggctgcagtgagccctgatcttaccaccgcactccagcctgggtgacagcaagaccctgggggaaaaagaaaaaagaaaaaagggagagaagtgggctggcactaagtggcagttgcccttagatgggtgagtgtatccctgaagccctccacgcccccctgaagtcctccaccacaccccacctggcctgccttctggtccctgaagtgctggccagtcccctcattttctgaatgaagttactgagaagagactcctgggttacacagggacaggagggtggtgtccccagcacgtgggtaaggcaggctcagtccttgagtgctccgagggaggctttctaaacctcttatttaactccagaagaaagcagccttctcgcagggccatccttaagcaacatgtcttcgcctgaaccaatatttacagagcacctgctatgttctcgttagacagctttgcctggcactgccttcctctaaggaggccgaatatggtccagtgccccaaggggcagggcccaactcctgagggaggtcagagtggctgaggtgagactgtggtagccccgggggacaggttcagagaaatccaggctctggggtttcccacattggagtcctggggcaagtggtttgggcctttctgtgcctcagtctcctcatctacgaaacggggattagaagagcccctttccaagggctaccatgaggattaaacaagtcaaaaaatgtgccagtgcttagaacagtccctggaatgtgtcagtgcaactgagctggggagtgtcgtcgttattttccggacccacatgaactggcgcctgcccatctctctgcctccatctcctgccctctcccccattgtttcagttcattgagcatccccagctttttcttgtgtcaggaactttgcacttcctgttcctctgtctaggatacgcttcccctagatccttccatggctccccactctcctcttctgggctcagctgaaacccactcctcagagaagcctttgctgttgcatctgttgaaaacaggagtcccagcccactctgtcaggccaccttgctttgtgtgaaatggtcttatctgtttccttgttcatctcctccagctcccgagagacagaagctgaccctgttttgcttatcgatgtatctccagcacctggaaaaatgcctggcacatagcaggtactcaataaatactttactcaatcagctaattaactcattaattaatcaagtaactgatcgattgattaattaattaatatcacttcattgaattccttaaggccttcaacagccttcagctatgcagttgcctttttttttaatgacttttgtagttctcggaaattagccagttaactaaaatctgcggtctgcctggccctgacaccctcctccacttccttgatactgacctgccttgaccatctcacccaatctaactctgattcatgaccaagtcttcaaggtccaaatgtacgtgatgcttacccaagagggctgcaaggccatggctggagagccctcatgtcacgccatgctgtcactcgagagagaagggcagagatgaaagggtgatgggacacgtgagccaccttggccttgctgaggggagtcacttccggtggcagggagggcagcttaagaagggaaaaaaagacttcgtcatgtttgagagagaggtcttgccctggggaaagtcgaagatacagaagaaaagaaagagtgctgataacaaaatatgatcaacatggtgtcacagggctcctggaaaatcaagtcagatgcttttcctcctctgctcagagtcctttcgtgatcaaagacggagaatgactgcaggcaaagacctggaggagttggaagcctcttgaggtgcttgtgggattgtaaaatggtgcagcctcaaaaggtaaacataggggtcccctaagacccagcagttccactcctgggtatatgcccaggagaaaggaaagagcatgtccacacggaagcctggacacaaatgttcacagcagccaagcagtgaaaataacccacacccccatcagctggtgaataggtaaataaaatgtggcataaccacgcactggaatatgactcagcataaaaaggaatgaagggctgacgcgtgctacaccatggatgaaccttgaaaacattgataagtgaaagaagccagacacaaaggccacatgtatgattctgcttatataaaatgtccatagtaggcacatctatggggacaaaaagtagaccagtggttgccaggggctggggagaatgaggagtgactgctacaggtttggggtttcatcttggagtggtgaaaatgttctaaaagtgacggtaaaagtgatggtaatgatggttgcacaactccgtgaatatacaaaaaaccatcaaattacacactttatttactttttctttttttcaagagacagggtctcactctgtcacccaggctggagtgcagtcttgaagtcttgggttcaaaccatcctcccgcctcggcctcctgactagcttggacaacaagtatatgccactatgtacacctgatgttttcatttttgttgagacagggtctcactttgttgcccaggctgctctcaaaattctggtcatcctcccaccctggcctcccaaagcgctgggattacaagtgtgagccatcatgcctggccaaattatatactttaaatgggtgaatgtatgatatgcaaattatatctcaatgaaaactgttattttaaagaaatggccaggcatggtggcccatgcctataatcccagtgcttttggaggctgaggcaggaggatcccttgaggccaggagttcgagatcagcctgggcaacacagccagacaccatctctacaaaaaataaaaagttagccaggtaaagtggcacacacctctagtttcagctactgaggaggctgaggtgggagaatcacgtgagcccaggaagtcgaggctgcagtgagtgagctgtgattgtgtcactgcactccagcctgggcaacacagtgagaccctgtctctcaagaaaacaaaaagaaagaaacctttccgtggctcccacctcattcagcataaaagccaaagccctcaccatggcccacaagatcaccacatctcatactagagagacaaagtcaaaacgcacccagatgggcacatctccctgacctcatccccctccctctccttgcccactctgctccagccacatcctcctccctggagctcctccacctgttgcccggctcgtgccccagaacctttgcactccctggtcccctcctggaatgctcctctccctaacacccaggagactcaccctcccttccttcaggtccttgctccaatgccatcttctcagcaatgacttccttcctgcccaccctttgaaagttacaaaccacccataggaccctccctatcccccttggctgcttcatttctctctgtgcaccgaccgccctccagggcgggtgtttgcttgtttgattggcttccttcctcttctaggataaaaaaagctccacggggcaggaatctgcctgtttcgtccattgctgtgcccccggctccccaacagcacgtggcccacagtaggcccttggtcggtgtgtgtggatgaaccacatctaccagagtccaaggtaaaagcttgcctctgccgccggaacacgcagctgcctggcatggcggcctggggcaagttgctcagcctctctgtgcctcggctcccttatcggtgccttgggattggtctgagtcatgcctgcaccctggggtggtcatgaggattacatgggctcatcttggtcatatgcttagcaaggtgcctgtgtgaggcggagccaacacctcctgcaggcagccgcattcccaccccagcctgggaagaatcacgctcatccccagcggcaatagaacacagtgaatggaagctgaagggcttccttaaaggaggcacagctggctcctggcgagcagagagcagagatgtgaaccagtgacttgccacacacatgaccactacgctgtttgctgagggaaaggaaaaagaggaagaaagtgaaggaaagcaaagagacgggtgagagaaaggacaaaataaaaagcaaaggaagaggaaaccttatttttttttcttttgaggtggagactcgctctgtggcccaggctggaatacagtggtgtgatctcagctcactgcaacctccgcctcccggatttaagcagttctccctgtctcagcctcctgagcagctgggattacaggtgcatgccacacgactggctaatttttttttttttttttaagaagaagtcttactctgtcgcccaggctagagtgcaatggtgtgatctcagctcactgcaaccttctcctgggttcaagcgattctcccgcctcagcctcctgagtagctgggattacaggcacctgccatcatgcctggctaatttttgtatttttgtagagacgggatttcaccgtgttggccaggcttgtcctgaactcctgacctcaggtggtccgcccaccttggcctcccaaagttctgggattacaggtgtgagccactgcacccggccaatttttgtatttttaatggagatgcagttttactatgttggccaggctggtctcgaactcctgggctcaagtgatccactcgccgcggccttccaaagtgctgggattacaggcgtgagccaccgcgcccagccaggaaagcattgtagccacatctgccacctggattgctgctggtgagggaggaaagagagctcacgtgtgcctgctggattcattcagttcacgttgagctcctactctgtgctgggcactatgttgggcgtttggggacccagcagggaccataagcaagcccctagccttgcgggtccggtatgttaatagacaagcaataacaattagtgataaacatcatcattggtggattttataaaatgttagagctatgggcacggtggctcacacctgtaatcccagcactttggccgaggcaggcactttgtttgagctcaggagtttgagaccagcctggccaacatagcaaaaccctgttgctacaataaattaaaaaaaaaaaaattagctgggcatggtggcacgcacctgtggtcccagacactcaggaggctgaggtgggaggatcacttaagctcaggaggcagaggttgcagtgatccaagatggcatcactgcactccagcctggacgacagagcaagaccccatctcaaaaaacaaaacaaaaagatattagagctgtgctatccaatacagtagccactggccctatgtggctatgggacacttgacccggggctagtctgaatgagatatgccatgtcatatacatcccagacttcaaaggcttcatatgaaaagagcgtaaaacatctcaatattcttatattgattacacattgaaatgacactatttgaatatcaccgataagggagccggggcacagagaggctgagcaacttgccccaggccaccatgccaggcagctgcgtggcccggcggcagaggcaggcttttaccttggactctggtagacgtggttcatccacacacactgaccaagggttgaataatattacaagttaaattaatttcacctgtttctttttactttttaaaatatgacccctaaaattcttttacctttttttcttttttcagaacaggttcctctgtcataaaatttttaaaattgtgtgtgtggtttgtgcatgctgcatttccatgggacaggcagttagaggacgatgcgtgctttaggggaaaaacagaacagtgtaaatgctactgggggagaggggttgccatttaaatggggtgtttgaagacagcctcagtgagaaggtgacatttgggcaaagacctgcaggaagtgcaggaatgtgttgagatccagggaagaacattccaggcagagggaatagccagggcaacgactctgaggcaggaggtgcctgcatagattttaatcagaatgcgaatctctcatgttgctacaagtgactttttaggagctgtttctcttcagtaggtcaaaatgccccctgcaatattgtgaatatcagagaaggtctccagagcccctaaacagcccctccagaaacttagcctctgcccctggactttagccccggtgctagagtctgaatgtgtcccctgaaatttgtacgttgaaacctaattactatgtgatggtattaggaggtagggcttttgggaagtgacgaggtcatgggggcagaggcctcatcgatgggattagggccctgacacacgaggctctagagagctgcatctccccttccaccaggcaaggacacagagagaagctgccatctgtgaaccaggacgcagggcctcaccaccatcaaatctgctggcgccttgatcttggacttcccaccctccagaaatgtgagaaatagatgtccgccgtctgtaagctctccccgtctatggtactctgttttagaagcctgagcagactgagatgccctgtaaatcctgtcttccttcagaatcacgcctttctgagtccccgatcactgacttccctccaggagtctttcctctctgactcagggctggcgatcaatccttgcctttgtccctggcctttggggactctgatatgtcctctctggcaagggctaaccctccaacacagacgtgctttccaggacaaaggtgcaagtgtgtggggaggacccagctggcagccgcgagctaatacgttgctccgtgggccaggtcactggaggacagaagtttctatcagctgccactctcaacagcagctggagaaaggaggatgattcctatcccaggaaccagaagattcctctgagaccacctggtcctgtcctacctaccagagaagggatggacatgctcattcattcatttatgtggcaaatacttgctgagcactcgctatgtatcaggcctactgtgtgctagggcctgggggtagatggggaagaaagcaggcaggtcctctgtgccctggccttacttttttttgagacagggtatggttctgtcacccaagctggagttcaaagctcactgcagcctccaccccctgggctcaagcgatccccccgcctcagcctcctacagacatgtgccaccacaccagctaattttttgttttgttttgttttgagacaagagtcttgctctgtcgcccaggctggagtgcagtggtgtgatgtcagctcactgcagcctctgcctcccgggttcaagcgattctcctgcctcagcctccctcccgagtagctgggactacaggcgcctgccaccactcccagctaatttttgtattttttagtagaaatggggtttcaccatgttggccaggctgatcttgaactcttacctcaaatgatccacccaccttggcctcccaaagtgctaggattacaggtgtgagcccctgcacccagccaagctaattttttttaatttttattttttttaatagagatgggtgtcgcactatgttgcccaggctagtctcgaactcctggagtcaggcgatcctcccacctcgacctcccaaagtgctgggattataggtgtgaaccaccacgtctggtctgccctggcctttttagtaagggaaagagagagagatattaaaatatatatatgtttttttatttatctataaatatatgtataagcaaataaatagataaggattatagatggtgctacgtgctaatgagagaaataaaaaggtaatgccacagggagatgggggctggcggggggagaccggaacctggggaggacctttctggcaaacaaaccagcaagtgcaaaggccctgtgtcagggaggtgctcagtgtgcccaaggaacagacaatcagggacccctgcaccttagacggtgcagtcaccccggtttatacctcttgccccaatagtatcattaatagcacctccaagtcactgcatgtggggtggtctgtgataccccaactgcactgcactgaaacacacaggctggctgcagctcttgagcagaggtcacggtccctggaaggcagacctctctcgactcctctctcctcccgggttccaggtgacactccctgccctcctcccctcagccccagggtggggagcagcttcactctccctttcgttttccctgctcctttgtatatatcttcaaagtccccaattttgagtgttctctccacttcctgctcagactactacaggaactgattctgtggtgggaaaggaattagaggagagaaagagaggctcagaggcagtgtccagcagctgcggtagaagcctggaggtaacggccagcgcagtggctcacgcctgtaatcccagcactttgggaggctgaggcgggaggatggcttgaggccagcaagttcaagaccagcctgagcaacatggtgaaaccccatctctactaaaaatacacaaaattagccaggcgtggtggcacgtgcctatagtcccagctactcgggaggctgaggtgggagcattgcttgagcccaggaagtagaggctgcagtgagacacgatcgtgccactgcactccagcctgggcaacaagagtgaaaccctgactcaaaaataaagaaaaaaagaaagtaggctgtctttaggaagaaaaaaaaaaagaagaagaaggctactagttttaactgactaatagtttaaaacagcaagtctggagccagacagtccaggttcaaaaccctgctctcctatggacacgttacttaactctctgggcctcgattgccccatctgtaaaatggggctaataagacccacctcagaggtgtggaataagtgaatcgcttgaacctgggaggtgcaggttgcagtgagctgagatcatggcactgcactccagcctgggcgacagcaagactctgtctcaaaaaacaaaaaacaacaaaaagaaattaacatagaattaccatgtgatgcatcaatctcatttctgggtatcaaagaaatgaaactgggaacttgaagaggaatctggccaccgcgttcattgcagcgctgttcacgatggcccaacggtgggagcaacccgagtgtccgctgatgggtggtgggtaagaagctggggcccatccacacggtggaataggattcagcctggaaaaggaaggactttctgacgcacgctgcgacatgcacgggccttgaggaagttatgcgagtgaaataagccacaacaggacaaataccgtacgattccatttgcatgagctccctagagtagccagatccacagagacagaaaagagaatggtgggtgccaggggctgggggagagggaaaggggaattattgatcaatgcatatgcagtttctattttgcaagatgagaaagtgccaggagggatggtggtgatggttacacaacaatgtggatgtccttaatgccactgaaatgtacacttagaaatggttaagatggtaaaaacaaactacacaacaaaaggctgagccagagagagggtaggagcctcccacaaagtgcaagtttggggtcaagaaatctgttaggagacttgaggggacctgagcaatgaggagcagctgtgatctgtctttgatcgagaaccagggaggcagagataagatgtgagtggggcgggctcagggaggacagcaggtccaccgggccctctggagtgttctctgcgcctccagacagggaaatgaggggactcggggcccccaaactgtccccaagcccactcctggcgactttctaacttttccaccctgtcctgagccacagagaaaagtgctggcgagtgtgacaggagtccgtgtcagcttccctgagcaacacagactcagacccagggtctgtcccagaaaggagtccccaccacacggggaggagggatcggagccgcccaagaggatttttgttatattcacactctgggcgacacagactggatttctaggcaagttgctcaccttctcaaggccctggctgcccctctgagccccaggtattccctctgagctccagctgcccttctcagcccacagtatcccctctgagtcttgggtgcccctctgagccctgggccccctctgcacagtgggaatgagaggtgtaccaaggttggaacagtggatacagcccccagcctattcaaactcgggttgctatttcttatcactgtgcaccggtaactctaaaaaatgtcagcgataaaacattcctcctgaaacaatcttttattggtctaagtctgaactgggagttggcaaactacagcccgaaggccaaacctgacccccagcctgtttttgtaaataaagttttattgacctgacccccagcctgtttttgtaaataaagtttta

SEQ ID NO: 105 - DNA, 88008 bp, Mus musculus
agagggcagtcaatcccccggagctggacagttgctagccctcatatgctgggagttgaactcacatcctccggaagagtggccagccagtgctcttaaccactgagccacctctctaccctttagaaattactttgtagaaacagagtgtgactctgtggtagacctgtggttagtggttaatgtgttcaaggtccgaggcttacgtactttttttggcattgacatactttgcctattggtgactatctttgtctgtttccactctctgggatacagagcctacctagtactcaccaggccctgccaggatgaaaaggagacaataggaaagcatttgggaaagctaccaactgtgcctgtgccgctagttcttgttaccacactcgcctaaaattctctggaaaagcaaattctccccatgggtgtccagagcccagcactgtcctgagcaaggaaggtgctctgtgaacggtcgaacggatgaagaagccgaacaagcagctgcctccacctacatccagtgggatgccccggagcagagacctagagagtacaggatgttaacgaggaagactgagtcccgaggagaggcagcagctccagccataccagtttcaggcttttgacgaagatccacgtgccaaaagctctggatcagaagaaggctactgtcttttcagtaagtacctcacctaggcagccagcatccaacaagggaggtgtacgaaggcctgttttaaagacagagtctcatgtagcccctggctggccttaaactgggattatggccttctgcctccactgcccaagctcttggattactggcatgggccaccatgctaggcttgcaaactatgtttttattggtgggggtgggctgccccagaattcctccaacattttattggtcagaacttggtcacgtgtcctctcctcaactaatcggagtgagaggcacagcattagccaggttgatctagacaatgagggtgttttcctgttggggacttaggttcctcttttctgagcctatctgactatggggagaaataaacctgcaagaaaggagaggggccgggcagtggtggcacatgcctttaatcccagcacttgggaggcagaggcaggcggatttctgagttcgaggccaacctggtctacacagccggggctacacagagaaaccctgtccaaaaaaaaaaaaaaaaaaaaagaggaaggaaggaaggagagggaacagaagtagctacggagtgtgtgtgtttgtaatcccagcaacggaaactgaggcagaaggattgccatgaactcaaagctagcaaagtcctgtcttaaaatataatagaaaaaaaaaaaaaaagaaaagaaaagaaagaaagaaaaggaaggctggggtcaggagtggtggcgcactccttcaatctcagcactcgggaggtcagccctctggaggccattctttgagttcgaggctctctacagtagagggagttccaggacagccagggctctatatacagggaaaccctgttgcaaaacaaacaaaaggaaagaaaaccaagcctgagaaggtagttcagggatacagagcctgcctagcactcaggaggccttgccaggatgaaaaggagacaatcggaaagcatttgggaaagctaccaactgtgcccgtgccgctagttcttgttaccacactcgcgtaaaatcctgagacatatttgccctcccagtgatgtgcagtactgagccctccattgcggatcagcagtggctgtcccagggtccagtaatgctgtctcatcgcagttttgctgtgtcagatgactgcaggagcctgtgatgtgccctcaggcatcctgggggaccccctcacccggcacctcctgcacagaaagcagccagggcagtgactgctgtcagtggaatgtgacacagggacacagggggtataagggctcagtgagtcatcacatctggatcctttgggacagggtctggcttgttaagtgtaaatgactgaagccttaatcccagcacgcaggggacagagaggtaggcagatctctctgagtctgagggctgtctggtgtacaaagtgagctccaagacaggccaaggctgtgtaaagagacactgtctcagaattcaaaacagcagcagcagcaacaacaacaataaaagtgattgtcttcatttcttggtcctgtgataaaaaaaagaccctgttaaaagcaccttaaggaaaaaaaaggggtcaggcatggtggcgcatgcctttaatcccagcactcgggaggcagaggcaggcagatttctgagttcgaggccagcctggtctacaaagtgagttccaggacagccagggctatacagagaaagcctgtctagaaaaaacaaacaaacaaacaaacaaaaaaaaaaccaaccaaacaaaaaaaaagtaaaagggctggagagatggctcagcggttaagaacacctgactgctcctccagagatcctgagttcaattcccagcaaccgcatgatggctcacaaccttaagaaaaagaagatttgtgagtctgagggtgttagtccatcaggtggagaaagtcctgactctggaccaagagtcaagaagcagagaagcagagaccaatgacttctggcatacaactttttctctctgacagtccaccaccgaagcaatggcgtagcccacagttgggggaggacattctacctccattaacccaatcaagataatctcttatacacatggtcagaggctaacccattctagataacccttcccaggatatagctatgattcaatagcttagtccaggtggccaggacccagttaggtcccccaaatgaccaggtgtgttttggaccagggagttggcattccctcttatcccatagggccaaactacttccctgcccactcaccatagctttcagtgttggctataaaatagttcccaagttaaaaattggcttcatggaggcctccagatcctcactgggaggagcctgcctatatcccacccctttgcagcttcacacctgcacccccatgcctgcacccgcagctattccctccttgggctaagagtaagatgagaacacctcttctccctccgatcccttcaacccaaatgctgtattgacctgcctctgaaaggggaagtagatagcgtccccacagctggtgactgtcatcccactcttagggtggcagtggggaggatctttagtggaggctagcctgggctacagagtgagattcttcctctctcaaaacaaaaacacccagaccaaaccaaaccaaccagccagctggtggcctgaggggccatggagggactcctggtagaggagggggacagtgggcatgtttctccttctccacagttttggaacacccaggtcacaataacgattactcctgagtgagtgcatctcttgggacaatgtagtattcatttcttccacatccaattagttgaaacaatggtcacactgtctgtctgagaatgaagagcaacactggctgttgtctcatctagtgacccagaaaatgccacagagtgttgggaggcagagcccactgtccctctgtgtcccctccgctctcccaggctatgtccaccctgaagctggaaggcctggaggctgcagggtacgtgatggacaggcttggtggtccaacagtatcatctactcaacatgttctagaattctccccttgtctttagcggcctccgtgataaagtcgatagaccttccttcaagtgaaccagactacgggctagagaggtggtttagcagttgacagcactggttgctctcgcagaggacccaggttcaaagcccagcacccacatagtggctcatgactgtctataactccaaaggatcctagccctcttctgacctctgtgggcacttcacatatgtagcacacagatatacatggaaacacatacacacatgagtacaaattgtaaattttttgagagaaagagactgggggtgagagagagagagagagagagagagagagagagagagagagagagagaacaaggaactaagtcattgtccagtactatccttctggccaggtacagttgagattccctacctcttagtgtctttccaggtaaccaggcatggttttgtaatggcctacatgacctagggccactcgatcttacattccttctcaagcagaggaaggcttaactcagaacagacgtcagcaatgctcacactcatcctacagacagaaacgcagagccgctcttacagatagcacagggaccctgagataaccgcggctagaaagagggtttcaggctgcctcacatgacataatccatgggagagggttacataaactttttatttgtagctgtttgggtgtgcaccatgcaggtgcagttctggaagaggccagacgggggcgccaggtcccctgaactggatttacagatggttatgaactgcctggtgtagggtgtgggaatatgaacaaggcggccctctgcaagaacagtaagtgctttttaccactgggcagaattctattttgttttgccattccttcatctgttgatgaacaatgaggttgacgcaaatttttgctataatgaaggaagggcagccaagtagtgtcttcttgtctccatcttggtgggaagccaatctcatggtgactgtgtagctcagcatcccatggggactccctcgaacaggcaccttcgtccgagacaactcatctctgtactggcctcacccaggaggaaaaagatagcacaggtcctgaaaccagggcaaaggtgaagtctagctggcagtcccaggaagagggaagtccctgagagaggaacacaggggacatacggaggcagctctctgtgatttgcactgtaacagagtgctagaagtatttgtttggtattggttgttcgtgagattggggggggggggtctcacgatttagccttggctggaattcattaggtagaccaggatgcccttgaacttagtgctgggattaaaggtgtgtgttactacattctgcttaatactatgttttctttgttagtttttgttggggggggggttcgagacagggtttctctgtgtagccctgactgtcctggaactcactctgcagaccaggctggcctcgaactcagaaatctacctgcctctgcctcccaagtgctgggattaaaggtatgtgccaccactgcccggttatatgttgggcttttaatagtatgtttaaccctgtttttctaaatattgtaattcccatgtggaatcaatttaggatcttggaaacaattcacatctttctttctatcctttctttctttctttctttctttctttctttcttcttttttggtgggaattttggtttaattatagcttttgaagtaggaaaatctgtcttcttttttttttggattctttttttttaattggatattttctttatttacatttcaaatgttttcccctttccaggtctccccttcagaaaccccctatcccctcccttctccccctcacatctttcttttaccagtttatgtttgaagatttgttgtagaaggtaaggcacacacgcacacacacacacacacacacacacacacacaccaccaccaccaccatatacatcacacaccatatacacatacacactatacacactacacactcattcacaccatacacacacacacacacacacacacacacacacacacacacacacactctgtccttgaatctgtctgcttcagattcactgttggggtctctccctatctcttcttgagacaggatctcacgccatagtccagactggcatggaaattctaaccaccctcctggctccggcgtagagattacaggcgtgagccctcgcagctggcgcatcctctccttattcctgttcttcagctcagcagtgtaacctctcctctgtccttggcaaggtgggttggggacagggcatccctggggctgaacagctgaatcagactgagtccttgccaggtatgtgtccaggagtcacccattgtgtgctcagggccccctccccacaggcacctccgtgtccctaactgtggatgaggaatcagagggtttaacagcttttcatggcacaggaagaaggaagccagggaagccagaaagcccattggcttcctgctgagtggagataaatccaagggaaaaggaatggagggaaggagatggccaggatgtggggtgcctgacatttgaaaggatagacaggaaacaagtggtcattgatatgatgtttgactctccaggctgctggggagagaagcatcccagtagatggagggagctgatgtgcaaaggccctgaggtaggaactggcagtttgagaggcaagagtgacagccttaccaattacagcaaggacttgggtctttattctgagggagaaggaagcaaaagaaaagatggatatatatgtatgtatatatgtatatatgtatgtgtgtgtataataattttattttatataacatatattctattttataattttatttgcacatagttaactcatgtaaagtgtaagactgaaggcatggtggcacacaccttgaatcccagcacttgggaagcaggagaagacagatctctgtgagttcgagaccagacagggctatacgatgagttttttttttttaagatttatttattattatacataagtacactgtagctgtcttcagacacaccagggtgtcagatctcattgcgggtggttgtgagccaccatgtggttgctgggatttgaactcaagaccttcagaagagcagtcagtgctcttacccattgagccatctcgtcagctccaagatttattttattttatttatttatttttatttattttggtttttcgagacagggtttctctgtgtagccctggctgtcctggaactcactctgtagaccaggctggcctcgaactcagaaatttgcctgcctctgcctcccgagtgctgggattaaaggcgtgcgccaccacggcccagctgagatttcgctttttaaaggtaaaatataaattaactgtaagatgcagtggcttttggcccagcgacagagtaggaagaagagtaacagagctcagccctcagcagtttctgccccttcctcagccctggaaaccattcagtgtctttctgtttgggttcagcaacatgattgttttgtgcatgcttggatgctcttgtgtctggcttctctcccttacaggtatcttctggattcatccatgtgcatcagagacttggtatcccttcttcctcacagaccacgttcaacacacccatttggctgctagatgccttaactgctgtggaacacaagaaaggaatcctgtgcacaggagttgctgtggatgtgttttctctctctctctctctctctctctctctctctctctctctctctctctctctgggtacagacctggaaacggagcagggggctcatagggcccataggtctagtgccagagggtgcccacgaatgtatacatcctgtttttttggtgtcctctgcaggattccttggtctcttcctctcttcctctgcaccggagatggatccagggccatttacaggttactaggcaaatgcatttttgatgagccaccctgtcctcttattacccttagaaatgggctctcactgagttgctagccttgaactcattctggaccctaggctggctttaatcttaagctccttttgcctcaacctcccaaatagctggattggcatgcctggctcctagctgtgttttgattgtggaaagttctgtactgaaggcctcctctgacagggtcttctttttgtacatgactaacacacacattctctctctctctctctctctctctctctctctcactcactttgcgctggttagttttgtcaatttgatacaaactagagtcacacaggaagagggatctgttccatcagattagcctgagggcaatagtgtactttttctggatttatgattgatggtggaagagtccagcttcctgtgggtgggaccactcctggtcacccggtcggtcctgagatgtataacaaagtaaactgagcaagccgtgaggagcaagccaggaagcagtatctatccatggcttctgctttagttcctgcctccaggttcctgctctgagttcctgcgttggcttcccctaatgacagactttcactcataagctgaaagaaaacgactcttccccaagttgcctttggtcagtgttttatcacagcaagagaaagcaaaccaggacagacttttcctggtggacttcccctacaggccttctctgccgcccgagcagaattgatcgaccttcctcccatctctgagaccatcctgtgttgtctccctagctccccccatcaaggccatggctctgtcatatgggctgtctgtgtgtcatccaatgacagtgtagcctgtccccaaagcctggccctggccttgggctctctgaggtaagcatcacgtaggtttggaccttgaagacttggcaacaatttggactgcgtgagttgatcaaggcaagtgggtatcaaggaaaggggggtggcagacttgagctttcagctgactggcaaactcccagggccactggcagcatcagcgggagaaaacaagccaggactgaaagatgttgaaggcctcaaggaaattttatttttaaaaagttgattttttgttttgttttgtttgttttgttttgtttttcaagagacagggtttctctgtgtagctctggctgtcctggaactcactctgtagatcaggctggcctcaaactcagaaatctgcctgcctctgcctcccaagtgctgggactaaaggcgtgtgccaccactgcccgacttgttttatttcttaaacaaggtttcactatgtagccctggctaagcagaccagaaatctacctcgtactcccagaaatccacctgcctctgcctccttagtggtagcattaagagtgtacattgccatgcctggctccattatttattttgtgtgtttgaaccttggaggtcagaggacaacttgagggagtgagttctaggggccagggatatattgatactcaaaaagaaccagcttctccgatggagaagtagctcacggattaagagccctggctgctctcccacagggtctgaatctgcttcctggcacccacacggtggctcacaactgcctgtaacttcggtttcaggagaactgccgctttctcctggctttgtgaaactgcacaaatacacaaaaatttttaaaagatcataaaaaaaaacctctctctttagagagataaataaaaccatttcaactgaacagaccacttactttcttttcttttgatttgaattctattgactattattattgagtgtggggttaccatggcaaccggatctgttctcgccatccctcatgggttcttggattcccgattcaggtcttcaggcttgtgtgacaagtgtctttccttgctgagccacctcaccagcccttttctttggcttgagataggagttcatgtagccttgattggccttgaacttctgtttctttgacctcttccttccaagtgctgggatcacaggggtgctcgccatgcctgtaaagacccccatttccaacaaattggacacgaaggccttctttgatgagtaggcttcaggctgagacttgagagaggaggagtcaggcactgaggatctagagaattccttcataataatcatggctgagaaaacccagtccctctggtctgagatgacatcagctccctttggataacctcctgcagaccagatctctaggatttcgctgcctcattcggcctcctcctaggtcacatagaatggcccagtagtgacatcagataccccggggttaacactcctaaagaatacgggccactcaggttcccgttcaaatctagaaggtctcctctttgggaccacctttagcaaacatgtccctgagcaccacgtagtttctggagagactttcagccccactccccccacctcccatctccatcatcaggggcacagagtgggagcaggttcagaggaacctgggctgtgaggactcccaccccgagtcctgaggaccctcttctgtaaggtggaggtgtgaactgctcttcttaaagccagttggtcgctcatgagcctctgaacttggaacatgcgcgggtgtaacacagccaatgttcccaggccccgcccacccctgctcctttgtctactgaacttctaggctcctttctgtctttctcctgtgtctacacgtgtgcatgtttgtgggtgcacctgaatgtgttgtgtgagacagaatatcttactaggaaccgggttagagaagtctggctggccatctggccccagggatctttcttcctgtccctgactcccctgcactggaactaccagcctagagtttgtttttgttttggacttacttattttatgtgtgcaattgtctttcctacatgtctgtctgggtaccatgggcatgcgtggtatactcagaggtcagaggaggggcatcagatcccttggaactgaagttaaggatggctgtgagctgtcatgtgggttctggggactgaacccaggtcctctgcaagagcagcaagtgctcttaaccactgagccatgtctacctctgagccatctcttcaggcctgggtatctcacctgaacacggatgctggcgaccaatatcaggtgtcaagcactctaccaatacggtcctttgcacagctaagtctttattccatgtgatgggtggaatctgtcagggctggaaatatgacttggctgtctctggagaacctactctgactcaatatgagctaactctgggtcatattgctgaaggtggtcttcaagagcagtcctactgggttttaacaggagctgggactcggttttaacaggtgtggggctgggttttctcagctccgtatccactttttgtgtcctgagtggaatgcaggccttggcctcactgaggaaggaagtcaccccatgcctcagggttttttttttttttttttttttttttttttttttttttggctgtaacacgaagcatttagaattaaaggcttaaaggctctggctgtggtctgagaacgagctaactgggcactgggcagagcagggaaagacagagtccctaccaccctgctggtatcctgagtggggttcatggccaaagaacgcataactgagctcaactgagctggtggtgtctctgggtgataaggaagagtcagcagagagcatagccgccaggcagtctgataagcccctcgaacacattcctggatggagtcaggggcccagcgcgtgtctggggcctggagttttgagtggagggtatgcttaaggcctcgagggacacagaattctgtacgaagggtgtgcaaaggtcccgggagacatggaattccgaggggacagtgtgcaaaggccacgagggacacagaatggagggtgtgcaaaagcccaaagggatatggaattccgagtgggggaagtgcaaagggccccgagggacacggaattttgagtggagggcgttcatggcccagaggctggcccgggctgactgcaactgattttaatgcaggggagcgggaggcattcgcaggagtccggaagaaagaagaggtcgcaggggcgggggtagtggatgcagacggtgccagggtcttctgccctctgtagagggcacatcggttcccacctagaccagcaaccaccaggaaagcccagcagctcggaggggcggcgcccaaaggaagccacgcccacgcctcaccatcagagcaccgcccactccccgcctcttcccacccctcgccggaatcccgcgccgaactcgggggcgggctgcccgggccatggcgcataaagcctctggccacctgcagggctactgctgctccggccaccgccaggcacacaccttgctgctgagggagtctcggcttctgtcatctctgtggcctccgtcacctctgtctccgtctccttcaggtcctgagccccgagagccccttccgcgcacgcggacatgggcggcagctccagggcgcgctgggtggccttggggttgggcgccctggggctgctgtttgctgcgctcggcgttgtcatgatcctcatggtgccctccctcatcaagcagcaggtgctcaaggtgagtgaagtgtcttggggagatgggggttggggatcgggacgcagggtgggacggtggagctacctcctcaccaccagggaggcccaggctcaccccagaggcttggtctgagtcaccagcgtcccaggagcctaaacctcactgaagcagaagtatggcctggttgtccctgagtttcgactgtagctgtcgcgacctccagcccttctgaacgcgccggccggtgactgtacctagtaacctcagagctgcgcgaaacccctgtacatctgtgaggctcccacgggctccagttctttgggtgctctgcctgtttcctcccgcccagatgccccagagatgccctggctcgcccccacactgcctgccagtctcgagagttaagctgctttctgccccccacgctctggcagaggtagacacgactcaggtctgccgaggataggcagcccagcctctcccttgatctcagccttaggccctgttttgccctttcaaccgggcaccgatattaggcgggtggtgccggtccagccacagactctgccctgggatccggtgtccttctatttgagccgggagctcattaagtcctggagattaccgagtaattgtgttttctgagacgcagggttactgcggaaggggaaacgggggctggctctcagggaacatccagttagaactggatctgggatccagaaggggctgttgtcacagggtttgactgacatctttcctcttagcgggtttgtttactgggagtttaagaatggcttcgtgtcccatgtcccatcgcccgctgaaaggagggaatgaatgagggatactccctcttgggctggccgctacctgccaggtcctggcgggtcttcaggatggagccacaggtggctttcctggagttgtggtgggtatttccgagttctcttggccacactgtcatttctcttgcttagaattttcaacccttgtacatgaaggtcccaggagttgccctgtcttgggtagagggaagatccttcttgttggagcatcagaattgctctgggcctttctgttaggtttggcaaagtagtggtgacagccttgtctcagtggcagcctgtggtttcagtaagaacccagccctgtgcactccgcacgtggactgggtttcctgctcagccagcctgtagtgggtagagtgagcagatatcccctgttcttcgatttgggggtgagggggaatctgagctggttccttctcaaactcctttcgggaatgttttcttttgggggttggcacagagactaaggatggggggggttggtgtgtgtgggcgtgcacgttagcgttgggactgcgcaggcctgctccatcagtcagggtcccatctgcccgtgcttgagaaagaccacgactggcagaattgccccatagctggtagcttggggcttcacgtttgagcgagcggcttccacaatcttacttgtgaaaatcccaaaggcgattggttgggggctgagtggcgtgaaggaaggaagagcctaagacacgcctagcccaaaacagcctcttcttagaggccctggctggaagccgacctcttgagggaggaaaaaaaagttcacttcaggggatggtgggaggatggcagcgaggggagcagggagggaccctggagttgactttggattcttgcgttctgtgctacttgaatggaagccttgtctttgtgtgtgtgtgtgtgtgtgtgtgtgtgtgtgtgtttctttctttccttttttttttttttttgtaagttaaagaagttgatttataaaagtcaggaatactaggttgtttaagaaaacaagttcaggacttggggtgtagctcagtggtagagaacttaccttgcattcaacaggccttgggttccaacacacacacacacaccttgcattcaacggccttgggttccaacacacacacacacacagagagagagagagagagagagagagagagagagagagagagatttcactcttattttcttctgatgatatcattttttgacataaattgtgtgtgtgtgtgtgtgtgtgtgtgtaggtcacctgatttcttcccttacagatagggtctcttgatgagctagacagccatccccctgtctctggggttacaggtgcaatcctatcgatgcacaatattgtatatgtcactgggagtttgaactcaggtcctcatgtttgcctagcgtggacatcttttacaaaacccgagttggatagtatgtggttttcttcttttcttcctcctttctttccttcctttcttcttcttttttctcctttctcttgattcgtggtctcactagatagcccaggaactcagtgcatagtccaggctggcctcaaactcagagatccacctacctttgcctcttgagtgttaggattaaaggtctgtctaccatgcctggcttaaatagtatggtttttctgttcagtgttagtattcaaaggggtgtgtgtatgcctgtgtgtgtatgtgtgtatacacgcacacgtgtacacacacatacatgcacgtatactcatgcacctgtatggacgtgcttgccacgcggtgagaccagaggttgaagtgcagtgtcttccacagtgtctctccaccttatttttttgagacaggctctctcattaaatatgaggtgtgccttctctgctagccactgaacaacaggtccctggaatctgcctgtctccgcctgtcctggtactggggttccagacatgtatcagacgtgctcagctatttttttttctgcgtgtccctggccatcctagaactccctctgtaggctctccctgcctcctgagtgctgagactaaaggtataggccaccacccctggctctgtgttgagcttttgtttgggttttgagaatcagaactcagatcctccagcgagcactttacccactgggcgatcttcccagcccctttcaaaggttttgacaggccgaacatgccaagtctgttactgccttttccccccttactgtgctgggattcctttgtttacagttcctctgttgactggccatgtctttgtctcagactccagagaacacatagcgtcctgtgtgagtccaggaacacttgcacggtctgagccttagctgtggacccacaggtgcgctctgtttggaatttggaattctctactattgctcccgctgtcaagctgtgggaccatccacttcgatggcaatgaagtgtcatttctaaaccccatcaccctctttggctacctgtggttttgatttcacatcttcagcgccacaaggttgggcaggaggaacgtgatccccgtgtaggtgacagttttcagagctcaggggctcaggcctactgtaccatgtgctagctggagccggttcatcactcaagagagccaagtttttcccccagcagtgagacaggggtcagatctggtttgctgtccctgagggattagcaagttgcaaaggagattacaagcggcctttggaaatgccctgtgagcttgcctgcttctggactcaatctaaccacggcagcgttgtgaaacaggcagaggctgcgaattcttcctctctacagataagggatctggcccatagcaaaggtcggcagctggttattaaacatggcctgtggtgggctgggagggacttcaagcggccatgctcggtttaccttccatagggaagtaggaagcaagcaagagccctctctttctgtacagtgagctgctgggcagtccaagaaaagaattaagaagggccaggtttcaggaagacatgcatgatagaaaaaaggctctgttactattaaagtccctcttccccagcctcttacccggcatcccagctacttggagtctgaggcaggaggaatgaatattcaaagccggaggaagttcagagcctgcctgggttgcacaggaagctcaggggagcttagtgagacccctgtctttatatcaaatgtaagcaaggtgcattagtgcatatttttaaatcccagcgctcagaaggcagaggcaggcagatctctgagtcaagtcaagtgcctggatagccagggctatagagagagatcctgtctcataaagaaacaaacacacaaataaataacacataaataagtaagtaaataaataaataggtaagtggaaaactgaagatagagctcactgattgatagactgcttcccagtatgtgcacatccctgggttcaatccccagcactgcaaaacataaagagaaacacacacacacacacacacacacacacacacacacacacacaccaaaatccctcagccagtcggtggtcgcagcggcggctcatacctttaatcccagcactcgggaggcagagacagagtgatctctgtgtcagccagggttacacagagaaaccctgtctcaagacaaaacaagtcaaccaaccaaccaaacccaaaatgacaagaatgacatcaaaaccctaacagtattctatattttcaacagactcgtgttagtgccaaaatggtttagaaaaaggtgcggaagggtgcgtgccagacacacaaggtagataatgctggctgcacgactctctgtacatttttgttttattttatgtgtaggggtgtttttcctgcatgtacctctgtgcatgcagtgcccttgtagaccagacaggacatcagatcctctggaacttggacttacagatggttgtgagccaccatgagggtgctaggaatttcacgaacccaggtcctgtatcagagcggccagcctggctcttaaccaccgagcaatctccaaaccatcatgattctttttgtaaaatattatgtgtatgtatttgttggtgtgtgagtggaggggtggtgctgcaacatgcctatgcaggtcatgggacaactttgaggagtgatttctctcctgctcctaagtggggtcctagggattgaactcaggtcgtcaggctgccgagccgtctcactgagcccaatggttactatcttgtttgtagttctttagggcaaggtttcgttgtattactcaggctttatttgaaatcctcctgcctcagcttcttgttcatcactgttcatcatggaagggagtcagggcaggaactagaacaagggagggacctggaggcaggagctggtgcagagaccatggagggatgctgctacgaactttctctttatgacttgctcagcttgctttcttacagaaccgaggaccaccagctctggggagacccctcccacaataggccacgcccttccccatcaatcactaattaagaaaatgttctacaggcttgcccattgcccagtctttttttttttttttaagatttacttatttatttaatgtatatgagtacaccgtagctgtcttcagacacaccagaagagggcgtcagatctcattacagatggttatgagccaccatgtggttgctgggaattgaactcacgacctctggaagaacagtcagtgctcctaaccactgagccatctctccagccccccccccccccccccccagtcttatggaggaatttgtcttaattgaggttacctcctctcaaatgacaatagactgtgtcaagttgacgcaaagctagccggcacaggcagcgtggttgacacaggtccttgtcagttaaggaaacagctgaaaatggtaagaagtaccccgtgactttcttggagtgtgtgtaagtgtcacacggagggaaacccaccagccctggaacccctgtgtgtctcacctagaacccagcctggcacgcggcttgcccgtccacagggccaccgccttcagcacagagcctcataatctttcccaagtctgggtctgcatcagctccactgtcctgacgtggcatttcctgttgcactgtgcgtgatctgttcatctgctgatgcctccctcctctgtcccatgtgtcccctaggtgcaaagcggaagcctcaggctgccctcacctgctccgttgttctttctgctacctcatacctgcttcaccattaccttttatgacccctctacccccatggccttactgcctgcttggacccgtgtggtagtctatcctgctcttctagtgagggatggtgcccaccctgctcagactctctaacattcccgtctttttctgagtgaaccccaaattcctctcagcagcttgaaggctcccaatttgtttctctttcccaccctcaattcagcaccccacccccacaccactatgctcctggtttgagcccattagacctagtccctcttcagaggccctggcgtgtccctttggtggcacatgcctttaattcccagcacttggaaggcagagaggtaggtggatctctgagttcaaggccagcctggtctatagagtgggttttatgacagccagggctacacagagaaaccctgtctcaaaacgccctatccccctaaaaaaatgatttatttattattttcagtgttttgtctgtattcacgtgtgtggtgcttgaggagggtcaaaagaggtgtcaggattccctggaactgtgacctgtcatgtgggtgctgggaaccgaactcagattctctatgggtgcagccagtgcttgtaaacctcggagccatccctccagcccaccatccttattctgtcacaggcttggatgtggctcgctctttttcctgattgagaagttggtcagccaggtgaagggctagggagctgactggatgctggccaatagctggctctctacccctccttgcctcaattctaatctgatcccttctcccacagctaggagttgggctagcctgggatatctactctgttcctgagttgttttgtgacctctggcagagcccattggcttgacacttggaaggtgtccctgatggcagatagctccttgtagatagatactgtgttacgatgctcctcagagccttttattaagtatctaaacgactacagttgctctctgcttcatctagggagagggacacaaagagagattaagtaaaacttgtcccctggtgtcccatgtctccccaccccaaccctctacctccgcattccagatttaggtgacagaaccaagatgtagcctctgctaaaagattgtaacccttgaacagctggccttgactggccgttccttctttttctcccttctcttccatcgatgtgcatggctagcgggtgtattccagggttttctcccacaagagaaggctgcagattcagcaccccttggtacctcctcaggaggactcttaagtgggaaggtctgccttttcccagtttgtaccaccctgtgaccttgggatcaaggtctgcctgggccatcgtgggctgctccccaagtggagactggggccccagatgtcaggatgggtgtccctgcaagttccctgttctctgggccctgggtaagaatgcttgggtgtgctgggatttcttctgttttcttcctctttcctgatgcctggtttccggttcccatggcttccggtccccctggcatgtgtggaactattttagttcccttcagggtgcagctgtggctatagactacctatttttagtcccaagcatttatttctgttcctttctggctcctcgtacatccacaagtcctcatagcttcagtgtgtgtgtctgttggtatacacaccttttggtgcgggtccacgtaatagtgtcccccaggtatagtagcacacagacagagcttggtgtatgtatggtccagtgctgacatccatggatgtgagtgtttctgtgtaccgcacgagctacaacctatccacatggagaaaagccaggaaggggatgcaggcacatgggtcattgtctgggcccatgtagacacatgcacatatgttgatgcctgttccatttgctgggggtgggcagtggacatggctgcatggcagaatgatggccttcgaggtgcaagccactgggctccgaccttagcactgcagcagacagaaggggtcacgggcactgcatggtcactgtgtgcagtagttaggtgctggtattttgaagccagactctcctgttgcattcctggaaggaagttaccctgggacccttcctggaaggatggattctttgctatcttcccacagtgactcatcccctcattcgctccaattcctggagttcggctaccaggaatcctgttctctggccttggatcccagcagccgactctggggccagtcctggagagagccacttggttctctgcagagcttatcctaggtgcatcttggttcctaggaggcttggcccaggctgccagctctgtggccttctgtggcttttagggtacagaggagtattcaaatgtccttccttggccagcaaaagagaggccctgggctaccgtgagcttctccccaggttgccactggatgtttgacatttcactcttaaggaccatgagttcagctgagaggccttctgaatgagagaggggggggggagagagagagagagagagagagagagagagagagagagagagagaagaaaacatggatgctcttgggtatagtggaggagaaggtttattgtagataaaagggagaacgggagaacatagctagaggcagagaccgctggaagagtccagagtggacatgaccttgaaccctgagctagatgaggggagggggagggaaaaggagaggagagaggggagccaggtgcaactgccaagaaggagggagggcaatcaaaatggttggattatcctggggagagtagcccagccctctgggctatagagttcagggtagggggcagggtatgccagcctgaaggggttctgaaactggtagggactgagggatgctgggagaacgtggcagccaggtctgctttgatatgttaactagccacctaaaccatttgtgcagggtttgaaactcaataccttcagtgccagatcctgtgccatcaatttagtttgaggaggatttagcctggcaggggtgggtgggggtgtaggtggggctctgcccaaaatagaaacaggttaggaggctaaagcagggggattgctagttctaggccagcctgggctaccctccccccaaaataaataaaaaaaattccataaaaatgaaaaaccagaaaacaaaaacacttgatccttttacctctctcctctctcctcactctctccctcactggtgaccttggcctccactggcctagggcagggtcaggccaggctgagctacaaagagaaacaacaacaacaaaaaaacccaggtctggctcagcctggctctgagtcccagtggctgaggaggttccatggctgccgagggaagatttccacccctctcctcagatcccgggctttctggcctctccccagctcccatctcctctgctttgtgatcttcagctgcctagggaggggaaggaataggagtgacctgacccttgcttgcttcctggcttttcaatgaagttccttccaccctctctggaagcttctagaaaagggtcttggctggggcctctctggctgtgggttgtctccatggttctcgtggggcaggggttctctttccccctttgcctcagccagactctggtggaatatgcccaggcccaattcacagctcagggccttaacttcccccccaacccccccacccccaccccctgctcagccccaaactgtcccctcctgggccttgacctcaaaggagtctggtgtgccaggtggctcaactttttcctgaccttccccttcaactccaggcctgtcccccttcaccttcctggttagcttggcctgtggtcttctagcttgtggcggcagcaagccacgaccttggcagcggccttccctcgccctctctgcttcccacacgtgagccctggggaagtgagcgtctcccacctttttgtccgtttcccgaggctgacttctgtcattttcttatctggatccttaaattcctttcctctgtctcttgtgttcctcccagctcccagtacagcagccagaaacagaccctaggtccttcccatgtgtcaagaggccagtaccttgccctctgatacctttctggcttgcacaccccaccccttgattcctctcgtgcgtgggctaggtctatagtctaatgtctgacatttccaagtgggactccgctgaggtcaattcagacccaatatgccacactagttacatgtacattgggcttttttccttctgccacgttgtccccatggggagtccccaggctcaggagggcaaggacctctgtggtgtttgttctttgtccccagcgttggaactgatgccagacactgggccttgggttcccaaatgtttacccaaagtggacagggtcgaatcacagggtgttctggtaccctggcactaggaagtcctgtgccaggctagaccatgggtgccgtggtgctactgtcctgccatgggtgatccggctgatccggcacttccccctgtcacagacagagtgctctttcgaagacacagtgctttagtttaaagctgtttcaggatccagctaggtgagatgatgtggatttgatccccagagcccacgtcaaacaagctggtaattccatccctggggaggcagagacaggagactccatggggctcccgggattcattcctgcaacgcaactggggagctccaggctttagaaagaatcgatcttaaaaaaaaagatagatagtgctggagggagcacacctgaggttggattggcctctggcctctacatatatacatacacacacacacacacacacacacacacacagagagagagagggagagagagagacccacacccacagaggcagacagacagacaaacacacacacccagagagacagacagacacacacaaagagccaaacacatacacccacagagacacacacatagagacatacatgcacacagaggcatagagaaagatagacacacacacacacacacagagacggaggagagacatatagagacacacacacacacacacacacacacacagacacacatacaaagacagacagacagacagacagacacacgcacacactcactcactcttgccccgatccatcagtcctttcttcacaggctccaacctgtctggccagtcagcggttctgttctaagcccacaagtctctctcctcctccattctcacacgcgccggaagttccttctgcccagatacttttccccttggctctttcactcagttcctctcctgtgtttcaaaataaatgacacgtatttgtattttggggtgcttgggagggacacagagaggcactcatactagacaagtgttctcacaccagtacacccaaagcctgtgtggggatgtttttgaagacacttcctggtcccagcttccctgacctcccttgacctttggaagtttccttgcgcccatctctagtgaactcattcctttggttgatgtcctaccaggatggggatctggtgtgttttgtacatagctttactcctgcagtggtggcctggctggggtgggaccctagcagccatcgctgaggtcacaagccttgctgactgcctctgctccattgggggggggggggctgtgcctctgttttgcttttttgtttttgtttttttgtttttgtttttgtttttgtttttgttttttttttttttttttttttggtttttcgagacagggtttctctgtgtagccctggctgtcctggaactcactttgtagaccaggttggccttgaactcagaaatctgcctgcctctgcctcccgagtgctgggattaaaggcgtgcgccaccactgcccagcaagggctgtgcctctgtctccagggggctgcctcctgatgccactacctaagcctcagaccatgagcctctgtcccctggatgccatttcttgaagccacctgggtgagttggtgttcatatgtcccagaccacacccactggcccgagtctctggcaggtgaccctagatccagggtctgagtctctgcatgttttctcttgactccagcaactcctcactggtgtctgtgccagggctgctggcttcccccagtaacctcttcctgtcccaccacaaaggcagtggaccagaaggaagagacccagttctcagccatgtcatcgggatggctgtgggcggtggataaataaatcacacctgtcttagccaagggcgggagagaccaggaggtggggtgcaggtttgcaatgcacggccttcgggagtgaacgggagtcttcagcagccttggtttgacgtggtccgtgtacagtcctccgcaggggacaagtttaggtttatgaataaagcgaagtcacttcctccccggagttccagataacctgccccagtgcgggatgcagtgcgggatgcagtgcgggatgcagtgcggggtgcagtggacagctgctttctcctgccagtgatctatatagaaggacctgggaggtgtggctcacaggtgcgaagaacaaaaataaactgggtgccattacacacctgtaatcctggcattccagaggcgaaaacaagagaaccaggtgttaagtcatcctgactacagagggaattggaggccagccctggctaaagaggctgtctaaagggttcagtgagtaatgcttgccaccaagcctgttgattggcgttcgatcctgggacccacacagtggaagaaaagaacaggctctttcaagttgtcctctgaccgctgtgggtgtacctcaggcacattcacactcctcacacatacactcaaataacaaatgcaaaaaacaataacaaatgcaaagcaatgacgttaagggctgggagaagggggcggggcttggggctgtccattgcctctgattggcttaggtcacatgctcatgtttgagccaatcagtgtgtgtcaagaaagctttctttggaaagaggcgctctctctgaggactcaggaggggatggagcgatgttctatgggttggcaggaggcaagggagacaggtagccagagtaaggacagaacccttggcccctagttagcaccggatcaccccaggttccgctcgctgcctcttatgtacgtacatgggtgctttttttgacgctggctccaggcttttttgattggggaggcagcgcgccagggtaaattttataaatcttaggttgttgggtcttcaagtacttacttgggtttctctctttttattttatttcattcttatcctcattgttattttggttttttgaaacagggtttctctatgtagtcctggctggcctggaacttactttgtagaccaggctgtcctcgaactcatagagatccatctgcctctacctccctcctgagtgctaggattagagtatttcaccacgcccagattttgctacgggctacggctgcttctgcttctccttcctatttattattattattattattattattattattattattatttgaggcaggggctcacactgtagcccaggctggcctcacacttttggcaatccttctgcctctgcttcccaaatcctgggagtaaagacatgtgccgtagtgcctggcccatctttttgtttgttaaaatcacatgtttgtttatttgtgtgtattgtggagggtaggggtgccatatgtgtactacacatgtgtagagggcagaggacaacttgcaagagtcagttttcttcttctaccattatgcatggggttgaactcaggcaggcttggctgctggggctttattggctaagtcatctctcctgccctcatgcttttgtttttgtttttattttgtttcttgagactgggtttctctgtgtagccctgactgtcttagaactcaatcagtagaccaggctggcctcgaactcacagagatctgtctgcctctgcctcccaagtgctggaattaaatgtgtgtgccatcaccgcccagcttagcgcctgtgttttatttttctctttaaggacccagatctcagagggagctgtgatctgttcaaggccatagttggtagccagtgttagctggtcgtgggccaggttaactgccaggctggccggggaagtggggtgctgggctagggaaagataagagatctcggtaagtgagggctagtcatgttgttttctggtgacttcgggcagtctcccagctccctcccacctacctcttctttgctctcatctgactgtaggagtgggaggaggtgttttgataaagtaggagagatgtcaggacccggtataccaaagttcaagctctatgcgccttctctgaggctctgagtgcgccgtaggatgcaaacagcgagaaccagcccaagcctccgcgcccttcactacactcggcatcaggctcagatgcagaggaggtaatctgctctggacgtgttctgcaatatagctcaggagtcggctcacgccccagacagagcagctgttggctcttacccaagactctgaggtacgccatgtccttctggagcagtatggggactgaagctgagcttctgctagtgtctctttgtaagccgagctgggctctctggctacccacatgtttgccgtctgcctggaggagaggtgggaggtgagtgtgttcctggagggtcactgccaaggttgtaaacccattggaaagtctctgggcttgagccttgcgggggatggctctgccaattccctgctgggtaacctcgggcaagtgccttaattcctctgtgccttttcaccgtgttcttaatagtgtcctgtgtctgaggagatcatacctgttaaacacctagaataacaagctgctgagtatcgctcagtatgctgatgcacacatcctcggggacctgtcatcaatgcttgcaactgacttctcttctacatcctgctctgagatgtcacagggcatgctcatggcacacccagctttcccaccagccttaagagtggctggggatgtctcaagactgattctgcagttgcccaagtaccttgctggctagccatgtcccagtaaactcagccaccggctgttctccctccccacgtctaggtttttcttttaaaaattattgttttggaaaaatcgctgacacaatgggacagtgggtcacattggcactcacccaaacctcttggccctgcagagaatgtgcgtagacctctgttagagtcaaggtcacttatcctcctgcccacagcctgcagctacaggctggcccctgtgtgtgaggcctctgcctccagctctgtcctttttccattcaaatctgtcttacttattttctgccagggtaggaactgaacctggggtctcctgcttgatgtgccatatccccagtcctttctccttaaaaacctttttacacttacttatttaaagattttttttttaaattatgtgtctttgtgtgggtatgtgcacatgagtgcaggtgcctgtggaggccacatgaaggcgccagatcccctggagcaagagttctagtgagccacctgactatagggtactggaaatggaacttagggtctctgcaatagcactccatgcttttaactgctaagcggtctctctggcccttatttttgtttgtttgtttgtttgtttgtatagcgattagaggacatccctagtttgtcagttcccttttctgtcatgttgacagcaagcacctttacttgctgagccattttgaaagcccaactctttcctaatattattattaaagttagtctcactaagtgtcccaggctagccttggatgttcagtcctcctgctttagcctggggtggcaggcttgcccacagagtccatatttggttgtagctgttaagtttagaggtttgtcctgtgtggatctccttcctcctatcagtggtacaaccaggcctctcttgccacctgttctgcaagccttgtttcccaggagctgatggccaccttctaggcagggcgccctggttgtggttgctatgtgctcttcccacagaccctgcacataaactgcctagggttatcctggctgagcaggcagtgcgagcagcggggcttagagtttcttgcaccagcttctgcttgagtttcctggctttcccagccccacctccatgttcggagaggtgttgatccctctgacgaccaggctgaggccagctcagggctcccacccacccttgcagctgtaggagtcctggcatgtcagagctggccttctggagttggaggcccaggaaggtgggacctgggggctcatcctgctctgctccctaccgccaccccaacccccatcctgacctctgagccctgcagaaattctaagccctggccctggtcccctcatctggcctcttagcccaggaggctcccctgggctgagagcccatcttagccagtgctccattgtagctggggtcctgacctgcgctggcctcgggatctccttctcctgtctgttcccagccctcactgtgcctcttgcgcttcctttcttattattgtgaaatagtacaaagttctaacaaaggtcataatacacatccgtcaggttaaatcagccccaggtgaaaagatggagcctcatggtcccgaggccctgctggagggagccaccacccttgggtgctccttgccttttgtagaaccatccctatatatccgacttggtctggttttgaacttcctttagtgtctacaaactctgactttattgctgtggcattttgctttcgttgctttgtttgtttgtttgtttggagaccaagcctgctctgtagctcagactaacctggtatcagtctttctgtctcagtctctggcatgcaaggcccacagatgcgcaccgccaagcctgaccacatttgcatcctggctgtggcccgtttttttcaagttcatctatgtaatagcgtatacctgtgcctcctaactctctgtgactggacaatgttttgtgtgtgtgtgcggtttttaatggtatagatgtcacattgtgtttatctgtctttagccggtggcagcaggtagctagtggctcttgtgggtgtggggagcgtggtgctgtggggtgtggacacatgctcacttgtcatgtcctctctctctccttccctgtctcctcctgtcagtgtctccctctgtggctcatcctctctctggcttcgatcttgagtacgttcttccatctgcttcagtcccatccatccacatcactgtgggtgagagcttacgttccgaggccttgggctggggtccaggtgttggctcagccttctcccagctatgtgacctagtgccattggctcacctctctgccttaggtgacttgctttaccaggccatcatcgtgaaaggccatcagctgtgtgacttaagcaacatccgcttcctttctggctcttctggaggctgcatgcccttggctgccatggctgctcctgctgtctagcttgcagccactgcctgcctttccctgtctccctgctgctatcctcagtatctctctcctagctcttcttgctgtagactccggtcacaccgcatcagggaccatcctgactaatttattgcctccttttttttttttaacctactgtggccccatcatgggctctgaatccagtacattccaatacagtttgaggcatgggggtggggtagacaggtgggagtggttcggcacctggaacgcttcaggcaatgacgctatgtggacaccttgaaatcagagtctctgtgattagtggctgggacccttgaaagactgggtcttgtgggaatgaagaggtgccctggagtagccatgcagtaagcagttgctagggatggggtggggtcacacagctgcctttgagtcatccgtgcttctataagtgaccccagtatcattgctgcaccccatctgatgggccagaatctcctcttaggtcaggtgtcactttggggtgaatagaaagagtctcaaggaaaaatcacacaagaacagggggtttgctgggcagtggtggtggcgcacgcctttaatcccagcacttgggaggcagaggcaggtggatttcagagttcgaggccagcctggtctacagagtgagttccaggacaggcagggctatacagagaaaccctgtctcaaaaaaccaccccccccaaaaaaaacccaaaaaaaaaccccagggggttttatgtttattttgtttatgtatttacttgtgtgtgtacgtgcacatgtatgtttgtgtgtgtgtgcatgagtttttgcgtatgcacgagtgtgtgtgtgtgtgtgtgtgtgtgcatacagacctacagacccaaagatgacatcaggtgtcttctttttctgtcattttctgtgggaataaaggtagattctagtattctggttacagtgtccagggaggtggtggcatatcccagcactggccaatcacttagccaggtgttaccatcttatctgggttgcccgtgtgcatatctggctcctggctccttgctgttgcctggtctccctgtttaatgtctgtgagagcttgtctgttaccatggtgacagatgccctggtttttccaactctatcaaccatatacagcatacgcaacacacttcctgggacctgccacattgggtggcttcagattggtccctgggatgtttgagtaggcagctggctgcctactgttagcaggctggttacacaagtgtccattcaccctctcagagttctgtgtgaccagccttcttgaagaagacgacctgtgggtgtttcagtttgcatttctgaggtgtgtgtgtgtgtgtgtgtgtgtgtgagcatacatctatgagtgtgtgtatatgtgtaggtgggtgcatttctgtgtacttgtggataccagagtctaggttgggtgttctcccccatgattctcaagtttgcatgtttgtttattctgaggcaagctcttattgtgtagtgtaggctgaccaggaactcactgtgtagatcaggctagcctcggaactcactatgtagatcaggctagcctcgaacttacagagatgcacctgccttttcctcctaagtgctgggattaatggcatgcaccaccacacttgatcgtaaattatgtgtgtgtatataaattatatatttatataaatctacaaaatgtatactatatttatgttatatatatttatatatataagtaaatgtatatttggtggtgccggagtttgagcccagagcttcgtaggtgctagttaagctctctgccactctcctacctcccatgccagtttatttatttatttatttatttatttatttattatttatagatttatctttagatttatttattttatgtaagtacactgtagctgtcttcagacactccagaagagggcgtcagatctcattacggatgggtgtgagccatgtggttgctgggatttgaactcaggaccttcagaagggcagtcagtgctcttacctgctgagccacctctccagccctgccagtttatttttgactcagggtctctcactgaatctggagcttgctgattgtctagactgtctgaccatcaagcttcaggaaccctcctttctccactgatcccaatgcccagagtgctgtagttatagacctgtatgtctgggtttgatgacccacttggctttttcatgggtgctggggcgagggtccgcactcgggtcctcagcttgaacggctggtacttgtgtctagagccgtctgtgcagcctgctgagcctcgctggcttgtgagtaaggctctgagaacttgaaggactttaacaggctaacctgaggtttgggcttcacttcttcagagcatttgtgttgcgctgagcatgtggctcactttgtagctgcttgcctggcacacacgaggccccgggggcagcccccaggaccccatgaactttatatgatggtccctatctgtcatctcagattctgcttggctactctagggagtaggaagccaatctgggctagagagacactggcccccaaaaaggaatctgtgatgaaggtcatggggctcaggagtgtctgcatcttgcctgggatgacagtttgatagaggccagcagaaacgtcccgccaagggctagaggccaaggacgagtctgtcccatcaccagagctgaaatcagggtgtgtttctttcagtggtggtgccccagcctcctagagaggcctgtgttagtcacctaggtctaaacttgtgtccttaagccgtgggaacttcatggctaggctgggcgcttctagtgtcttgagggctcttggctctctccattcctggaggtgttcaccgttcctcagttgacggcatcaatgctcctgtttctgtctctatctctgtctcaacgtggcctcctttgtattttccatttcctcttcaaaactgagttattagtattatttatgtgtatgtgcatatgcctgcatgagtttatgtgcatagcatgcgtgcttggtccccatgaaggccggaggacatcagagcccctggacctggagttacagatagtgtgagccaccacgtagctgctgggaaccgaacaccgatgcctgcatccatcgagccatctttccagctcccctgctcttctttgagacccaacctaagtccaaacactttgacattcattcctattttgagttaagagtctcaccgtgcagcccaggcaggctttaaattcacaatcctcctgcctcagcttcccaagtgctgaagtgacaggcctgtgccactgcgctgatctgatatttttaacttgacatctggccagaccctatttccgattaaggtcacacagggcacagtcaagtatcttaggatcaccacctacatagatgcatggcagagtaccttttgcccagacagcccctactgtgaaaataaactacaggacaaaaatcaccagtctgtcctgatagccggctctcagcacttgaaggtaggaagcaagaggatcagaagttcaaggtcatctctgctaatagtgagtttgaagccagtccagaggggaatgaccctctgggaagacaaaggtgacatgacactcgcgtcccccagcgtcccaagcacagaggtaactttggttcatggctctttgttccttgctgcaaaaaacatgtttgtgtttagaagagcccctccctgccctccctggcctccctctcctggcccccggtacccgtgcgcacttcctgcactttgcagtctcggattgggcactcagatggctctgggtctcccccttctttccagagcgctggagggatcagccgtgtttcccatcagccaaggccgcggggaatggctgtgcattcaatagcatgtctctgggaaattgggcctattccagcaccatcttcccgtgtcttccggagctttctcaggagatatatttgtttctacagacgccactaattactcctggctgggtgcctggaaatcacatctgtggattaaggtgccaccagatctgagcttcctctagggccccaggagtcctgacatatcccccattcagcatacttgctcgcttgcttgcttgagctcagtttgatttctccactcatacagcccaggaccccttgcctagggaatggggccgccaatggtggactaggtcttctcaggtcagataagctaatcatttagacaatccccacaggccaatccaaatgtaggcaggccgtccttcactgagaccctcttcccaggggaatctacgttgtgtcaggttgccagagctaaccgctgcaaggttataattttaaaggacaagacacatcattgggcgtgcttagctcaaagttgtggcttaagtacgtaaaagagtaaaggttaatcaacacagaatttggtccccgaagtcacttgccgtgtttagtcaccctcagagcttcacagtaagaacttttctcaaagaaaaaaaaaaaaagaacagccgggcagtggtgtcgcatgtctttaatcccagcacttgagaggctcatatttctgagttcaaggccagcctggtctaccctccaggtaccatgctgtgtgaggtccaggcaagctcaccagatccagatccgctcccatctactgaggtccactcaaggcattttctgcaagtggaggctcacaggcactgaggtagaggtacccgtgtgaggccagatgagtgaaccttgactcaaatccccatgtccaggaacttgctgtgcatcaagatggcaggatttatgtggcagcccctggcagagctgtccccttaaggatcttgatctttagaccatctcctctctggatggtcatctctggtgtgtggctgagggcaagaacttgattccttgcgcctttggtttcctgcttgtcagtggggctggggctgagagagataaatgggtatcattggggaatcagagaggtgttgccgggatcggatccagctgctggctggcatgggtagcaaggtggccaattcaaatcgacagtgaagagggccagagagacggctcatcacggggaagggttcttgctgctaagcctagtaaccggaattggatctctggaacccacatggtggaaggacagacagactcctataagttatctatcctctggcttccacacgtgtgctgtggtgcatctgtgcctgtgcacataataaataaatacacaaataagtaaatgtgatttaaaaaaataattgaaagggtctaagaagtgtcctgtgttttctgtaattctccactaagtttatggccgatggccgtatggagtagaatggaggaggcgggcccaggtctagcttccgactcagtcagggtctcatctcccaaggactcagtttcccggtctgcagagtggttggtgttaattcctgtatccagttgtcaggacttaggggtcagcccacctacctataaggctgttgtctggggtgggagtcattgatgatgatgaaggtgtccccggggacctctcacacaaggggacgagtcaaagaaaggtgaggagaagaggccagccagggaaatggccatggctgtgggcgggaggctgcagtggactgagcagcctggccttcgaggtctccccacagctgaccttcccagtctgggctttcatggtgtgtggtccaggagcagataagtggaccgagctatcagcagtcagggtcaccgagtcctcatgtggaagtggaggcgggggagaaggggaagggagatatagaatgggctttgtttcaaggtagaggccaatggagagccattgtggaagaaccctatatgtatagcctggcctcagagagtgccattgccccctacccagacccacagcggggtctagctgagctctggctgaaaaaaaaaaccaaaaccccccaaacaacaataacaacacaaaacctgtgggattggaaggtgcctgtctcctagcagctgggatacccacaaactccagctctaagtgtcgatttaagacacttggtgccttaagtcacctccaggtgtctttcagtcccaccaaaaccttggggattattgatctggcagatgggacagacacagaggagcagggtagagaggaggaggagtctgaggctcttctggggaagcaggtgttccctcttcctgttgagctgactgccccgttgcatgctgggcccctcccaggccctggagttgcatggtgggcagagaaacagggtcttgatggactgtctgcaggacttgacacctgcacaagaggggcagtgtgactggcctgtggtgagtgtggctaacaaggccactggtgagggaggggcctctggtgctgaggagaagcaggcccctctgagggccaggcaaggagcatttccacctgacagaaaacgaaatgagtatccgaagtagtttacaggtggtgagagccctggagcagatagatgctcaggacacctgtcactgggctgcaggttgctgaaggtcaaaggtcgtgcaaacccacaaggacagcctctgttgaacttagtaggtcgtaggtgatgttgctggtactgtaaaagggtgcagctgccatgagaagctggtgtcaggtcactgtcccgtgcagccgtcctcctggggagtctggacaccacacaacagctgaaggtagaagggtcccaatacttagtgatgctggatgggcagataggaaaagcagatgaaatacagagaggtgagctggagagggtttcagaggtcaggagctcacatggctcttccaaaggaccagagttcagttccctgcacccacatcaggcgagtcacagctacttgtaatatcagctccaggagatctgacacccttctgggagcctctttagggactgtgctcatgtgcacagagcaacacacacattaataaaattaagattaaatcttcagaaatgaaaagagggctctccaagagggaatagtatgcagccgtataaaggaagagagagattccatttatttatttatttatttatttatctatctatctatctggagacagggtttcattatatagtccccaggtaaatagttcaaactcgtggtcctcctgcctcagctttaaagtcctgcgatagctgctgcagaggagagaattctcccacacactggaacatggatgaatgctgaagttagattctgagagacggcaggatggttgcagcgtgatttcgtttactggggcccctagagtacctattgatgaggttggagaaatgggacactaaggaggtagtgggaggggaaaggggccagggagagtgttaagtggagacagggtctcagaaggacatggaagggcgtggccattggtggggacagttgcccaagccatgggtgtacttaacaccatcagaatggatgctataaaatggcactgcctttaatcctagcagtggaagcagaggcaggcagatctctgagttcaagaccagcttggtctacagatggcgttccaagacagctgaggctacagagaaaccatgtctggggttgggggcttggggggagagtgacaaaacaaaacccaagtctggagactttagcatgataaaaatgaataaatcattatggctgatgtcccctgaagggacatgggtcacagccctccttactctggtttgtaaaagggggacccagtggccatagtgactatgttccagcctgatgagtgtcttagaaaaaacccagttccctggaaatatggccctgagctgatagctgatgctggctgccactgcccttcctctgaggtttggcagggctctgggattgttcttgaaccccagccagtctacagctggaggctctgtgatatgtcttccttgaagtgtctgggagttggtatcttcctagggacagccttgtgccccaggctattgcatgcagtgccactggaaggagccctaaggggaccaggcaacagcctggggattaggctgtagagacctgaggatggggcccctggccaaccccaacggccttgtgtggcactggctcaatggagaactcacacgtttctaatgtctgtagctgctactgaaagcattctctagaagtctcccaaagacttctcactcagtctaaagtcagggctaccttccctgtatggttgggctctacccaacaggtgaaccacatgtgtttctagaggggtaggaggcagagaggccttgggtgggcaacaaggtaatctgcttctgtgtcaatttcttatctggcatgtggctgtcgagaagcagagaccggaggatcatgggcatgagctatacactgaggtccaggctagcctgggtgacataacctgtcagaaaaactacaagaaaagattcgcattcaccatctggcttggaccttggttaagtgataaccattgtcattagcctgacacttaggcgccaggatcaagaaacaagaactcccagaatcctttggggcaccagaaagcctttcattttgagataggctctggctgtgtctctggctctcgtggaagtcacacagcaatccctttgccttagcctaagtgcagagattgtagacgtgagttatactagcctcctctgcatggattggcttgacctaaactgagctgggctctccatcgacttgcttctgcgatttcagagtggcagcctgacctagctctgcagtggcttggtgcagctcagcctgaggctggtgagatgcttacaagtcatagctggttgctgcttggtgctggtggtcatgttatgagcaaactggtccctggtcagtgggctccggattagggctgtgatggaggcctctaggaatctcgctaagtctctcactggttgttttcatctctctgagcgatgtgtaggattgagtgacagatggcagataattgggagtgggtgacaggcttcagtattctactttaatggctgttacccggtgatgccggcataggcgtctgatgctctgagtacttcctctcatgtccctgagtcatgcagacttaggaggcctcttctccactcacaaccgtttccctgagggcagaatccagttcggttaactttgcttcgtagtactaaataccagtttggggcctcgacagtgcgggggagtggggcgggttagaatgaaaaaaaaaggagcaaacaggttcattaacagctaaatgaatgaatgactgatgaaaggatgaatgaatgaagtgttctcagcctgtgctgttctgggtcagggctgagtgggaatgtcaaagggtgtggccactatgtgagccatggagttggggttagagggaaggctgcctgtgggctgcaccagtgttggggtgcaacccttgttgggcagcacctagttttccaaagggagtcagaaacgaggcttttgagactaaccttggttatgtctgacagggtttgggggtggggtgggcacatagacactcttgctttttgtttgtttccttttcttttctggggagtgtgtggtgtcaacttgacagggtctagaatcaccttggagacaaatctctggatgtgtctgtgatggagccatcctaactgctggagcagagaaaaaggagaaagatcctagcagtcattcacccctccctgcttcctgactgtggacacagcctggcaagctgcccctggcttcttcctctattgcctttccaccaagatggactgcggctttgatcagtgagccagattagccttccttaagctgcttctgtcctacgtatgtatgtatgtatgtatgtatgcatgtatgtatgtatgtagcaagccaggggcctgtgcacataccacacaagtgctccgatgttagcatttggcccttgagacttgagcgttggagtttctatcgagtctgggaaaattactgcacaccagaagcctgttaaacagtaacaggccccagagcgagagccaacctcacacgcctcccgtaagcttctcccactgacagctgtctgtgggccagacacggttgatatgcgcacctgctccctggtcagcatggtaggggttctcctctgagggactttattggggtagcccttgggagcagaaggaatatggtccggggattgacatacacataggtgcccacgtgtttgcgtccagtccagtccaaccagggagcttcctaagaaccctggagtggctctcactccacttgtctccagggaaactcactaggtcctgatgttgccctagaggatgctgggaccttctgatggagccaccttagccctctttcctggggctctgacttttatagctggacaggctctctgctttgtcaagctggggtcaaagtgaggtcacaaggcttataccttgaggacacctttctacttctgtccctaagatgtatctgcctgctctggtgtgtcaccggagcagaaaccagtttccccatagcccgagggactcaccggccacaccctttgacgtctagggatcatttgaggatgagattatgcatctcccagccactcaatcggacgtcggcttcacccttgtgtattaagctactgtagcaaaacccttgaaaacatttatggataaccagcgggcaggtgctggcgtttccccaggatgtacagtgaacaggtacttagctctagcaggcaaaccatggcgccgacacagttccaccgacatcgtgcatgcattctggttgccccagagccttgccaacacttgtgattatcaatccgtctccttttggctgtgctggtatacgtcatagagattcttgtgaatttgggggatatgtccagagttggggagggctttatgatgtcacaggccaccagtctttatgctctgtcatcctttgggtatggttttcagtctcaaagctttcccatgatccaaggtagctctgtagctctctccatcaggaccgaatttctgggtgggggtggcgggtgtttcactgaaaccaccggaacttttagtgtggtgggaggggctgctgttacaaagattggtcctgtccattttcttttttctttttttaagatttatttatttattacatgtaagtatactcagacacctacagtatgcatagggcatcagatctcattacggatggttgtgagccaccttgtggttgctgggatttgaactcaggacctttggaagagcagtcagtgctcttaactgctgagccatctctccagcccttgtccattttcttccctgctgtggtttaggcctagcacacagcctcttgtgcactgggtgctcagcagaggcctcgtggatgccaggaactgaacccaggtcctttgtaagagcagccagtgctcctaaccactgagccatctctccagccattcctggtgtgttcctggtgtgtggtgtcttcatgccctaggctggattgtcctttggggcccatccttcctgtatacatagtaactctacagggctagtacattgcgactggctggctggctcagagctgacaggatatgtgtctcaacccagatccagggctggtgaacccagtggcaatgaccagaactgtttcctctccctcctcctcctccctctcctcctcctcctcctcctccttctcttcttcttcctcttctctccttcctcttcttcctcctcttgtttggagatagggtttctttctgcatccctagctgccctggtagaccaccaggttagccttgaacacagagatccacctgcttctgcctcctaagagttggattaaaggtgtgagccgacctctgtcagcctggctcaaaaacctggtttttttttgaacctgaaatgtgtttgctgtgattcttgggggaggagggactggattttgcaatttcccaggtcagattaatgattgctttgcgagggctgcagcacctgagctgagccacactgagcagggcctggagaggctaggtacagtgtcctggagatcctgtgcagtcctgtgtggggatagaggctgggggagcttccatctctgtgatcttcatgaaccagaggcctctgagcctgatgcctgtgcacctgggatatatggtcagagagttaaagaggtgtagtgaccagaagtgtcctgttacccacacagagggtctgttgggtccctagcacctcatgtggcggccttgatcagctccagctgcctttttgtttgtttttcttttgaatggagcctctgatgtccaagtgtgttcggttcctgcagactgacctatatcctggccatcagagaacccgctaacccccggattatggtgctcactcccagtttggcttgcccagaccccacctcagactcaaagcctttgtttctctgatgcccagccaccctacccaatccctctctggaaggcagatggcttattctgtgcttattctgtacccaggtcactgctgccaagcacatgcctagtatgtactggggtcgtgggggagcaggggtccaagcaaatgatcagaatgctcacagacctttgtggtgtggagcatggagattgctccagttttcctgtctctcgggcacttggtgtgcattttggacatccccaaggcttgcagaatggagtcgaggtagcgtatggctccccacggaaggaggaaacctcagtgcattagtctgtcggtattgctgtaatgaaagacacaggcttggtgttagcatcacatctgatggggccacttcatgttgttgcgaactgcttggagcagctatgagccgagagattacagtggggaagccagaaggcaaagaaagtctgcaccatccccaccaccaatccccagccctttcccagtggggctaagcctcctgagggtcccctcccaaggcttcatgtcagagaccaagtctccaactgccaccgaaagcacgagaataaagtgtttgcagagcagacatttttaaggtaatgatctggtgggccaatgagtgtcctttagagaagacagaaaagaatgtgcagtggagaggaggggacagagaagcaggggtgggagccaagaggctgtacgaggctgagaggctcaccgctggagctcagggatgctttggtgacagctggcccaggaagtgggagctgtggtcatttattttagaaatataaatgtgtgtgtgtgtgtgtgtgtgtgtatctgtgcacatgtgcatactcggtgactttggaggccagaggatgatgtcatatcccatggaactagagttacagatgattgtgagccaccaagtgggtcctgggatttgaacctgggtcctctggaagaacccagccaatgctctaaccaatgaaccacctcactttgttgttcaaaggcagggtctctcactaggatgtgagtctcgccatttttaggctagcctggctggccagcaagccctgggcattatcccgctgtctccacctctccagagctgggatcacaagcatacaccaccatgcctggctttgtatgggggccaaactcggctccttccacttatgaagcaagcactttatggctgagccatctccctagaattccaaactctgttctcaagaacacactatgtcaaaggtgcccacaggatgctgggggtttgtttcctacaatgatggattatggcgctccagaattggcttgggctccttcctccaagtcctctgaggtccttccaggtgcctggcactgctcagagttcacggatccagcatgagcatcattggtggggtttatggcctggcagagagacgtgagcacaatacacaggatgagtcattaacgtaatcgggaagaaggcagggagagcctcggaataaacaagagtttaagagggagcccagggctcggggtgggctctgtgggggttcctgagcacagacacaggatcccaggaggcttcctctgcaaacatggaaggcagaagaagcgacgaccagtgcaagggcctggtgggtgagagtgtgtgaacaggcaaggcagagcaagcatgccaggctggtctaaaggactaatgggggtatcagtaagacacagccctagagatgccactgagccagatgggcaaaggcttataggtcagtgttagcatggtaaaatttacaataaataaataaacaaacaatccatttggtttggggatggccatacatatgccagggtgcatgtagaagacacagaacaatgtcttggagtcttctgttctgttgtgtgggtcctggggatccagctctggtccttaggcttggtgattaagctcctttattttgcaggccacaatctgaaagatgctgggccctgggcttcagataggggaaggccactccccacaggcattccattccccactctggtggctgtacatgaggtacctcgtggttcagcctcccgcaacaccccaaccacctgcttgcagagggaaccgcccatcaccccatggttttcagtgagattctgcctagtcctctgtgccaaaaaagccaagcagaatctttggggaggctgcctttcctgctctcctgagagttctctgggtggcgaagggagacaatctgtctgagatgaggaccttcgggcgctctccaccgctctgttggcctctcaaaccttgagaatccctccggggcagagttttcaaactgggatgttatctttctgatatcggttgtgacatccctggggtgtgtgggcaactgatgtttaaaacatggcgggagtgtgctggtgatgatggggtgataaagaaatggctcagaggttatgaggagtatgtctcatctcacacacacacacacacacacacacacacacacacacatacacacacacacacacgcgcacgcacatttgagtgtggggtgctaggaactgaattcagtctcctggaacagcctcaagtgcttttaaccactaagccagctccccacccccaccccacccccgcaaattaaaaacaagcaaatatataaaagtctaaaacacagtgtgagccaggtgtaatgataccccaggctccctataatctggacattgaagaggcggaggcagaaagatcaggagtttcagagtcatcctcagctacatatcaaatcagaaatcctggagttggggtggaaatcattttgtactggagaggttgccctgggtggcaggcagcatttgggagctggtattcggggtgttgtcccaggtagaggctccgcagagccatagggcactgcacagatatgatctatgttagaagtgcacacaagtacccgctggctgcccgggctgtgtacctcacccatgccctcacttatttagcttcagcttcctattgcagtgttctggggaagtatagtctacttgactttacagctgaccttttaaaaatgatgggtgcatttcagtttcggtattcaatggagggcgcagcaagatggctcagtgggtgaaggcacttgctgccaagcctaatggcctgagttcgatccctggggcccatatggtggaaggagggagaactgtcctctgacctccacacatgcaccctggcgtaagcaaacccacacacatacccatatacacaaataagtaactgcagagattaaaagaatataaaaacctttattgagacacgccagccttgtttattctggaatttctcacagtaggactcacaacgccctgtgcatatttccttctgtattctctcccccagtagtatactgagtccttccccttcccctccctttttctttttgagatggtcttacgtagcccaggctagccctgaattcactatgtagctgaggatggcctgggactcctgctcctcctgcctgtgcttctggagggctggggtggcagaggtgggcactgtgcccactttgttcagggctggggatggatctaatttaatccaccaggtcacacacacacgagtggagccatgagcacccgtgggacttgtctcgtgttggcagaggcaggttggtaatctcccagcagctccacagatgtttcctagagtctcggtttataaacactcctgtcatgggtggacacggagccccgcacgcttgctcggcaggccagcctttgctggaacaccctcctgggaccttttcctggcaaagcctgttttgtctttgttttgtcctcttgctgttgtgaagcgggtgattgccatgcagcaaggctggcctcagaaagccagtcaaccctctgccttagctgcctgagcgctaaagtgactggcgtgtgctccaacagcgtgcaccccgagagccagctcttaatttttttttttttttagttttccaccatgtgttgatttggttgtggtggtagggattgaacccagggccttgcacgggctgggtaagctcttttccactgagctgcatctatgtcttctcttcttttaaatgtaaaatcgtttattcagtctttgagaaccacaacattcatacaacgtatttcaatgatacacgcttgctactcctcccagatccccctacaggccactcctgattttatatccattttggttttggttttggttttgttcaccccttcgagacaggatctcactagatagtgctggctggtcttaaactcacatagatccttgtgcctctgcctcccaagcgttggaagtaaagtcacgtgccaccacagccagtactttcttcttgtcttttctttttcccccttatttacccactcaatccaattgctgtggcccatatacatattgtaggggcagttttacactgtgtggcagtaagcaaaatagtagttctggggtcatgggggaacagcacccccagagcctgtctcagccatttgattctcagccagatttatagtatcgggcatgtttttcgtcctatggagaaggccttaaatccagtcagagagtattggctaaacccataatatccgtgccactaatgcgtccgtgggcagatcttaccaggctgataagctgcagggtagtttgcaggagtcacagctgcctaagggtgccagggtcttgaaatgcctctctgtttttgccagatgttcaggctgtgggtgaccaacggaaggtgcggcaggacatctcttaggtggactcagcaggggatttttctttcagtgggtcccgaggaggacaggccagacccagccatggctttcatgactccggccttgcagtactcaaggacaaaccccaggcccagagagccaagctaggcctgagagagtgtggcccagtgtccgcctgcctcggagtctactctgacgtggggctgggcttgacctgccagttctggcttgccacctcccctggagcctctgcctgttgtttctggctgtttggggacagtggggtggttgtctttgtcctggcaggtcgagttcaaagtcaaagctgtttggcttttggacactgctatctctgatgagctgggggtggtgactcttagctctgtggcattagcagaggtcccaggtcagggaatggtccacctcttcctcctagccttggagaaaatcagtagttctgttttgagacagagtgtctcattcactgtgtatcccaggctgacctcaaagttaccatctaactccttcagtgtcccaagtgctaggatgacagccctgcatgactggacccagggctgcctgcacactaggcaatcactaagccccgcccccggtcctgcttactgtcttctgtccctcactgctggtgactcaagaatcatcctcttccctctccctgctcctcagtacatcacacagcactggctctgcccccgctccacccccccccacccccacccccccacccggtgcataaagcccttgtcttcccgatttggtaaaagcttcacgggactggagacagccagcctgtctacttcccactcctgtctgctactgcgggaacctcatctgtcaaaaatgaatgaatgagtgaccaaatgaatgaatgaagaaaagaacaaaagaatgcgggagtaaatgtgaaatgatcagtgaataatgaatgaatgaacgaacgaacggctttctggatgagttattgactgaaagaatggagagacagccacctgtgcagagctccagccctaggagcacctccctcgatgagcactacctagccagtgttctgttttgctgtgaagagagaccacaacgaagacaactctgtattataaagcatttaactgggggcttgtttacagtttcagaggcttagtccgttatcctcatggcagggagcatggtgcaagttaggtggagttagtgttggagcaagttagtgttggagcagtagctgagatcacaggcagagagggagagagagagacagggagggagggagaccaatggaccctgtgcttggagtgagcttttgtaacctcaaaccctgcccctagcgacacacctccttcaacaaggccacacctcctccgacaaagacacgcctcttcctccgacaaggccacacctcctccaacgacacaccccctaatccctgcccatagcgacacgcctcctccgacaacgacacacctcctaatccttccaagccgttctccaactaaaggctaagctgcaaatatctgagcctgtggggcctttctcattcagaccaccccagacacccttccagatgagccttggagggtccatggcgcaggccaagtctcaggcagctgttgcagagccgtaaagtggggaagcccctcctcacactcctccctgtgtctccccacagaatgtccgcatagacccgagcagcctgtccttcgggatgtggaaggagatccccgtccctttctacttgtctgtctacttcttcgaagtggtcaacccaaacgaggtcctcaacggccagaagccagtagtccgggagcgtggaccctatgtctacaggtgaggccaggcagggtggggtgggactgtgtgtgggtgtgtgggtgtggaggggggtgttctgccatgctgagttttggagattgattgctccagagacagaagtcggacagacaccgcctctccacagactgtcagccacacagagaagccggaggccacagtggctgacagtctgtggagaggcggtgtctgtccgaggcgagtgcatactcgcatgcgtgtcctggggtgagggctaatgtgagtgtaaatgtgttgtcatgggggcggggcacagaggacccaacagcgcacaaaatgggcaaaatggctgctgttgagtcagaaaagtcaaacaaacatgcagaagtgaagccagttacgcagcatctaagaagtgagcggtgctgggtagtggtggcacacaccttgaatcccagcacttgggaggcagaggcaggtggaattctgagttgaaaactggatccaggagcggctgcctggtcctccaccttggacagagagttttaacttccataatgcctattttagccccatctgtgagacagaggtaatggtacccactgtgggtaggttcaaggataagatgagatagttagttggagccacttaagctctgtctgccatgccataaactctcagtaaacgctgcctgtgtggatatctgctccatgctggttgtcaagtgaaagggagacgtggggggtgggggcagcagttggagttgttttccagagaggctcaaagagccttatggctcaccagggaaagcagagaagagctgattggtggtggcagtgtcttgccctggacagacagcgaggatataaacaagaggtggcaagcttgatttggtggccttggtgctgttgggtatcagtgtaccatcaccccagggcatgctgggagatgatgggtgctttcatgtgacctcacagagccacagctgactcaatgcctttttacagggagttcagacaaaaggtcaacatcaccttcaatgacaacgacaccgtgtccttcgtggagaaccgcagcctccatttccagcctgacaagtcgcatggctcagagagtgactacattgtactgcctaacatcttggtcctggtgagactgtggccctgtgtcaaccccatgccaaccctgcttcctcccagcttagccttcaggagtcagagagcaagggccacctcagccccactgtctccatggtgaccatcccctccttctcattgccttacctcccatctgagactccgggacctccactgtggtccctggggaagcatgaaggtcagagccactgggggccagagggcaggtgggagtccggaagagcaggcatttattgagcacactgtgtggggtcgctgagtctgtcctttggtgtatgcggggatctactcaaccctgctgttcaggggaggaagcaaaagccaggcagaggcagggaatttacacaggggccagaaggaccctccccaaggacaaaatcccagataccaattgggccagtgttaccaaggcaggatcggatcctgtggtcagacatcacggccctcgctggaagtttgaggacagggtacacggtggttggtagtggggggacagtcaaggcatgatgtcacgaggtaagcattaccattcccagtgacactaacttgagagattggaactgtgagctttgtgtgattttcatgctttttagaagattcttctgatctccccccacccccaccctcaaccataggaaactgttgaaaacaccagctttcctgcagttgatgcgggccgatgctgactggattggtcctttagccaccttgcctcgagtccattttcagaggtgtcccccgggtccgatggggctggagggacactttttgtttttattaatttattatattactactatcattatcattattttgagatagggtgttactgggcagccatagctgccctgtatctcattatgtagaccaggccagccttgaactcacagagatctgccagcctctgcctcaagtgctgggtgtgagccaccacatttgtcatattaattccagtttttaaaaattatttattttatgtatatgagtacactgtagctggcttcagacacaccagaagaggtcatcggatcccattacagatgtttgtgaaccactttgtggttgctgggaattgaactgaggaagtagtactttaaccactgagccatctctccagcccttaattccatttttgatattgaaaaagcaacagcattctgtgctgggccagcaggatggctcagtaggtaaaaggtgcctgtcactaagtcggatggcctggctttaatctccaggacccacatgactgcctcacattgtcctttgacctctatacgtgcactatagcacccctcaataaatataataaaagccctgtgttgaaggagacctgtaagtgttggtgggtaggcatcatgcgcttgcttgatggaaagaacctggagacaccagccatgcgttgcccaggaggtggaaggtggcttttggttgaatggcctttgggaaaaaacaagagcccagatgctccatacggaggaagaacaaacaagaaaactataaactcaactgaacttggggcagttagaccctgggggggcttcgggggagtagatattctgggctcccagtgttgaggtggggcagggacatgagaagtgaggtggaatccctgtgaggagactgcggcaggagaatgctgatttccaagccagcccagattaatcattgagaccttgctgtaaacatgttcaaaaggaggccacggggagtcggggaggctttctccatatgctgtgtttctaggctcatgttactgatagaatagggttcacgtcctagctataaaccgggtatccaaggggctggcgagatggctcagcgggtaagagcactactgactgctcttccagagatcctgagttcaaatcccagcaaccacatggtgactcacaaccacctgtaatgagatctgacaccctcttctggtgtgtctgaagacagccacagtgtacttatttataataataaatgaatttgggaacaagaagaggccctaaaaattcaattcccaacaacatgaaggctcacaaccatctgtacaactacagtgtagtcatatacattaaaataaataaataaatctttaaaaatcaaaaacaaaacaaaacaaggtattcatatctttgctggcccccttctgtgttaggttttctcttaaccttggctccagcctcatccgttcgcttggtgagggatggcatgggagcctccttctctgtgccccggctctgcggagtgtctctggtggttcactggttccatttaggcctcaggtgtggctctacagacacagtggctcaggaaggcttccggaggtcaggcctgagcttcgtgtatgcctctgagtccttgtagagttcactcaatctgaacccatcatcgggtgttctcgagagtacaggttaccctggcaacaaggaccagagaaaggtccatcctgagggcctgagctctttgcctgaagcctggttgaaagtgggggatggtgtcctaccatgtcctttaccctaatcccatgtccttggctttccaggggggctcgatattgatggagagcaagcctgtgagcctgaagctgatgatgaccttggcgctggtcaccatgggccagcgtgcttttatgaaccgcacagttggtgagatcctgtggggctatgacgatcccttcgtgcattttctcaacacgtacctcccagacatgcttcccataaagggcaaatttggcctgtttgttggggtaagtgtcttctgtcccttcagagagtcaggttatctctcaaggaccctaactcaaaccagcttaaacaaaaattgggaaattatcagctcatataacaggagatgccaggattacattcaggtgcggcttgatccagttcgagtggggggatatggctggggtttaacttagaagatttgaggcacagcttgcggggaggaggaggaggactggatcttcgaagcacacctctcaaatgtccccatcagtgtgacttagaggcacccactatttctcacagttgacctttggtaacctgagctaaggtttggtctctgacccctgaccccaactctctggttcagctcagctttctctgtggggatctactgacggggtgtgcttgcagtaacgttacccacaccctccaggacctgttattactgagttcacgtgagatttactacccagtggttagagcactggctgttcttcaagaggacccaggttcgattcccagcacccacatgacggctcacaccccatctgtagctccagttccaggggatctgacaccctcttctggctcactcaggcactgcagtgcaggcaatgcacagacctacatgcaggcaaaaagactcagacacataaaataaaaatatgtccaatcttgtggagaggagacggggtaaggcactgtgtctcccagtgaccagatggggaccccatggggtgaacacataacgagggcggcaggctgaatacccagtcttaaagcttttacagagttagaggccctgggtaaagccctgtacctgtctgtacctgcccttcccagtaccccatagagactgccatccctctcttcctgacaattgaggtggggcccttctactgagcttctagatcgttcctgtcagaaatttgtattaaattctttctttctttttatctttgttttattatttttattgagtcagggtctctctatgcagtcctggctgtcctggaattcactttgtagaccaggctggcctcaaacagatgtctgcctacctctctctcctgagtgttgggagtaagggtgtgtgccactaaacccccgctaaaatgcctttttactttattagctgttggccctgattgagtagacttgtcatctgtgtacatgggagtatgaggcaggagtatggcaaattcaaaaccagcctggacaaccctgtctgaaaatgtgcaataaaaaagaatgctggatggagggtggagctggagagatggctcagcagttaagagcactgactgctctaccagaggtcctgagttcaattcccagcaaccacatggtagctcacaaccatctgtaatgagatctgatgccctcttctgatgtgtctgaagagagctacagtgtactcacataaaattttttaaagggtggggggaagctgggggtgtgactcagtggatgagtacttgcccacatgtgtaaggcactgggttctgtccccatcatttatgcagcaacagtgaggggacatacctatagctgaagaataggtgggcttgtgcctatgttgtgatctatgcccagggctaaaggtgctgttccctgcctgtctgtagatgaacaactcgaattctggggtcttcactgtcttcacgggcgtccagaatttcagcaggatccatctggtggacaaatggaacggactcagcaaggtgagcaggagggcagacagtccccatcgattggtgtggggactacaccagaacaagccttggcagagggtgtccgggtcacccgaggacttcacggatcccacaactgtccctgcggtatttctgtcgggaactcttttctgttcctgagttgtcatttctaaggctgacaggaagacattcccataaagataagacaatgaggtccagcaccttgcctaggcccacccggaaatcccccaacactgcttatagaacccagcttcctggccatttacccaccaccacgcctctgtgtacccagagaaatgtgttttccttccttcttcgaatacacagaaatcctgtcatgtgctattttgctgctggcttttctccttaggggcatctttatggataatgtgtttttgttctgttgtgttgtccagaggcccaggtactaaagatggaacgcaggccatgtgaatctttgacaaggacaccactgctgagctagacttctgcccttcactgggggaattctaggcaggggctctaccactgagccacgcccccagcccctcactgggggattctaggcaggtgctctaccactgagccacacccttaaatttttttattctgaaataaggtctctgtgtatcccaggctagcttcaaaaattcaatcctcctgtctctgttgccttgtaagtgtttaattcatagatgtgtgttaccacacccagccaacagctattcttagtgggtgctgttcacattaaccagctgctgttttatatgcattggcattttgtctgcatgtatgtctgtgtgagggccttggatcccctggaactggaattatagacagttgtgagctgccatctgggtgctaggcattgaacctgggtcctctggaaaaacagccagtgctcttaaccactgagccatctctccagcccctaatcgtctcctttctactatgagaagggctgattgaaagctcttacggcagagtgggaagtgcgtttagttttgctgttgctgttgctgttttgttttgttttgttttggaagcagggtctcagtgtagtcctggctagcctggaactcgatattgtacaggtgacttaactgagtccccacaatactgtatgttctgtccccactgtggggaacaggaagctgggctagaacctctgtgcacacagcctgctcacgggcttggatatgatgatgtctgtactagggcacacattgggtgtagatcttggctgtccctcaaggctatatctcatcctgtcctgcagatcgattattggcattcagagcagtgtaacatgatcaatgggacttccgggcagatgtgggcacccttcatgacacccgaatcctcgctggaattcttcagcccggaggcatgcaggtaagccctgtgtagggactccctgcctcctaccaggaaactctgcttctgagatggttcagggtccactcaggtagctccctggaagtgtgctcaaagtgtctggccttctgtgtactatgcctcaatggtttttcttgtcactgtgacaagatacctgacagaggtgacttgcgaggtgtctggggactcagtcatggtggcagtggtgaagggtactggtaggaaagtgttaaagtcttgtagcttgggctccaccatccccagggtcctaactgtggcctaggaagacatggtgggtcttcagagacccatttccaggtggtgccctagcctgtgcatccattctggccacaccagagatgactctggcctggggactcactgggctgatctttgagccctcttcctctctagctcacacaggcagccatgcttcatgccaggtgtgaacacagccacgacggggtgagcaaagtctgtgtgctctggtggactttcaaaagcagaacttcgggtttggttttgttttgtttttacattttatttattactggttttttaattttgtgtatctgtgtgtgtgcacatgagtgcaggtgcctgaggaggccagcagagggcgtcagatcacctggagctcctgtaagaggtggctgtgagctgccctacgaggatgctgggactcaaacgttttgttttgttttgttttgttttttgagacagggtttctctgtatagtcctggctgtcctggaactcactttgtagaccaggccggcctcgaactcagaaatccgcctgcctctgcctcccaagtgctgggattaaaggtgtgctgcgccaccacgcccggctgctgggactcgaacttaagtgttgctctaaactactgagccacctctccagcccatttatttgtgtgtgtgtgtgtgtgtgtgtgtgtgtgtgtgtgtgtgtgtgctgataatggaacccagggcctcacacactctaagtaagtggcctgatactgagtcatgccgcagacactaaataggatttcagcctggcagaattatatgagagcagggtgcaggccaggtgtctctttccttcagtccttcatggggttatctccagaaacaaaggcctcttcttacacaatcacaaggatcgaaatcagagaatttaacatcgccctaataagagcctctaagctggtgctgctgcataaaataacaaaacaaactgtgcttataatttcagattaggggccatctttgtggctggtggtggggggagatcaaagcaggaactccaggcagctaatcaatccacttacaggaacagagtcacactgaatgcactcatgcctatagctcagatggctgtctccattcttatacagtccatgagccaaacctagggaatagtgccgcccacagtgggctggctcttcccacatcaattaggggaatccagacaatttcacacagtgagagtctcttcacaggagattctaactatgtcaaattgacatttaaaaacttaccaccagactgtgtgaaaagattttctgagaagagcttttgcttagtgttgggtcttagaaatctgggtgtcggtcaggtgtggcagtgcttgcatttaatcctagcactcaaggcagaggcaagggaatccttgggagtctaaggccagcctggtctacatagctatttccagttctttacatagagagactatagaactacataaggaaggggcagagggagggagggagggggagagagagagagagagagagagagagagagagagagagagagagagagagagagagagagagcgccaatgtcttatcctcttttttttggttcatcccaattggtttcctcttgttttgctttgttgttttgagttgggggggggggtctcactgtgtagcctggcaaaaaagtatcctcctgcctcagcctgcacagtcctaggattgaagccatgagccacagaccgagttctgccctggactctctttgttttgaggattgagcagacatgtgtgtgtgttatggtgttgaccatggacagtgtgggtcacccgggccttgtttcccatcagaagagtgtttgaggccagacagtgggagtgaatggatgaagaggagtcagggtggacaagggagactgggaaagccgaagtctgggctgagggagaggtgggatccggaggttcaggggcaggaagggacatgactaaggccctggcaggtacagtgagacaggaagtggagagggaagctgtggatggcatctgtggatggcatcgcactgcagggtgactgcagggccatggtggttgctcatccctccgcatgcacagaaaaccattgcccaaagccttggtttccacagtcctcatcagctctcaagcccctatcaagagaacatggcacatcgttgtaagtgtaagggaactctgtaaacttcagattatctcaagtgactgacacagctactgcagacatgtgctgtgcatgttttagcttgctttctttctttctttctttcttcctttctttctttctttctttttttttgtgtggtttttcgagacagggtttctctgtgtagcccttgctgtcctggaactcagtctgtagacccaggctagcctggaactcagaaatccgcctgcctctgcctcccaagtgctgggattaaaggcgtgtgccaccactgcccggctgctaccgtactgttatgaatcataatggaaatgtctgcgttttccagtgggcttttgtgggcggttacgacccacaggttgagaacctccggcctagggcatgctggccaaactgtgctaaactgtgctgagttctggtttttaatttgcctcattgggaggatggattagtgagtggggagccaagggagcaggcagaacattgagggaccgctgaagtttcctcagcaacaggtgactagtgtcattgctggtccctgtggtttcttctgcaggggtgccccagcctctgtgctcaaggcacagttctcaccctgcctcccctctgcaggtccatgaagctgacctacaacgaatcaagggtgtttgaaggcattcccacgtatcgcttcacggcccccgatactctgtttgccaacgggtccgtctacccacccaacgaaggcttctgcccatgccgagagtctggcattcagaatgtcagcacctgcaggtttggtgagtgtcctctaagtgttctccacctctaggctgaggtgagagggtggtaccgggattttatctgctgccagcttgctgtcccattaatctctggtctctgcacccatgatgatctcagtgctacagatagggagctaaaggtaactggaaaaaagataacagccaccctgataaatgtcccaccggcacgcgttatccacaagccgtgtcgctccgaagtccgaagggtcctgccccgaggttaagattccatcagtgggcactgcttcttggccaaggagaggagcctgccctcatcctttcctgcttccggaggcaccacattccttggcttgtggtcccttcctttctcaacctagcatccagcttgagactgggtagcgcgttgtggcccaagttagcttcaaacttgcgcatccttcctgcctctgccttcagaggtatcgggatagaaggcatgtacccagacaccagatccccccaaaacactccgttctatgaccacctcctcctcctctatccagcccatagctttcaggaccccagagactgactgggtagaggccactgggataacctggtctgttatcctggtggctctaacttctttgcccactaggacgaggctggaaacattccctgtggccattcacctgctgggagcaaaagctagagtcctgcccttcactcaaactggccacgctcctattgtgtcaaactctcctctttagccaagttgggtgtgaatcttggtactggctgtggccccctggcacatctgctctgtgttctaatcctgggccctaccctgctgctattgctcaagtctgctccgtgcctcacccctcacctggcagtcaggcccaggctgctctaagcacctcccacacagtctttctccttcccacccaccttcttcccgtgtcactcgggtgcccttgctctctcgccagctcgtattgcaccagatgtcaatcaaactcaaatgaaatgcttcctctgatcctgatcagatcctcccagacactctccctgatcttccgtcccctctggctctccagccgctctctggtacactctctcttatgccttcctgttgcctgctcatggctgtcgatgttatttactgaaccctcccctgcttgtctcctccttggactgcaaaccctgtggccatgtcccagtaggatattgggagtcaaacttctaaggcccctacacagacgtgggatccagggcttgcctgcggacaggaagtttcactcacaactgcacctccgccttcccctccttgtaccagcaaaaatcccagggcttggttgaactggtccagctctgacctagtcattaggctgtgttaattggccaggctgggtcccacacaccgcaggggcagcaacaggcccacatcacacagaactctgctgtcaggaacagaatttcagctgtgaaagagaatctaagtgtagttgtgtctgtagcttgttcttttgttttgttttgttttgttttccggagacagtgggtttaagtatgcgtgtgcgtgtcgcacacgcgtggagggaggtataaacaggtgcatcgatggatggagaccggaagtgagtgtcttccttcatcactctttgtttgtttgtttgtttgtttattgatgcagatttttcaatcactaatcctggatcttgggaggtccagggatccacctgtctctgcctcccagttacagatgtggcgctgctgggaacccgaattcgggtcctcacacttgcacaggaggctcttaactgactaaactgttttcccagcccctaaagcttgccccttgtaaatcgggtgagaacaagaaaggggaagaggaacagggattcgagtgatagggaacacggccatgtgaccaacaaccccacaaagaggcaactcttaccacacccaacatctccccttcctgctcctcctgcccactggcctgacttttggtctctcggctctctgcctggcattactgtttacatagatggagtcacaactgttctttctccctcgatccctgatgcctcccatgatggctctcatgattatatggtaaatctgcaagatagcgggtgatagcctagattgttgggtggtgttccatggtggggctaactctgcttgccttactccttcctggctcacggagctttcttttggcatttcaccactacaaggatgcttctagaacattctcgcacctgctgtaggaggagtgcacctgagttcgaatttctgtggcattttatcttaagataaagaatacacataggtttccctttctgggtcacgagactttcttggactcaggactccccgtgtttcctgtccttgtcttgggagcaccttggatcttccctgaagtggtccttaatcaccacgcgggtaatcctgagcagttaagtctggatacacgggccataaagctataaattaattatacttattgcccgggtgcgtctctctgagggtgtttggaaatcaaaagaaaagatgagccacacctattgttagaaagccacgggcatgccacctgcagcaggtctgtgctggcagccttgacatcctgttggaatctgtgcttccaggtctggttaggtgggggcttcatctcccggggatccatggcatccctctgaaagaaatggggttctctctgatctttgctggtgtctcctttcacagtatggttggaaggatgggtagggttttccaagtagaaggcagcatatctcagcgtgactttagaagggtccacagaggtgacgttaggcctcagggattgatcaggtctcttttctgttctgttgtatccttggtgttgtgtttccatgagggcttgaaggccaccctgaggatccttcgcctgtctttctgacaggaccaggtgtgtctctggagcctcgaaggtgctagggttcacctggactctcagtgatccgggttctctgctgcatccctgcccacgtgcacctcctggctaggccatttctctgccaaggctgtcacaggtgcagcactcttgtgtctgacacctgcacttgaagatgcccatagcagccggttcaggggttgggagcaagaggtaggggttgggggcttcaagcagtggatgtcctggagaccagactcggatggaactcagagatccacctgcctctggctcccaattaaagaggtatgctagcctgtctggctttggattttaaagaaatgttttcttttttttaaaaggtttattatttattttatttatgagtacaccatagctgtcttcagacatgccagaagaaggcatcggatccccattacagatggttgtgagccaccatgtgattgctgggaattgaactcaggacctatggaagagcagtcagtgctcttaaccactgagccatctctccagccctgtttgttgtgtttttgagacagagtttctttttgtagtcttagctgtcctggaactcactatgtaggccaggctggcctcaaactcagagatctccttgcctcttcctcctaggtgctgggattcaaggtgtgcaccaccagacccagctaaaacacaatgccccccctgtggatctgttgccctgggagcctcttgtggcctccccagggagactcagaactcggaactccccaggcccttgtcctgagatctctgggttgagccactttggctggttggtggtaaagtcccacctcagggccctgggtgggaatatctcattggtgctgtcccttccattcctgtgatgtcagagacccactcacgtgtacccctgagctacaatgtctccaaaagcagtctgtgtgcctggcttgacattcagactccgcttccactcctaaattcatatggtgttaattttcctttccactttcatctcccatgattccctgctgcacctccagacctggaggggtgggggtggggggttgaaaatcacgtccaagctctcacctcttgctacactcccacccggaatgcctttcccttgccgggtagcagctgctctctcccttcctccacccacccacccacccacccccaacactgtaatcggccactctggctccatccacccttcccaggtcctgtgtgtgctcagcttggtccccagtgttagcatccctgcatccctggcaccgaggcaggccaacgtgacgctcccgtcttctaacgcctctcttcccctcctccaggtgcgcctctgtttctctcccacccccacttttacaacgccgaccctgtgttgtcagaagctgttcttggtctgaaccctaacccaaaggagcattccttgttcctagacatccatccggtaagctccgtgtcctgctagtggctggggcccattcccagagattgccactggccgctgggcacccgccccgctccccccaattccccaggacagagcgggttccaactgaggcaggggagttcagttccttccacagcggctgctcctagaacttcaagtcatcaaagtcttactttaccccaattccagagttcagtgatatcattaccttttttattggggcctataaaaagatataagatagtaaattaattaagacctatcagccgggacgtctccttcaccagagacagatacccttgacagtgtcaagacactaaagacatcatcgtgggccagtgtctcacagagaaatcagggggaggaatttgtcctctgttaacttctctctgcctctggtcactgtaagatgtgtccagtccagggttcctgccctacgtgacgccctgaaggcattccgtgaagaactcttttttgttttactgggtggggatggaagcctgggttttgaacacacaaggccccaggctctgatgccgagctgtgcctgcagctggccttgaacttgcaaatcctcctgcctcggcttccagtgtttcttcacacctggctcatagctgagggttatcgcagaggaagggtgggcacatggggcacagtcgtctgaagtctttcccaggttgtgcctagctccccagcaaggaacttgacatagaggtgttttatatcaggaaagcccctcagaataggggggcctagttgtcgactggggacctgtcctgtgagcctctctccctggggcagatccatgcttcatcccagaggacgaaggtgtttggtattattaactgtctatgcaaatggcacagtgaggccaacacactagcttagagaatggggcaccctcacctcaccccccagaacttaggttccaagaccaacactgggcacctaccctggacgacttctagggagggttgccgggcccacccatggtatgcgtggttatcacatccatgcctctgtccaaaagtcataccaggtttctggaggcctttgccctgggggcaggagggatctgggcgtcctgggcaaaacgtgtcctggccttctactgtgggtgattacaatctgagaggtggcctccggcctcccatcaatctttcaagagtctcatgatctgggcagggctaaaggcatcaaacggtggtctcttttcaccaaccttttccattctagaactttcttcctgatttaaataatacctgtgaattctcctagtgattttttggttgttgttgtttttaattttatgtatgtgagtacactgtcactctcttcagacacaccagaagaggacattggatccaattccagatggttgtaagccaccatgtggtggctgggaattgaactcagcacctctggaagagccgtcagtgctcttaaccgctgagccatctctccagcgagatttttttttaaaagcatcacattttaaaaagagagctgcaagcaggcagctctctgtggctacctctgttagggagcgccaggatgctacatagtgggaaactggctcgattaaacctactcaccctggaccaggcccttcctttggttccctgggctattaggaaatgtaaacaggagaaaaaagacatccttactgcgcatgccccacacttgggaggcactgtcttaggcagcttcgtgagggctgggaggatagcttagtaggtagggtgctcccctgccctgcacagagccctggcttccatcccagcaccatgtaaagttaggcataagccagtcctcagaaggtagagacaggaagatttggagttcaaggtcatccttggctacatagcaaattggagtccaacctggaccacatgaaatctgtccccaaacgaacatgcagatgtggggggcggggggtgtcatccctctggcaacaagtgtctagagaggggatcttgcgatagctgatccctttgggagcaggtatttcctgagggagagcccagtgggtgtgtgggaaatttctagaagggtggatgccccagcaggtattatctggtttaagttggataagaaaccccagggctggagcaggctggagcaggctggagcaggctggagcaggctgggaggctccccacaggatcttacatctcctcactgtatttatgctctaggtcactgggatccccatgaactgttctgtgaagatgcagctgagcctctacatcaaatctgtcaagggcatcgggtgagtggagttgggacgggagcttctgaaagcttcaggggccaggaggtttcatgcattggtgatgcaaggcacaggacagggcgaggcccaagcgttgggatccaaccacctcttttcctgggattgcatcattgctctggatggagactcagacccaggctgcatcctgacactacctccatcctccacgcccaagggctcttctgccattagtcgcattggtaatcttgtctcccccacagtaggatggatttgcctgcttgtatgtctgtgcaccatgtaagtgcaagagccgccgaggccggaagagggcatagggacctggagttagacggagttgtgagccactgaatggatgctgagacttgaacctgggtcctgccagtgttctcaaccacaattccctgggtttactttatgtttagctttgtgtaacgtacagagtgagactgagagtcctcctgcccccattccctgcttgcccggcagaaacatggtggtaggagtccagccttggggctggagagatgtcttagcagttaagagcactgacggctcttccagaggtcctgagttcaattcccagcaaccacatggtggctcacaaccatctctaatgggatctgatgccctcttctggagtgtctgaaaacactaaagtgtacttatgcaaataaaataaataattctttgaacgaaaggacccacatgctggtcactcctcagcatcgcagatcacatgcctgggaaccactgaggaagaggtggactctgggcttcatggtgaaaactaagtccgggaattgctggactcagctaggcttctgtacacacacacaccctgggactcctgcatgccagaaaacactctttcactgaattacatcccagccctcttcactttttaggtctcactagattacccaggctgcccttaatctctctgtagcccatcatggccttgaacatgcgccacttgatctgactcatctgggctcttgaaaccggaggccaaagtgggctggccacgggcttgagttcctgaggtcagcagccaaacattgatttgctccactgcctcaaatactctttagaaatctttatagatttatggagaggtgtcagagacgcaagcaaatctttgttctctgtccccggtgcattcagtactgtccgctcctggcagtatctgtcacggtaaggaaccaaagtctagtgcagcgttattgccacaactgcagcttctcagcacgagatgccgcccgctcacgcctcacgcccggctcccgtggctgtgatgggttgttttgttttgtttttttcttttaatctttgtttcttgttggtgttgtgagttttgggattttgttttggtttttggaggggaaggtggttcatacagaggccaaaagaggatgccatgtgtcctcttttatccctcttccctttcttccctcgcggcaggaattctcaccgaagccccagctagcttctacctgtctcagccctggggtcacaggttcaaagccacacacagcttttagcctgggttcaggggtctcacctcgggttcatttgcttgagcagcaaatgctttccccactgaaccatccccagcacagtgatagtttctcctctagcttttggggtgttaaagtacttgctggacctgggtgtgtgtggtgcgatcaggttcccctgtagatagtaacaggggcagccacccaggctttggtgggaggagactcattattattttattattattggtattattattattattattattattactactactactactactactactactactatttggctttttgagacagggtttctctgtgttaataaccttggctgtcctggaactcactttgtagaccaggttgacctcaaactcacagagatccacctatctctgccttcccaagagctgggattaaaggcattgtgccaccacatacacagatattattatttatttttaaagttgtatttatgtattttatgaatgagtggtctgtctgaatgtacacctgtgagccagaggagggcatcagatgccatgatagatggttgtgagccaccatgtggtggctaggaattgaactcaggaccttttaaccgttgagttatctctctagccccatttttagttgtgtttagtgtgtgtgtgtgtgtgtgtgtgtgtgtgtgtgtgtgtgtgtgtgtataggtgcatgccacaatgaacatgtgaaggttgggacaactttagggagcctgttccaccttctgggtcccggggatggaactcaggtcttcaggcttagcagcaagcactgtcacccactcagctgagccttgccacgccccttaattaattttttgcatcagggtttcctgtagcccaggctagcctcaaacttggctaaggatagtcaactgtacgtagcgttacaggctcccctttatctttctgtctcattttcttgtgaagtggtttcgactgagcgaaggcctttcacatggtaaccagtagctctcccactgacaccccaagccccaaacatagctccattgcgagggtcacatcacccctggtcactcactttgtgtcccatgtttccaggcaaacagggaagatcgagccagtagttctgccgttgctgtggttcgaacaggtgagtctatgaaggtagaagggagtctggggtctctgtatgttagctgaggcttttagttcgctttgatgctaatgttatgttaacttccggtacctaaatttagctatttgtatgtttagcctgcccatatgtatgtatgtatggttatcatgtgagtgcccggtacccgcagaagcccagagagcatcaggtctcctagaactggaattacagatggttgtgagccgtcaagtctgaaacgtgggctctcttgaagagcagccagcgctcttaaccacagagccatttccaggttttgttaatggcccctgagaggggggagtggagatggaattccgcaccaggccaccctgcaggcatcctgatctcgtcgcccttcaggtcctaagactagattctaaccagcgaaagagatgactgttaggcgaggaggcttggggccagatccacctcccattagccagtgcctcatttcatgggcgtgccaacagcaagggcgtctgggaaatgtagttctctttggacttctagccaaagcgcccgaggctctctgttctgatttggggcggggcacggcacagtgggatgggtgccttggagacgcagcgtgcagcccgacctttcttctgcagagcggagcaatgggtggcaagcccctgagcacgttctacacgcagctggtgctgatgccccaggttcttcactacgcgcagtatgtgctgctggggcttggaggcctcctgttgctggtgcccatcatctgccaactgcgcagccaggtaagtaggaggggcggccacgcctcggactcggctcgggtttcagccgacctctgtttcctgcagctagctcttgttctacctcctctctcgcaccctgcagtaacttttctctacaagtcctggaaggcccaggaccctcccaggtcggggctaggctgaggctaggtacccagtcatttggccaacaagtgggtgccacttggtgcccgctctggaaagtgcctgccgaaggtagaggtggggggtcagggctgggctggttagagaagcaaaggaaagccaggttaaaccaaacagagaagatagtttttcccaaggaaaatgctctgggctggagttgggtgtgagatggaagtgggaggagccacgtgtggaaccatgaacttagattttctaagtccagagaaaaaagtgaaagaaattagttataaattttgcttgacccaaatatatcagcatatgaggctgaagttttacatcagccatagagcacttgtttagccagtgtgaggccttgtattcaggcctcagcgctgacaggaaaaaaaaataatcaaaaataatgaaaatatttaaaaaagaagaagaaaagaaaagaaggtctggagagatagctcagtgattatgagcacttactgcttgcagggacccaggttcgattcccagcacctacctggtgttctgcaaccaactgtaacccttgttctgtaaccctagttctgtaaccctagttccaggtgatctcaaggcacacacacagtgcatatacttgcatggagaacactcatacacataaactaatacaggtgcctataatcccagcactcaggaaggaaggaggccaggggagaaggatccggttcaaaatcatccctggttacatgtagggtttgatcaaggccagcctaggatacgtgacatcttgtctccgaaaatcaattaaacttcaaaaaaagaatagtgtgggcgactggagagatggctcagcagttaagagcactggctgctcttccagaggtcctgagttcaagtctcagcaaccacatggtggctcacaaccatctgtaatgggatccgatgcctgcagagcaacagtgtacttgtatacataacataaataaataaatcttaaaagacaagaatagggctggtgagatggctcagtgggtaagagcacccgactgctcttccaaaggtcaggagttcaaatcccagcaaccacatggtggctcacaactatccgtaacgagatctgactccctcttctggagtgtctgaggacagttacagtgtacttacaataaataaataaataaataaataaataaataaataaatctttaaaaaaaaactttaaaaagaaaaagacaagaatagtgtggttcagacaggggtaggggtcacttccataaagaaaggatgactgaggaatgtaacatcagggcatgcagcccctgaaagcaggaagcaaaggggtcatgactagaaccttcgttcccttctggcctcaggagtaccggctcgtgcatgagatcttggggttacgacattggtcaagtcccctggggtgcttgctgatagctgtagttgtgaagcagggaatttgaggacaggactgtgatcagctgtgattcaagagggctgctgtctgcaaacaggggagccactggccacctttgaacactcgtacaagagccactcacagggtcccacctgagatgtcctggggccacaggctgggctttctgtgcgtgcttggtgtgtgtgttgggggggtcttcccacctgctctcctgcagtcagccagctggctgcctttcttctttaaggcttgcttgcttgcttgcttgcttgcttgcttgcttgcttgcttgctttgggaagaacggatccctgtggagtccccagcacccggcttccctttccaaacacaggccccaagtctcttgtcatcaccaaggggtgtctggttgcctctggctctccatgttgactgtagctatgaggatctggaggacatcacggtctgggcttccgggctggtgttcctccctgctgctgcccagtgagaactgagccaggctttttcagtcaaccattggaggagagaccccaaaatagaaggcaggcgtctcgctggggtctgggggcaaggttgtttgtcctgcgggtttcatcagagagaggccaaagaagccttgtcctgacaaagctaggcctcacctgtgtgttcctgtccttgagcatctgggggcgggggggttaactgcttgctggtaaagaacatactcagtcatacgccattcataaatcaagagtatgttaatgtttccctcagattgacaaataccatggacttggagaagaggttaagagagagattgtacccagtaggctccaggccctaggttcaaatccagccccaccagaccagaccagagaaattcaaacactcagcaggccagtcccgctgtggccacctccgccactctcttcctgtcggtgactttctgcttgccggacttccggggcgcttcgcccacagtgcagggtggaacaagactctgcaatcttgttctcttctgtccctttgcttctggggggacccagcgtcaccccagtgacacggcatgccatataaactagcttggttgtcttccaggagaaatgctttttgttttggagtggtagtaaaaagggctcccaggataaggaggccattcaggcctactctgagtccctgatgtcaccagctgccaagggcacggtgctgcaagaagccaagctataggtgcgtaccaggtaaccccccctcttcaccccacctactcatagccagtagacctaccgtctctacctatagcatcttcctggatgttattcacatggagagcagttaccctcctgcctctcaccctcctgcgagatgggaatcttgcctcggtttcttggaccctttcagtcattgactctcatttacaaagtcctgttagaagatgacagttagggctggtgagatggctcagtgggtaagagcacccgactgctcttccaaaggtccggagttcaaatcccagcaaccacatggtggctcacaaccatccgtaacgagatctgacgctctcttctggagtgtctgaagacagctacagagtacttacatataataaataaataaataaatctttaaaaaaaaaaaaagaagatgacagttaggccagttgcttctcagtgtcctatcccctgcaggttgctaaatacaggtccctgggcatcccggaaagccaagagactctcctagcccaaaaggtttgaaaactttttttttttttggacttcaagggcatgtaaaaggacacactgactccagttcagaatagagagactgaaaatgaagacgtttaaacatcagttaagcaccagctacatactcagtcagggcctgaggatagaatttcatggtcaagtacacagggtgtgcgacagactgctcaatacagtctgaatttagatggagtcgtgtgtccgccctgtgctttgctgcgatgggtggtccaggtggtgagccaccgagtcaggtatagctggcgtcctggtttacttagtagccatctcgcaaggatccaggaccgtacttctccaagatctccaggtcctgtagggatcaaggctcaggagagaggctgagccctacagggtgtgtccctgcctgggaagggactggaagagctgtggtccctgcaatttggggttagcagaggtgagtgagtgtctcaatagaagctgctattttagcttgtgagccaacttgggtgtgagcactttcttggagggagctgggggtggggggtggaggcggggcttgggggggcggggaggggaggccacagctcagctcctggaggccagctgactatttgctgcaatgtcatttgcttgagaagcaaataaggcagaactctggtgactgtgtgattgtcctggtgagtgccacctccctggaggaggaagaagctctgcagctcagtgggtccccatatgtccctggagctgagaaagggtcctgccaggaagaggtggggagatggttagtgtctgccagtcatggtgatgtttgggtattgccagagtgcgaggggacaaatgtaggctccgagcagaggctccgcagtccctttagcccagatggagcccataggtacacagccatagccctgtccagaccctaatagaatgaacaagattgggcttacctctttactttcccagcttggtctaatcctcgtttggcttcaagattcccctgggtgccccctagtcctggccatgtgctagggagggcagtgtcctctgaggatcagctacagcacatgggtccttgcatagggacctcaccctcccccccccgaccccccagtgcctggctaagtgaaattcggtggggccccacactctgccatgcacctgggtgtgggggtggtccctagaggctgctgctgattgctatagaatggaaacagacgtgccgctagaccaaagggtattattatatgaataacgtccctctgggtggatgggcatttctgtaaggcaagggggttgggggttggcaggcagggttggctgtccggccagctgctgtgaacacagtagcctttaagaaaatgacctgatcctctgcttctttttggtctgtctctcattctgaattctcctctgtcagacacagtacagggaggagccaggacagaggaggggaaatctgcccacccgccctggctgcccagagccttgtggctttgtgtgtgttttcatgggagagaccaagctacagagttaactcttgctttattctctggcaacaagggcgttctgggccactcacgctggcttcgaacttgtggacatcctcctgcctctgtctcccgagtgcggagattccaagcatgcaccactactgtgccttgtgtccccttccccattttacttctgttttggttttggttttgtgttttgttgttttcgttttttgggttttggttttgggtttttgagacagggtttctctgtgtagccctggctgtcctggaactcactctatagaccaggctggcctcgaactcagaaatctgcctgcctctgcctcccaagtgctgggattaaaggcgtgcgccaccactgtccggccttttacttctgtttttttgtctgtccatttgtctgtctgtctgtgtgtggtgaagccagggccttttgcttagtgtagtccacctctgagcttcaccccagcacttcctgttttacttctgagtgagactatctggaatgctggggtgctgtgtcgggggtggaggagtgggatggggggtgctcgttggctttgatccaaagagaagacgcctccctgcagtttccttccctgccactagggggatcggtatgggggttgcagggcaggggtgcccagtgttcttaaacccggccttccattcattttcctaagttgggaagtcttttcaagtcagagtctcccaacttaccaagccatcctttcctgttctgcaccctttgcccaacatcctactgtccctaaggcccgaggccaccattacagcagtctggtgagagtgtgtctctcttacctctatgaacaagagccagttttaatagctgttcctggcccgtcaggtgacagcattttaaacatgtgggcagacatttaagccattcctagtttctttgtgcggcggtgttatctacccactccggactctgcccccttcactgtaacaggccagtctccctggcctcagttttcccatctctaaagggagaggttggaaccaagagacctacatgactgaggagtccccgtgtctatagagtggcatctctgggttcatggcagacagggctggatgtgtcaggaagtggtttctgtgctggtgggatgtgcggtgggactaggggaggtaggcagggcagggctaggtgacaggcttgtgactcagcttccttttttctccacagggtcctgaagacactataagccccccaaacctgatagcttggtcagaccagccacccagtccctacaccccgcttcttgaggactctctcagcggacagcccaccagtgccatggcctgagcccccagatgtcacacctgtccgcacgcacggcacatggatgcccacgcatgtgcaaaaacaactcagggaccagggacagacctgctgccaagtgagcctgatgggccacaggtgtgctcttctaaatggcctgtgagccaggctgtgggaactctagctgctgtcagcccctcctgtaggagctggccctgcccaggctcctgacttccctcaggaagtctttctgtctttctccatcagtctgaaagccttagttcccacagaggacggatctgtcactcctaggggctgggcatatgtcggcctcttgtgccaaggccaggcaagcagctccaggtcctgaccagtttgcacacacactctggagctgtatctggcgctttttctatcgtctctgctatgtcactgaattaaccactgtacgtggcagaggtggcaggcccctcagggtccttatttttcaggcatggggtcaaagctagaggtatgggccgtctacacccccccgccccccggcatctagtgtacctcaccagagggtattcggaggcccagcatcctgcaaccgaccccttttttctactggaagagaaattttatcatcttttgaaaggaagtcatgactgaagcaataaaccttttcactgattcaacaacactggcttctgtgactgttttctgggcagggctgggtctccagaatccaggccacatcagtaggtgttcccatgactgccagcgagtctcctggtgtgaggccagcaccggccactagccatgtttccacctcaaggctaatgtggtatgtggcttggatgcaccaggacaggctagctctgtcctttctctgtcccgtggaaccttctgggccttccagcagtctgtgtccaagatcagaacatccttgtgaccccaagtgacaagcctgcagcgtctgggggagggctggaagggagggtctaacttttgtcccaagttcaagcaggggttctacctggcatctctgagagtaaaaccatgttttgcccttaagggacccactaggaactgggcaatagattttcactgtgaacattaaaaactacatagccgggctggagaggtggctcagtggttaagagcaccgactgctcttccaaaggtcctgagttcaattcccagcaaccacgcgatgactaacaaccatctaatgggatctgatgccctcttctggtgtgtttctgaagacagctacagtgtactcatataaaatgaataaataattaaaaaaaaaactacatagacactcactcggtggttgtaatggtcttcacccttccctttcttagaaaagaatttgaattattgtgtgtgggtccatgccatggcataagtcagagggtgagctctaagagttggttcttttctcaccatgtgggtcccgggcatcgaactcaggtccccaagtttggcagcaagctcctctagctgcggagccatctcgctggccttgcacttccttaatgagcactgttctctacctgccctggaagcattgaaagtttcctacctcatactataaactgcattataatcgtgagacataaacttctatataaggcaaacatttttagtcttgtaagacggggtctagctttgtaggccaagctgggctggacctcatcatccgcttgccttctgctcctaatgctggggtgacaggcacaccctcaccatagccagatttctttttttccaagacaggatttctctgtgtatccttagctgtcttggaactcactctgtaggccaggctggccttgaactcacaaacccacctgcctctgcctccgcctccgcctccgcctccaagtgctgggattaaaggtgtgcaccactaggctcagattgtattatttctaggactgagaataaccagcctttctgggctacccaggttggttgtaaacttctgggctcaaggaatcctctggtcttagccttctgcgtggctgggaccagagacctctgtacctgggttcctgtgactttcctgagctagtgtctgcgcctgcttctactgcacacagacagaggacagggcgactcagaggcagacattcctgctccagagtctggaggcccaagagggttggggcaggctggctggggctctggggacgatcctcccctgccctgcaggtgcctgtgccctacttggcttttatgggtgtgtggaaactcaaccctggcccggggcctccccccaccttaatcatttcttagtgtttccccgcaaacagagccccatgggatcagatcaggtcttctttcactgggtctgagactaaacacactcagccagtaacagtgacgtcccattccactctcgtcactaagtcctgtgcaacttcatcagcccgtcatgttttgctgacagcagacactgtctcagctgaccttttctaccacacgtatttttttaaaagataaatatttatttattattatatgtaagtacactgttgctgtcttcagacacaccagaagagggcgtcagatctcattacagatggttgtgagccaccatgaggttgctgggatttgaactcaggaccttcagaagagcagtcagtgctcttacccactgagccatctctccagtccctgccacacatagtttacgtagtttccttgcactcagagttggcaaatgcatgcgcttctgtgagtttgaatgcatggtcctatctgagcacccgctgctccaagtgtgtacacagaacagggactggagctggggtcaatggcaggctagtcacctaatgtgcaaggagctttgggttggagccccagcatcaaatgaactgggggcaaaagtgtgagggagaggcaggaagatcagaagttcaaggtcatcttgctctacacagtgagttcaaaaccagcctggggctacataagacctggatgaagaaggagaaggaggaggaggaggagggggaggaggaggctgatttggtagcaaaaacctttaatcccaccactcagaaggcagaggatctatgagtttgaagctaacctggtttatacagtaaggtacagccagctaggactatgtagtgggattctgtggaaggaagagggagagggggagggggaggggaggggtggggaggagggggagggggaggaggaggagggggaggaggaggaggaggaggaggaggaggaggaggcagaggcagcagcccggtggtggtcatactcttttaatcccagtcttgggaggcagaggcaggtggatctcttgagttcaaggccagcctgacctacagagttccaggatggcccaggttacacagagaagccctgtctcagaaacaaaacaacaggggctggcaagatggctcagcggttaagagctgaggtcctgagttcaaagcaagcagaggtcctaaattgaattcccagcaaccacatgatggctcacctgaacagctacagtgtactcatatacattaaataaattaatttaatcaaataaacaaaacaacaagaagaagctaaacttggggttcagattccacttccccagcgctacctcccccctttatctacacactgaccttcctctcagtgtgtaacatttggcagccggcaagctttgtctgttccagatattctcagaaagaaccaggcagtggggagcctgtccagttggctgcaggggctcctccctgctgagtagcgtgcagggatcggatggctgccactggttgtcagtcatctgggatatttttaccctgtgggctgacacgcccactgatctctctccacatttatagtaacccgcttgcaaaagctggttgctcaatctgcagccttctgggaaccaatgtggaaaggttccccgaccggtgtgtgtatgtttgtgtgtgtgtgtgtgtgtgtgtgtaagagaggtctgtgctgtgcggaggccccaaagccccaaaagtctagacctaggaaacagctgcttacagcaccccctgctggatcttggggaaggatcctttttggtttggtttggcctgcctcagtgtgtgtgtgtgtgtgtgtgtgtgtgtgtgtgtgtccagagatcctcttcttcaccctccctctcctctccaggctgggattacaaacacaaatgatcatgatgcctggctttcttatgatattaggacttgaactcaggtctttctgcccattttcccgttatttactgagctatctcttcagcccctcctttttgtttttgttgttgttgtttgttttgttttgttttttgaggcaggattcctctgtgtaacctggccgtcttggaactcatactgtagaccaggctggccttgaagtcagagatctgcctcctgaggaattaaaggcattgcccacatctgacttcaagaattaaattatcaaagaggaagccatgtgtctgtgagattctggacttgtctggccagtgatattctatgaaacccatgtgacacatggcccttagtcctgcaggcccttcagtgtcccatcactcctagttcttggaggatgctctctgtaccctgtcaccacctcctatgctgccagtggagggtgtgtcacctctgatcatctccagcctcaactaggcctcactttcatcagcccctctaccatagctctatcctagcctcctctgggaagcccccctatgatggtaaattataactgtcaacttgacacagcatggaatcactcaagaagaaaggctgagggagagaatccctcagagagagattgtgcatgggggcccatgtgtgggtatttgccttgatcattaattgaagtgggaagactcactctcagtgtggggcagcaccattccctaggccccgtcctgacctgtgtaagagtgaagaaagctagttaagcatgagccagcaggcagcatgagtgtgtccatttcctctctgctcctgactgtggatgcgatgtgactcactaccggagttcctgtcaggaatggtgacctcaaactgtaagtgaaatgtcccttgtttctctgtggtgctgtcaccaccgcaatagaaatgacactaggacacccccccccataactgctccctcaagcttccctcctcaacacccctggagtgcttttgtaccccagtcaatgccaggtcgctttggaatagttgagatcctaactctggttgttggagcatgtacacacacacacacacacacacacacacacacacacacacacacacacacacaccaggcctggcattgtgatggacactctggtctgtgacccagaagcatgtccaacttcacaggaaatatctgcccaacgcctgctgcatgcttggcaccagggtcctggggtggggtgcaggtggaggcgcccaaccgacgcccttcctcccagatggctttgctatcctgctgcttcttgcaaggggcatggccgaatcacagaccttagcaacccccacccatttaagacaatacacctgagagaggcagagacaggggcttcaggaattcaaggaataaatgagctagatagcaaggtagaggccagcctgggctacatgagactcttgtcagacaaaccaaaatgaagccggaggattataagttttggaacagcctgggctgaaggtgaagccctaactcaggaaaaaaaaaaaaaaaaaaaaaaaaaaaagcaatgagcaaaagccagagtctctgcagggggcggagcagccaaggaggtggggggaacctctgtattcatgttcactccactgtcctgctttgatctgtccctgggacatttggactgtctgacaggccgttcctggctctcacatgcagcctgggccttctgttcttcccgtaactacccaggagtctttctgagatatcatcgaccacagcttgtcctttaagcacgccctttaagcttttcccaactctgaagacaacgccctcaatcctcatcctgtgcctagaggaccgacttctgggtaattccagtattgaccactagagggcggtttgcacacgtcggatgcccagtggcgcctttaagggctggccagtgtcccgttattcttgggatgtgtcaaatccgactttaactgttcacgggctggtttgggaatggctaaccttgagcaattttattttgtgagtgttccagagagcctctcccacaccagaaaaatgtctttcttaatctttagcatttgaaaaggtcttaacactaagtggcttgctaaggagccctaagctaaaacccaggtctcatgattaagattctgaaccatgaacaacagccatctgtgctgctaacctctgtcccacttgctgggctgccttggagcaattccctacatctctgagcttgccttgccattggcagctcatggaagggagcgaatattagattactgccatgcaaaacctctggcagcctctatgacgctagaacaggagatgcatggcggtgcagaactcaacagggtgaggcaggacaaccatgacattgaggccaacctgtattacatagcaattacttatttacaaaataaataagaaataaaagtgggtgtgtgcgcaatctctccggagatgggactacaataaaaacgcttggatgcccagctcccagaaagcaactattaggcacctgctatatgcggagcactttccaccctgagaaggtgcttaggttctctcattcagcaagtgtccgggtggccaccatgtgcctaatgcccttctgtgtgttgggatcgtgttgggctgggttccctagaaggagaatgggaggcagaggctggtggctaagggatgtccccgggtagagagaataagcctagtagtcaagggcagctgtgcagtaaaggctgtctatgggacagaagtataacaaccaggagcggggagcagcttgaagcagctgcaggtacagagaacggccaccaggggtcgctgtggttccagtcactagagcagagcgcctggccacagacaaaacccgcagctactccaggcttctgtggcagttttaaaaccaaggaacatctactttttgaggctctagacacgttaagcgtgaaaagcaaacaaacaaacaaatgtaacaaacccaggctgcttaagatacactgttgaatatgtttgtatttaaaaggctatccccactttttctctctctgactcttttctctcccctccccaccccactctctccacatgttcctgccggcctcttcccttccccatcctcccttctcaatcccccttcacatgcccctcttcccatgcccccaaataaactctatattatatatatatttttaaaggctatcttcagttcccatattcagatgccttgtcgtgttgccaagccatggagcttgcagacaatgtctatggaaatagcaacagttctttagcccaggaagccaggcacagggttggggcgttcatatgcatctccaaagtaggtccggggttcagtttgcacagctgtctttgggataattatgaaacggttattgggatctatgtccttgggaactatgaaatggcagatcctgggggctggagaaacagctcagacgtgaagaccactttggtgttcttgcagaagactgcagttcagttcccagtacacatatcggctcacagacacctgtaactgcagaaccagggtggtctggcgctctcttctggcctttatgggtattgcacacatgtgtgcacacattcacagataggcagacacatacgcatacacataatttttaaaataaaatcaaaatggcaggttccggccactacctacccagcgaagaccaaagctgggctctggcttctacatccctaagatgttgtcattacttgaatatttgctgtgtactagacagatggtaccacgttgaccatttgtgttcagtatttgtgacctgagagagtgctgatgtcatcattccctcgtttttacaatgaggaggctgaggcacagagagatgacggttgatagggaaacaggtttgcaccgcagcggctaggccagctcatgagtgctgcccactgttcctctctgtgcagcacccaaggactgcccgctgtgctggtgaccccagaaagagcatctcaacccaggtcaggaagtgtgaccagtgccaagggaccccgggaggcctagggaggaagggaggtcacgggctcaggccccaaactgcatctgtctagaacagagattctgaaccttcctaatgctatggccctttaatacagtcccttaagttatagcgacccccagccacaaagttatctttgatggcacttcagaactgtaattttgctgctgttatgaatcacaatggaaatactttcggagatagagctttgccaaaggggtctcaacccacaggttgagaaccgctggtctagaaggagccccatttatctggccaggctgctttggtgagggtctcagttcaggattgtccccagacaggtggcacacactgggtgaaacgaggaagagtcacatgtctaaaaatagtgcctgtctcccagagcctgtctgtcacaggacagagtggagcagctaggaggtgggaaggattctctggaatttgggggttaggtatacaggttcaggggagctgccccactctgaggtttggcagtgagctgggctggagagctgaggtactggggctacacgtggcaccattctggagtcaggtttacgccatccagtgctgtgcttttgcaggaagcatcttctatgtaggaagtggaaggagctttgtgatgtgatacccatttctctcatctactcccttaggacatgggtctccacccccaatctgcccctcttccaccaccctgcttttaccctgccctgagaccacatcgcccgccacagacagataggaaaggctttatgtggagaaggacttgtaagctgatacacacagcacacacagtgctccctctggtctccctctgtggctatggctaccatctgccctctgctgggccacaggaatgtcttctgttggaggggcagggactccgtcacgggcctctctgacccagctttgtatggctcttggccctgtggtctcagactgtgggcagcagctgtttgggggcaggacatggtttcctcctgacatcagctttggcaagggagcaggcaggggtgggaggccagccctgtggcagcaggctggatgcattgtagctccctgggcaaggctctatgaccataccgtgcccacgtataattcacaggaaagccacttcctgccccacccactccaaggtccagatgagggtgggcgagagggattttggatggacatttcgctcatggcaattggaaatggttttcagatgtatcacggaatgtggaacaaacccaggcaaacttccctgcaatcctataaatcaccagcagatggcgctattggccacacgacaggattctggcatcctggattgctcagtggtagaacttgaacctgggactgaagtagaaactctcaggccataggcttacacactgcaggtggtttacagcaggcagatgggaaaggcatgcctggcccagacgctggccagaaagggtagctgcaagaagcaaatgaggtacctccttcctaccagtacctactattcagagaggcatgttggtctctgagttcaagcctggactacgatccctcacagaattaatttcctggaagaaaaaaaaaaatcaatgcttgtccctcggtgccagacattaaagtcctcaggattggcggtggcgggctgttttgacagggatgagaatggagacacccaagagactgctggaagctcagtcaaaatgcctcatttcctgacacccgcgtcgctgagcacactgtcattgagtcaggacacgcagccacccgcccctgcagccattcatccctccccacccccaccctcccacatttcatttgcgagcccctcggtgtgcagctcggctcgtggcggctgcggcggcagagcagaaaccccaaatgatctatttatggggccgtccttccgtgttgcttgcatattgtaattaagagataatgtcagtggaatagaacgttgtcacccagtaacggcctcccgccgcctcggaaatgtcacggcaaagtcacagatatatcaagcgtaaaactgacgtttgttttcagagcagggaacgcggatcctgggacagcgatacagctgcggcttcatttctgtcttgggggtgatgaatgccagtggatggtcgggcccacaggaggaggggttcttgtctgttgcggagaccaactgggcctgtgctttgcttgacagatggaggataaggctgccctctgggtcccataatctgctgtagccaccaaggtggcccgggtgccctggctcccggctgggcagtgtgttttctgcagcccaagctggctgccagctggccgggttccccttcctgtcaccatgttgtctctggagagctaagctgctgctggggtggcatgtccttggacaacctcagtttccgagtcactcccccagagccacaagggccttaggaggaggacagcagtgactttgtgactggggtgtctacactgtggagtggcctggtgggaccactcccctggctgatggtgtatctgacatagcccagcccccaacacatttatttatttatttatttatttatttatttatcatatgtgagtatactgtagctgttgtcagacactccagaagagggcgtcagatctcctgatggatggatggttgggagccaccatgtggttaccgggatttgaactcaggacctttggaagaacagtcagtgctcttacccgctgagccatctctccaaccctccccattgtccacacccttgcacatcaacctgctagctctgtccccacagcccctgccagtcagaccttcaacccatccctttttcttgggacatccatccatttccccatacaccccctccaggctggcctccctgattctactgtggccactcctcttaagcacccatgaaaagtctccccaaaagactcaaccccgggctctcctacctccaagcctctgtcctaatccctgccatagtcgtcgtgactccccctacccccactcccactcctctccctcctcttttgcactgctgggtatggaacctagggccttgtgcatgctaggtaaccactctgcccgtgatggacccatggggaccaggctggtggcggagcagagcacagagtgattgcttcctgggtgtatgttggaatagctggatgaaggaacggcggacagtgacaactgtataatctgtgtctgtcactgactggcaagcggcgccatagaacaagttgcctcagatcccagtgaccgagatatatttagctcctgcttctgcaggccagcgagggaggctgggattgcccagagggttctctgtctcagatggcatcaagcataggtcctcagagtgctctgaggccagatgcaccttattaaagggggactaagtgtttaccagcctgagggctttcaacggtcatgatcctgatacacaccgggctgggggggtgggggtggggtcagctccatagtgcgagcagacttaaactgtaagcattaagtggctcctgccactgagtctcccgtctggtacttaccaagcagctgccctgggccctgccatgggtactgggaagagcatgcagtgtacagagcagccatgttcccatgaggtcacatttgagcaaggaggaccgccttatggtgtagtctaggtgtgtggtatgcatacccagtggctacattcttgcccagttcaggtattgactgagtcaacataagagtggtcacagggcttgggggatggctcagcagtggcagcctgctatggacccaactcttcacccataacatggtgagcttcccaccccattatctaggggtacagtctggatataggagcaatgagtgctatgtttgtgtggtccttaagagaccctgtatagtctcacctgtgcaacatacacaccatgggcccatgcacatatccttgggggatgagaggcaggcgacaaagccagcctggccagagagagatggtgatggtgatggtgatggtgatggtgatgatgatgaggaatggttcaggccactacgtgtggggctcttttgttatgcagcactttgagggagtagctgactgatacagcctgtggcttggtaaatgctctcagtggtcccattttacagtgaagagatctgtggcctaaatccatgagaaaggtgaccaaaagccctcaggtggaacccagccacactgacagggctctgacccaggcaaggccccaagcctaccccatgactggatacagggtgccacctcctcacacccatacactaaaagtggaagagagaggccatccagccttgttttaagggtcctgaaacaatgctgtgttcatctgcccagccactaagggacctcatatagtctccacctgcatcatagtgcacaggacacatacactccggcctcagagcttgtctgagggatgagaagctggtagagatgggggttggagggggga

SEQ ID NO: 106 - DNA, 88008 bp, Mus musculus
tcccccctccaacccccatctctaccagcttctcatccctcagacaagctctgaggccggagtgtatgtgtcctgtgcactatgatgcaggtggagactatatgaggtcccttagtggctgggcagatgaacacagcattgtttcaggacccttaaaacaaggctggatggcctctctcttccacttttagtgtatgggtgtgaggaggtggcaccctgtatccagtcatggggtaggcttggggccttgcctgggtcagagccctgtcagtgtggctgggttccacctgagggcttttggtcacctttctcatggatttaggccacagatctcttcactgtaaaatgggaccactgagagcatttaccaagccacaggctgtatcagtcagctactccctcaaagtgctgcataacaaaagagccccacacgtagtggcctgaaccattcctcatcatcatcaccatcaccatcaccatcaccatcaccatctctctctggccaggctggctttgtcgcctgcctctcatcccccaaggatatgtgcatgggcccatggtgtgtatgttgcacaggtgagactatacagggtctcttaaggaccacacaaacatagcactcattgctcctatatccagactgtacccctagataatggggtgggaagctcaccatgttatgggtgaagagttgggtccatagcaggctgccactgctgagccatcccccaagccctgtgaccactcttatgttgactcagtcaatacctgaactgggcaagaatgtagccactgggtatgcataccacacacctagactacaccataaggcggtcctccttgctcaaatgtgacctcatgggaacatggctgctctgtacactgcatgctcttcccagtacccatggcagggcccagggcagctgcttggtaagtaccagacgggagactcagtggcaggagccacttaatgcttacagtttaagtctgctcgcactatggagctgaccccacccccacccccccagcccggtgtgtatcaggatcatgaccgttgaaagccctcaggctggtaaacacttagtccccctttaataaggtgcatctggcctcagagcactctgaggacctatgcttgatgccatctgagacagagaaccctctgggcaatcccagcctccctcgctggcctgcagaagcaggagctaaatatatctcggtcactgggatctgaggcaacttgttctatggcgccgcttgccagtcagtgacagacacagattatacagttgtcactgtccgccgttccttcatccagctattccaacatacacccaggaagcaatcactctgtgctctgctccgccaccagcctggtccccatgggtccatcacgggcagagtggttacctagcatgcacaaggccctaggttccatacccagcagtgcaaaagaggagggagaggagtgggagtgggggtagggggagtcacgacgactatggcagggattaggacagaggcttggaggtaggagagcccggggttgagtcttttggggagacttttcatgggtgcttaagaggagtggccacagtagaatcagggaggccagcctggagggggtgtatggggaaatggatggatgtcccaagaaaaagggatgggttgaaggtctgactggcaggggctgtggggacagagctagcaggttgatgtgcaagggtgtggacaatggggagggttggagagatggctcagcgggtaagagcactgactgttcttccaaaggtcctgagttcaaatcccggtaaccacatggtggctcccaaccatccatccatcaggagatctgacgccctcttctggagtgtctgacaacagctacagtatactcacatatgataaataaataaataaataaataaataaataaatgtgttgggggctgggctatgtcagatacaccatcagccaggggagtggtcccaccaggccactccacagtgtagacaccccagtcacaaagtcactgctgtcctcctcctaaggcccttgtggctctgggggagtgactcggaaactgaggttgtccaaggacatgccaccccagcagcagcttagctctccagagacaacatggtgacaggaaggggaacccggccagctggcagccagcttgggctgcagaaaacacactgcccagccgggagccagggcacccgggccaccttggtggctacagcagattatgggacccagagggcagccttatcctccatctgtcaagcaaagcacaggcccagttggtctccgcaacagacaagaacccctcctcctgtgggcccgaccatccactggcattcatcacccccaagacagaaatgaagccgcagctgtatcgctgtcccaggatccgcgttccctgctctgaaaacaaacgtcagttttacgcttgatatatctgtgactttgccgtgacatttccgaggcggcgggaggccgttactgggtgacaacgttctattccactgacattatctcttaattacaatatgcaagcaacacggaaggacggccccataaatagatcatttggggtttctgctctgccgccgcagccgccacgagccgagctgcacaccgaggggctcgcaaatgaaatgtgggagggtgggggtggggagggatgaatggctgcaggggcgggtggctgcgtgtcctgactcaatgacagtgtgctcagcgacgcgggtgtcaggaaatgaggcattttgactgagcttccagcagtctcttgggtgtctccattctcatccctgtcaaaacagcccgccaccgccaatcctgaggactttaatgtctggcaccgagggacaagcattgatttttttttttcttccaggaaattaattctgtgagggatcgtagtccaggcttgaactcagagaccaacatgcctctctgaatagtaggtactggtaggaaggaggtacctcatttgcttcttgcagctaccctttctggccagcgtctgggccaggcatgcctttcccatctgcctgctgtaaaccacctgcagtgtgtaagcctatggcctgagagtttctacttcagtcccaggttcaagttctaccactgagcaatccaggatgccagaatcctgtcgtgtggccaatagcgccatctgctggtgatttataggattgcagggaagtttgcctgggtttgttccacattccgtgatacatctgaaaaccatttccaattgccatgagcgaaatgtccatccaaaatccctctcgcccaccctcatctggaccttggagtgggtggggcaggaagtggctttcctgtgaattatacgtgggcacggtatggtcatagagccttgcccagggagctacaatgcatccagcctgctgccacagggctggcctcccacccctgcctgctcccttgccaaagctgatgtcaggaggaaaccatgtcctgcccccaaacagctgctgcccacagtctgagaccacagggccaagagccatacaaagctgggtcagagaggcccgtgacggagtccctgcccctccaacagaagacattcctgtggcccagcagagggcagatggtagccatagccacagagggagaccagagggagcactgtgtgtgctgtgtgtatcagcttacaagtccttctccacataaagcctttcctatctgtctgtggcgggcgatgtggtctcagggcagggtaaaagcagggtggtggaagaggggcagattgggggtggagacccatgtcctaagggagtagatgagagaaatgggtatcacatcacaaagctccttccacttcctacatagaagatgcttcctgcaaaagcacagcactggatggcgtaaacctgactccagaatggtgccacgtgtagccccagtacctcagctctccagcccagctcactgccaaacctcagagtggggcagctcccctgaacctgtatacctaacccccaaattccagagaatccttcccacctcctagctgctccactctgtcctgtgacagacaggctctgggagacaggcactatttttagacatgtgactcttcctcgtttcacccagtgtgtgccacctgtctggggacaatcctgaactgagaccctcaccaaagcagcctggccagataaatggggctccttctagaccagcggttctcaacctgtgggttgagacccctttggcaaagctctatctccgaaagtatttccattgtgattcataacagcagcaaaattacagttctgaagtgccatcaaagataactttgtggctgggggtcgctataacttaagggactgtattaaagggccatagcattaggaaggttcagaatctctgttctagacagatgcagtttggggcctgagcccgtgacctcccttcctccctaggcctcccggggtcccttggcactggtcacacttcctgacctgggttgagatgctctttctggggtcaccagcacagcgggcagtccttgggtgctgcacagagaggaacagtgggcagcactcatgagctggcctagccgctgcggtgcaaacctgtttccctatcaaccgtcatctctctgtgcctcagcctcctcattgtaaaaacgagggaatgatgacatcagcactctctcaggtcacaaatactgaacacaaatggtcaacgtggtaccatctgtctagtacacagcaaatattcaagtaatgacaacatcttagggatgtagaagccagagcccagctttggtcttcgctgggtaggtagtggccggaacctgccattttgattttattttaaaaattatgtgtatgcgtatgtgtctgcctatctgtgaatgtgtgcacacatgtgtgcaatacccataaaggccagaagagagcgccagaccaccctggttctgcagttacaggtgtctgtgagccgatatgtgtactgggaactgaactgcagtcttctgcaagaacaccaaagtggtcttcacgtctgagctgtttctccagcccccaggatctgccatttcatagttcccaaggacatagatcccaataaccgtttcataattatcccaaagacagctgtgcaaactgaaccccggacctactttggagatgcatatgaacgccccaaccctgtgcctggcttcctgggctaaagaactgttgctatttccatagacattgtctgcaagctccatggcttggcaacacgacaaggcatctgaatatgggaactgaagatagcctttaaaaatatatatataatatagagtttatttgggggcatgggaagaggggcatgtgaagggggattgagaagggaggatggggaagggaagaggccggcaggaacatgtggagagagtggggtggggaggggagagaaaagagtcagagagagaaaaagtggggatagccttttaaatacaaacatattcaacagtgtatcttaagcagcctgggtttgttacatttgtttgtttgtttgcttttcacgcttaacgtgtctagagcctcaaaaagtagatgttccttggttttaaaactgccacagaagcctggagtagctgcgggttttgtctgtggccaggcgctctgctctagtgactggaaccacagcgacccctggtggccgttctctgtacctgcagctgcttcaagctgctccccgctcctggttgttatacttctgtcccatagacagcctttactgcacagctgcccttgactactaggcttattctctctacccggggacatcccttagccaccagcctctgcctcccattctccttctagggaacccagcccaacacgatcccaacacacagaagggcattaggcacatggtggccacccggacacttgctgaatgagagaacctaagcaccttctcagggtggaaagtgctccgcatatagcaggtgcctaatagttgctttctgggagctgggcatccaagcgtttttattgtagtcccatctccggagagattgcgcacacacccacttttatttcttatttattttgtaaataagtaattgctatgtaatacaggttggcctcaatgtcatggttgtcctgcctcaccctgttgagttctgcaccgccatgcatctcctgttctagcgtcatagaggctgccagaggttttgcatggcagtaatctaatattcgctcccttccatgagctgccaatggcaaggcaagctcagagatgtagggaattgctccaaggcagcccagcaagtgggacagaggttagcagcacagatggctgttgttcatggttcagaatcttaatcatgagacctgggttttagcttagggctccttagcaagccacttagtgttaagaccttttcaaatgctaaagattaagaaagacatttttctggtgtgggagaggctctctggaacactcacaaaataaaattgctcaaggttagccattcccaaaccagcccgtgaacagttaaagtcggatttgacacatcccaagaataacgggacactggccagcccttaaaggcgccactgggcatccgacgtgtgcaaaccgccctctagtggtcaatactggaattacccagaagtcggtcctctaggcacaggatgaggattgagggcgttgtcttcagagttgggaaaagcttaaagggcgtgcttaaaggacaagctgtggtcgatgatatctcagaaagactcctgggtagttacgggaagaacagaaggcccaggctgcatgtgagagccaggaacggcctgtcagacagtccaaatgtcccagggacagatcaaagcaggacagtggagtgaacatgaatacagaggttccccccacctccttggctgctccgccccctgcagagactctggcttttgctcattgcttttttttttttttttttttttttttttcctgagttagggcttcaccttcagcccaggctgttccaaaacttataatcctccggcttcattttggtttgtctgacaagagtctcatgtagcccaggctggcctctaccttgctatctagctcatttattccttgaattcctgaagcccctgtctctgcctctctcaggtgtattgtcttaaatgggtgggggttgctaaggtctgtgattcggccatgccccttgcaagaagcagcaggatagcaaagccatctgggaggaagggcgtcggttgggcgcctccacctgcaccccaccccaggaccctggtgccaagcatgcagcaggcgttgggcagatatttcctgtgaagttggacatgcttctgggtcacagaccagagtgtccatcacaatgccaggcctggtgtgtgtgtgtgtgtgtgtgtgtgtgtgtgtgtgtgtgtgtgtgtgtgtgtgtacatgctccaacaaccagagttaggatctcaactattccaaagcgacctggcattgactggggtacaaaagcactccaggggtgttgaggagggaagcttgagggagcagttatgggggggggtgtcctagtgtcatttctattgcggtggtgacagcaccacagagaaacaagggacatttcacttacagtttgaggtcaccattcctgacaggaactccggtagtgagtcacatcgcatccacagtcaggagcagagaggaaatggacacactcatgctgcctgctggctcatgcttaactagctttcttcactcttacacaggtcaggacggggcctagggaatggtgctgccccacactgagagtgagtcttcccacttcaattaatgatcaaggcaaatacccacacatgggcccccatgcacaatctctctctgagggattctctccctcagcctttcttcttgagtgattccatgctgtgtcaagttgacagttataatttaccatcataggggggcttcccagaggaggctaggatagagctatggtagaggggctgatgaaagtgaggcctagttgaggctggagatgatcagaggtgacacaccctccactggcagcataggaggtggtgacagggtacagagagcatcctccaagaactaggagtgatgggacactgaagggcctgcaggactaagggccatgtgtcacatgggtttcatagaatatcactggccagacaagtccagaatctcacagacacatggcttcctctttgataatttaattcttgaagtcagatgtgggcaatgcctttaattcctcaggaggcagatctctgacttcaaggccagcctggtctacagtatgagttccaagacggccaggttacacagaggaatcctgcctcaaaaaacaaaacaaaacaaacaacaacaacaaaaacaaaaaggaggggctgaagagatagctcagtaaataacgggaaaatgggcagaaagacctgagttcaagtcctaatatcataagaaagccaggcatcatgatcatttgtgtttgtaatcccagcctggagaggagagggagggtgaagaagaggatctctggacacacacacacacacacacacacacacacacacactgaggcaggccaaaccaaaccaaaaaggatccttccccaagatccagcagggggtgctgtaagcagctgtttcctaggtctagacttttggggctttggggcctccgcacagcacagacctctcttacacacacacacacacacacacacaaacatacacacaccggtcggggaacctttccacattggttcccagaaggctgcagattgagcaaccagcttttgcaagcgggttactataaatgtggagagagatcagtgggcgtgtcagcccacagggtaaaaatatcccagatgactgacaaccagtggcagccatccgatccctgcacgctactcagcagggaggagcccctgcagccaactggacaggctccccactgcctggttctttctgagaatatctggaacagacaaagcttgccggctgccaaatgttacacactgagaggaaggtcagtgtgtagataaaggggggaggtagcgctggggaagtggaatctgaaccccaagtttagcttcttcttgttgttttgtttatttgattaaattaatttatttaatgtatatgagtacactgtagctgttcaggtgagccatcatgtggttgctgggaattcaatttaggacctctgcttgctttgaactcaggacctcagctcttaaccgctgagccatcttgccagcccctgttgttttgtttctgagacagggcttctctgtgtaacctgggccatcctggaactctgtaggtcaggctggccttgaactcaagagatccacctgcctctgcctcccaagactgggattaaaagagtatgaccaccaccgggctgctgcctctgcctcctcctcctcctcctcctcctcctcctcctccccctcctcctcctccccctccccctcctccccacccctcccctccccctccccctctccctcttccttccacagaatcccactacatagtcctagctggctgtaccttactgtataaaccaggttagcttcaaactcatagatcctctgccttctgagtggtgggattaaaggtttttgctaccaaatcagcctcctcctccccctcctcctcctcctccttctccttcttcatccaggtcttatgtagccccaggctggttttgaactcactgtgtagagcaagatgaccttgaacttctgatcttcctgcctctccctcacacttttgcccccagttcatttgatgctggggctccaacccaaagctccttgcacattaggtgactagcctgccattgaccccagctccagtccctgttctgtgtacacacttggagcagcgggtgctcagataggaccatgcattcaaactcacagaagcgcatgcatttgccaactctgagtgcaaggaaactacgtaaactatgtgtggcagggactggagagatggctcagtgggtaagagcactgactgctcttctgaaggtcctgagttcaaatcccagcaacctcatggtggctcacaaccatctgtaatgagatctgacgccctcttctggtgtgtctgaagacagcaacagtgtacttacatataataataaataaatatttatcttttaaaaaaatacgtgtggtagaaaaggtcagctgagacagtgtctgctgtcagcaaaacatgacgggctgatgaagttgcacaggacttagtgacgagagtggaatgggacgtcactgttactggctgagtgtgtttagtctcagacccagtgaaagaagacctgatctgatcccatggggctctgtttgcggggaaacactaagaaatgattaaggtggggggaggccccgggccagggttgagtttccacacacccataaaagccaagtagggcacaggcacctgcagggcaggggaggatcgtccccagagccccagccagcctgccccaaccctcttgggcctccagactctggagcaggaatgtctgcctctgagtcgccctgtcctctgtctgtgtgcagtagaagcaggcgcagacactagctcaggaaagtcacaggaacccaggtacagaggtctctggtcccagccacgcagaaggctaagaccagaggattccttgagcccagaagtttacaaccaacctgggtagcccagaaaggctggttattctcagtcctagaaataatacaatctgagcctagtggtgcacacctttaatcccagcacttggaggcggaggcggaggcggaggcagaggcaggtgggtttgtgagttcaaggccagcctggcctacagagtgagttccaagacagctaaggatacacagagaaatcctgtcttggaaaaaaagaaatctggctatggtgagggtgtgcctgtcaccccagcattaggagcagaaggcaagcggatgatgaggtccagcccagcttggcctacaaagctagaccccgtcttacaagactaaaaatgtttgccttatatagaagtttatgtctcacgattataatgcagtttatagtatgaggtaggaaactttcaatgcttccagggcaggtagagaacagtgctcattaaggaagtgcaaggccagcgagatggctccgcagctagaggagcttgctgccaaacttggggacctgagttcgatgcccgggacccacatggtgagaaaagaaccaactcttagagctcaccctctgacttatgccatggcatggacccacacacaataattcaaattcttttctaagaaagggaagggtgaagaccattacaaccaccgagtgagtgtctatgtagttttttttttaattatttattcattttatatgagtacactgtagctgtcttcagaaacacaccagaagagggcatcagatcccattagatggttgttagtcatcgcgtggttgctgggaattgaactcaggacctttggaagagcagtcggtgctcttaaccactgagccacctctccagcccggctatgtagtttttaatgttcacagtgaaaatctattgcccagttcctagtgggtcccttaagggcaaaacatggttttactctcagagatgccaggtagaacccctgcttgaacttgggacaaaagttagaccctcccttccagccctcccccagacgctgcaggcttgtcacttggggtcacaaggatgttctgatcttggacacagactgctggaaggcccagaaggttccacgggacagagaaaggacagagctagcctgtcctggtgcatccaagccacataccacattagccttgaggtggaaacatggctagtggccggtgctggcctcacaccaggagactcgctggcagtcatgggaacacctactgatgtggcctggattctggagacccagccctgcccagaaaacagtcacagaagccagtgttgttgaatcagtgaaaaggtttattgcttcagtcatgacttcctttcaaaagatgataaaatttctcttccagtagaaaaaaggggtcggttgcaggatgctgggcctccgaataccctctggtgaggtacactagatgccggggggcgggggggtgtagacggcccatacctctagctttgaccccatgcctgaaaaataaggaccctgaggggcctgccacctctgccacgtacagtggttaattcagtgacatagcagagacgatagaaaaagcgccagatacagctccagagtgtgtgtgcaaactggtcaggacctggagctgcttgcctggccttggcacaagaggccgacatatgcccagcccctaggagtgacagatccgtcctctgtgggaactaaggctttcagactgatggagaaagacagaaagacttcctgagggaagtcaggagcctgggcagggccagctcctacaggaggggctgacagcagctagagttcccacagcctggctcacaggccatttagaagagcacacctgtggcccatcaggctcacttggcagcaggtctgtccctggtccctgagttgtttttgcacatgcgtgggcatccatgtgccgtgcgtgcggacaggtgtgacatctgggggctcaggccatggcactggtgggctgtccgctgagagagtcctcaagaagcggggtgtagggactgggtggctggtctgaccaagctatcaggtttggggggcttatagtgtcttcaggaccctgtggagaaaaaaggaagctgagtcacaagcctgtcacctagccctgccctgcctacctcccctagtcccaccgcacatcccaccagcacagaaaccacttcctgacacatccagccctgtctgccatgaacccagagatgccactctatagacacggggactcctcagtcatgtaggtctcttggttccaacctctccctttagagatgggaaaactgaggccagggagactggcctgttacagtgaagggggcagagtccggagtgggtagataacaccgccgcacaaagaaactaggaatggcttaaatgtctgcccacatgtttaaaatgctgtcacctgacgggccaggaacagctattaaaactggctcttgttcatagaggtaagagagacacactctcaccagactgctgtaatggtggcctcgggccttagggacagtaggatgttgggcaaagggtgcagaacaggaaaggatggcttggtaagttgggagactctgacttgaaaagacttcccaacttaggaaaatgaatggaaggccgggtttaagaacactgggcacccctgccctgcaacccccataccgatccccctagtggcagggaaggaaactgcagggaggcgtcttctctttggatcaaagccaacgagcaccccccatcccactcctccacccccgacacagcaccccagcattccagatagtctcactcagaagtaaaacaggaagtgctggggtgaagctcagaggtggactacactaagcaaaaggccctggcttcaccacacacagacagacagacaaatggacagacaaaaaaacagaagtaaaaggccggacagtggtggcgcacgcctttaatcccagcacttgggaggcagaggcaggcagatttctgagttcgaggccagcctggtctatagagtgagttccaggacagccagggctacacagagaaaccctgtctcaaaaacccaaaaccaaaacccaaaaaacgaaaacaacaaaacacaaaaccaaaaccaaaacagaagtaaaatggggaaggggacacaaggcacagtagtggtgcatgcttggaatctccgcactcgggagacagaggcaggaggatgtccacaagttcgaagccagcgtgagtggcccagaacgcccttgttgccagagaataaagcaagagttaactctgtagcttggtctctcccatgaaaacacacacaaagccacaaggctctgggcagccagggcgggtgggcagatttcccctcctctgtcctggctcctccctgtactgtgtctgacagaggagaattcagaatgagagacagaccaaaaagaagcagaggatcaggtcattttcttaaaggctactgtgttcacagcagctggccggacagccaaccctgcctgccaacccccaacccccttgccttacagaaatgcccatccacccagagggacgttattcatataataataccctttggtctagcggcacgtctgtttccattctatagcaatcagcagcagcctctagggaccacccccacacccaggtgcatggcagagtgtggggccccaccgaatttcacttagccaggcactggggggtcgggggggggagggtgaggtccctatgcaaggacccatgtgctgtagctgatcctcagaggacactgccctccctagcacatggccaggactagggggcacccaggggaatcttgaagccaaacgaggattagaccaagctgggaaagtaaagaggtaagcccaatcttgttcattctattagggtctggacagggctatggctgtgtacctatgggctccatctgggctaaagggactgcggagcctctgctcggagcctacatttgtcccctcgcactctggcaatacccaaacatcaccatgactggcagacactaaccatctccccacctcttcctggcaggaccctttctcagctccagggacatatggggacccactgagctgcagagcttcttcctcctccagggaggtggcactcaccaggacaatcacacagtcaccagagttctgccttatttgcttctcaagcaaatgacattgcagcaaatagtcagctggcctccaggagctgagctgtggcctcccctccccgcccccccaagccccgcctccaccccccacccccagctccctccaagaaagtgctcacacccaagttggctcacaagctaaaatagcagcttctattgagacactcactcacctctgctaaccccaaattgcagggaccacagctcttccagtcccttcccaggcagggacacaccctgtagggctcagcctctctcctgagccttgatccctacaggacctggagatcttggagaagtacggtcctggatccttgcgagatggctactaagtaaaccaggacgccagctatacctgactcggtggctcaccacctggaccacccatcgcagcaaagcacagggcggacacacgactccatctaaattcagactgtattgagcagtctgtcgcacaccctgtgtacttgaccatgaaattctatcctcaggccctgactgagtatgtagctggtgcttaactgatgtttaaacgtcttcattttcagtctctctattctgaactggagtcagtgtgtccttttacatgcccttgaagtccaaaaaaaaaaaaagttttcaaaccttttgggctaggagagtctcttggctttccgggatgcccagggacctgtatttagcaacctgcaggggataggacactgagaagcaactggcctaactgtcatcttctttttttttttttaaagatttatttatttatttattatatgtaagtactctgtagctgtcttcagacactccagaagagagcgtcagatctcgttacggatggttgtgagccaccatgtggttgctgggatttgaactccggacctttggaagagcagtcgggtgctcttacccactgagccatctcaccagccctaactgtcatcttctaacaggactttgtaaatgagagtcaatgactgaaagggtccaagaaaccgaggcaagattcccatctcgcaggagggtgagaggcaggagggtaactgctctccatgtgaataacatccaggaagatgctataggtagagacggtaggtctactggctatgagtaggtggggtgaagagggggggttacctggtacgcacctatagcttggcttcttgcagcaccgtgcccttggcagctggtgacatcagggactcagagtaggcctgaatggcctccttatcctgggagccctttttactaccactccaaaacaaaaagcatttctcctggaagacaaccaagctagtttatatggcatgccgtgtcactggggtgacgctgggtccccccagaagcaaagggacagaagagaacaagattgcagagtcttgttccaccctgcactgtgggcgaagcgccccggaagtccggcaagcagaaagtcaccgacaggaagagagtggcggaggtggccacagcgggactggcctgctgagtgtttgaatttctctggtctggtctggtggggctggatttgaacctagggcctggagcctactgggtacaatctctctcttaacctcttctccaagtccatggtatttgtcaatctgagggaaacattaacatactcttgatttatgaatggcgtatgactgagtatgttctttaccagcaagcagttaacccccccgcccccagatgctcaaggacaggaacacacaggtgaggcctagctttgtcaggacaaggcttctttggcctctctctgatgaaacccgcaggacaaacaaccttgcccccagaccccagcgagacgcctgccttctattttggggtctctcctccaatggttgactgaaaaagcctggctcagttctcactgggcagcagcagggaggaacaccagcccggaagcccagaccgtgatgtcctccagatcctcatagctacagtcaacatggagagccagaggcaaccagacaccccttggtgatgacaagagacttggggcctgtgtttggaaagggaagccgggtgctggggactccacagggatccgttcttcccaaagcaagcaagcaagcaagcaagcaagcaagcaagcaagcaagcaagccttaaagaagaaaggcagccagctggctgactgcaggagagcaggtgggaagacccccccaacacacacaccaagcacgcacagaaagcccagcctgtggccccaggacatctcaggtgggaccctgtgagtggctcttgtacgagtgttcaaaggtggccagtggctcccctgtttgcagacagcagccctcttgaatcacagctgatcacagtcctgtcctcaaattccctgcttcacaactacagctatcagcaagcaccccaggggacttgaccaatgtcgtaaccccaagatctcatgcacgagccggtactcctgaggccagaagggaacgaaggttctagtcatgacccctttgcttcctgctttcaggggctgcatgccctgatgttacattcctcagtcatcctttctttatggaagtgacccctacccctgtctgaaccacactattcttgtctttttctttttaaagtttttttttaaagatttatttatttatttatttatttatttatttatttattgtaagtacactgtaactgtcctcagacactccagaagagggagtcagatctcgttacggatagttgtgagccaccatgtggttgctgggatttgaactcctgacctttggaagagcagtcgggtgctcttacccactgagccatctcaccagccctattcttgtcttttaagatttatttatttatgttatgtatacaagtacactgttgctctgcaggcatcggatcccattacagatggttgtgagccaccatgtggttgctgagacttgaactcaggacctctggaagagcagccagtgctcttaactgctgagccatctctccagtcgcccacactattctttttttgaagtttaattgattttcggagacaagatgtcacgtatcctaggctggccttgatcaaaccctacatgtaaccagggatgattttgaaccggatccttctcccctggcctccttccttcctgagtgctgggattataggcacctgtattagtttatgtgtatgagtgttctccatgcaagtatatgcactgtgtgtgtgccttgagatcacctggaactagggttacagaactagggttacagaacaagggttacagttggttgcagaacaccaggtaggtgctgggaatcgaacctgggtccctgcaagcagtaagtgctcataatcactgagctatctctccagaccttcttttcttttcttcttcttttttaaatattttcattatttttgattatttttttttcctgtcagcgctgaggcctgaatacaaggcctcacactggctaaacaagtgctctatggctgatgtaaaacttcagcctcatatgctgatatatttgggtcaagcaaaatttataactaatttctttcacttttttctctggacttagaaaatctaagttcatggttccacacgtggctcctcccacttccatctcacacccaactccagcccagagcattttccttgggaaaaactatcttctctgtttggtttaacctggctttcctttgcttctctaaccagcccagccctgaccccccacctctaccttcggcaggcactttccagagcgggcaccaagtggcacccacttgttggccaaatgactgggtacctagcctcagcctagccccgacctgggagggtcctgggccttccaggacttgtagagaaaagttactgcagggtgcgagagaggaggtagaacaagagctagctgcaggaaacagaggtcggctgaaacccgagccgagtccgaggcgtggccgcccctcctacttacctggctgcgcagttggcagatgatgggcaccagcaacaggaggcctccaagccccagcagcacatactgcgcgtagtgaagaacctggggcatcagcaccagctgcgtgtagaacgtgctcaggggcttgccacccattgctccgctctgcagaagaaaggtcgggctgcacgctgcgtctccaaggcacccatcccactgtgccgtgccccgccccaaatcagaacagagagcctcgggcgctttggctagaagtccaaagagaactacatttcccagacgcccttgctgttggcacgcccatgaaatgaggcactggctaatgggaggtggatctggccccaagcctcctcgcctaacagtcatctctttcgctggttagaatctagtcttaggacctgaagggcgacgagatcaggatgcctgcagggtggcctggtgcggaattccatctccactcccccctctcaggggccattaacaaaacctggaaatggctctgtggttaagagcgctggctgctcttcaagagagcccacgtttcagacttgacggctcacaaccatctgtaattccagttctaggagacctgatgctctctgggcttctgcgggtaccgggcactcacatgataaccatacatacatacatatgggcaggctaaacatacaaatagctaaatttaggtaccggaagttaacataacattagcatcaaagcgaactaaaagcctcagctaacatacagagaccccagactcccttctaccttcatagactcacctgttcgaaccacagcaacggcagaactactggctcgatcttccctgtttgcctggaaacatgggacacaaagtgagtgaccaggggtgatgtgaccctcgcaatggagctatgtttggggcttggggtgtcagtgggagagctactggttaccatgtgaaaggccttcgctcagtcgaaaccacttcacaagaaaatgagacagaaagataaaggggagcctgtaacgctacgtacagttgactatccttagccaagtttgaggctagcctgggctacaggaaaccctgatgcaaaaaattaattaaggggcgtggcaaggctcagctgagtgggtgacagtgcttgctgctaagcctgaagacctgagttccatccccgggacccagaaggtggaacaggctccctaaagttgtcccaaccttcacatgttcattgtggcatgcacctatacacacacacacacacacacacacacacacacacacacacacacactaaacacaactaaaaatggggctagagagataactcaacggttaaaaggtcctgagttcaattcctagccaccacatggtggctcacaaccatctatcatggcatctgatgccctcctctggctcacaggtgtacattcagacagaccactcattcataaaatacataaatacaactttaaaaataaataataatatctgtgtatgtggtggcacaatgcctttaatcccagctcttgggaaggcagagataggtggatctctgtgagtttgaggtcaacctggtctacaaagtgagttccaggacagccaaggttattaacacagagaaaccctgtctcaaaaagccaaatagtagtagtagtagtagtagtagtagtagtaataataataataataataataataccaataataataaaataataatgagtctcctcccaccaaagcctgggtggctgcccctgttactatctacaggggaacctgatcgcaccacacacacccaggtccagcaagtactttaacaccccaaaagctagaggagaaactatcactgtgctggggatggttcagtggggaaagcatttgctgctcaagcaaatgaacccgaggtgagacccctgaacccaggctaaaagctgtgtgtggctttgaacctgtgaccccagggctgagacaggtagaagctagctggggcttcggtgagaattcctgccgcgagggaagaaagggaagagggataaaagaggacacatggcatcctcttttggcctctgtatgaaccaccttcccctccaaaaaccaaaacaaaatcccaaaactcacaacaccaacaagaaacaaagattaaaagaaaaaaacaaaacaaaacaacccatcacagccacgggagccgggcgtgaggcgtgagcgggcggcatctcgtgctgagaagctgcagttgtggcaataacgctgcactagactttggttccttaccgtgacagatactgccaggagcggacagtactgaatgcaccggggacagagaacaaagatttgcttgcgtctctgacacctctccataaatctataaagatttctaaagagtatttgaggcagtggagcaaatcaatgtttggctgctgacctcaggaactcaagcccgtggccagcccactttggcctccggtttcaagagcccagatgagtcagatcaagtggcgcatgttcaaggccatgatgggctacagagagattaagggcagcctgggtaatctagtgagacctaaaaagtgaagagggctgggatgtaattcagtgaaagagtgttttctggcatgcaggagtcccagggtgtgtgtgtgtacagaagcctagctgagtccagcaattcccggacttagttttcaccatgaagcccagagtccacctcttcctcagtggttcccaggcatgtgatctgcgatgctgaggagtgaccagcatgtgggtcctttcgttcaaagaattatttattttatttgcataagtacactttagtgttttcagacactccagaagagggcatcagatcccattagagatggttgtgagccaccatgtggttgctgggaattgaactcaggacctctggaagagccgtcagtgctcttaactgctaagacatctctccagccccaaggctggactcctaccaccatgtttctgccgggcaagcagggaatgggggcaggaggactctcagtctcactctgtacgttacacaaagctaaacataaagtaaacccagggaattgtggttgagaacactggcaggacccaggttcaagtctcagcatccattcagtggctcacaactccgtctaactccaggtccctatgccctcttccggcctcggcggctcttgcacttacatggtgcacagacatacaagcaggcaaatccatcctactgtgggggagacaagattaccaatgcgactaatggcagaagagcccttgggcgtggaggatggaggtagtgtcaggatgcagcctgggtctgagtctccatccagagcaatgatgcaatcccaggaaaagaggtggttggatcccaacgcttgggcctcgccctgtcctgtgccttgcatcaccaatgcatgaaacctcctggcccctgaagctttcagaagctcccgtcccaactccactcacccgatgcccttgacagatttgatgtagaggctcagctgcatcttcacagaacagttcatggggatcccagtgacctagagcataaatacagtgaggagatgtaagatcctgtggggagcctcccagcctgctccagcctgctccagcctgctccagcctgctccagccctggggtttcttatccaacttaaaccagataatacctgctggggcatccacccttctagaaatttcccacacacccactgggctctccctcaggaaatacctgctcccaaagggatcagctatcgcaagatcccctctctagacacttgttgccagagggatgacaccccccgccccccacatctgcatgttcgtttggggacagatttcatgtggtccaggttggactccaatttgctatgtagccaaggatgaccttgaactccaaatcttcctgtctctaccttctgaggactggcttatgcctaactttacatggtgctgggatggaagccagggctctgtgcagggcaggggagcaccctacctactaagctatcctcccagccctcacgaagctgcctaagacagtgcctcccaagtgtggggcatgcgcagtaaggatgtcttttttctcctgtttacatttcctaatagcccagggaaccaaaggaagggcctggtccagggtgagtaggtttaatcgagccagtttcccactatgtagcatcctggcgctccctaacagaggtagccacagagagctgcctgcttgcagctctctttttaaaatgtgatgcttttaaaaaaaaatctcgctggagagatggctcagcggttaagagcactgacggctcttccagaggtgctgagttcaattcccagccaccacatggtggcttacaaccatctggaattggatccaatgtcctcttctggtgtgtctgaagagagtgacagtgtactcacatacataaaattaaaaacaacaacaaccaaaaaatcactaggagaattcacaggtattatttaaatcaggaagaaagttctagaatggaaaaggttggtgaaaagagaccaccgtttgatgcctttagccctgcccagatcatgagactcttgaaagattgatgggaggccggaggccacctctcagattgtaatcacccacagtagaaggccaggacacgttttgcccaggacgcccagatccctcctgcccccagggcaaaggcctccagaaacctggtatgacttttggacagaggcatggatgtgataaccacgcataccatgggtgggcccggcaaccctccctagaagtcgtccagggtaggtgcccagtgttggtcttggaacctaagttctggggggtgaggtgagggtgccccattctctaagctagtgtgttggcctcactgtgccatttgcatagacagttaataataccaaacaccttcgtcctctgggatgaagcatggatctgccccagggagagaggctcacaggacaggtccccagtcgacaactaggcccccctattctgaggggctttcctgatataaaacacctctatgtcaagttccttgctggggagctaggcacaacctgggaaagacttcagacgactgtgccccatgtgcccacccttcctctgcgataaccctcagctatgagccaggtgtgaagaaacactggaagccgaggcaggaggatttgcaagttcaaggccagctgcaggcacagctcggcatcagagcctggggccttgtgtgttcaaaacccaggcttccatccccacccagtaaaacaaaaaagagttcttcacggaatgccttcagggcgtcacgtagggcaggaaccctggactggacacatcttacagtgaccagaggcagagagaagttaacagaggacaaattcctccccctgatttctctgtgagacactggcccacgatgatgtctttagtgtcttgacactgtcaagggtatctgtctctggtgaaggagacgtcccggctgataggtcttaattaatttactatcttatatctttttataggccccaataaaaaaggtaatgatatcactgaactctggaattggggtaaagtaagactttgatgacttgaagttctaggagcagccgctgtggaaggaactgaactcccctgcctcagttggaacccgctctgtcctggggaattggggggagcggggcgggtgcccagcggccagtggcaatctctgggaatgggccccagccactagcaggacacggagcttaccggatggatgtctaggaacaaggaatgctcctttgggttagggttcagaccaagaacagcttctgacaacacagggtcggcgttgtaaaagtgggggtgggagagaaacagaggcgcacctggaggaggggaagagaggcgttagaagacgggagcgtcacgttggcctgcctcggtgccagggatgcagggatgctaacactggggaccaagctgagcacacacaggacctgggaagggtggatggagccagagtggccgattacagtgttgggggtgggtgggtgggtgggtggaggaagggagagagcagctgctacccggcaagggaaaggcattccgggtgggagtgtagcaagaggtgagagcttggacgtgattttcaaccccccacccccacccctccaggtctggaggtgcagcagggaatcatgggagatgaaagtggaaaggaaaattaacaccatatgaatttaggagtggaagcggagtctgaatgtcaagccaggcacacagactgcttttggagacattgtagctcaggggtacacgtgagtgggtctctgacatcacaggaatggaagggacagcaccaatgagatattcccacccagggccctgaggtgggactttaccaccaaccagccaaagtggctcaacccagagatctcaggacaagggcctggggagttccgagttctgagtctccctggggaggccacaagaggctcccagggcaacagatccacagggggggcattgtgttttagctgggtctggtggtgcacaccttgaatcccagcacctaggaggaagaggcaaggagatctctgagtttgaggccagcctggcctacatagtgagttccaggacagctaagactacaaaaagaaactctgtctcaaaaacacaacaaacagggctggagagatggctcagtggttaagagcactgactgctcttccataggtcctgagttcaattcccagcaatcacatggtggctcacaaccatctgtaatggggatccgatgccttcttctggcatgtctgaagacagctatggtgtactcataaataaaataaataataaaccttttaaaaaaaagaaaacatttctttaaaatccaaagccagacaggctagcatacctctttaattgggagccagaggcaggtggatctctgagttccatccgagtctggtctccaggacatccactgcttgaagcccccaacccctacctcttgctcccaacccctgaaccggctgctatgggcatcttcaagtgcaggtgtcagacacaagagtgctgcacctgtgacagccttggcagagaaatggcctagccaggaggtgcacgtgggcagggatgcagcagagaacccggatcactgagagtccaggtgaaccctagcaccttcgaggctccagagacacacctggtcctgtcagaaagacaggcgaaggatcctcagggtggccttcaagccctcatggaaacacaacaccaaggatacaacagaacagaaaagagacctgatcaatccctgaggcctaacgtcacctctgtggacccttctaaagtcacgctgagatatgctgccttctacttggaaaaccctacccatccttccaaccatactgtgaaaggagacaccagcaaagatcagagagaaccccatttctttcagagggatgccatggatccccgggagatgaagcccccacctaaccagacctggaagcacagattccaacaggatgtcaaggctgccagcacagacctgctgcaggtggcatgcccgtggctttctaacaataggtgtggctcatcttttcttttgatttccaaacaccctcagagagacgcacccgggcaataagtataattaatttatagctttatggcccgtgtatccagacttaactgctcaggattacccgcgtggtgattaaggaccacttcagggaagatccaaggtgctcccaagacaaggacaggaaacacggggagtcctgagtccaagaaagtctcgtgacccagaaagggaaacctatgtgtattctttatcttaagataaaatgccacagaaattcgaactcaggtgcactcctcctacagcaggtgcgagaatgttctagaagcatccttgtagtggtgaaatgccaaaagaaagctccgtgagccaggaaggagtaaggcaagcagagttagccccaccatggaacaccacccaacaatctaggctatcacccgctatcttgcagatttaccatataatcatgagagccatcatgggaggcatcagggatcgagggagaaagaacagttgtgactccatctatgtaaacagtaatgccaggcagagagccgagagaccaaaagtcaggccagtgggcaggaggagcaggaaggggagatgttgggtgtggtaagagttgcctctttgtggggttgttggtcacatggccgtgttccctatcactcgaatccctgttcctcttcccctttcttgttctcacccgatttacaaggggcaagctttaggggctgggaaaacagtttagtcagttaagagcctcctgtgcaagtgtgaggacccgaattcgggttcccagcagcgccacatctgtaactgggaggcagagacaggtggatccctggacctcccaagatccaggattagtgattgaaaaatctgcatcaataaacaaacaaacaaacaaacaaagagtgatgaaggaagacactcacttccggtctccatccatcgatgcacctgtttatacctccctccacgcgtgtgcgacacgcacacgcatacttaaacccactgtctccggaaaacaaaacaaaacaaaacaaaagaacaagctacagacacaactacacttagattctctttcacagctgaaattctgttcctgacagcagagttctgtgtgatgtgggcctgttgctgcccctgcggtgtgtgggacccagcctggccaattaacacagcctaatgactaggtcagagctggaccagttcaaccaagccctgggatttttgctggtacaaggaggggaaggcggaggtgcagttgtgagtgaaacttcctgtccgcaggcaagccctggatcccacgtctgtgtaggggccttagaagtttgactcccaatatcctactgggacatggccacagggtttgcagtccaaggaggagacaagcaggggagggttcagtaaataacatcgacagccatgagcaggcaacaggaaggcataagagagagtgtaccagagagcggctggagagccagaggggacggaagatcagggagagtgtctgggaggatctgatcaggatcagaggaagcatttcatttgagtttgattgacatctggtgcaatacgagctggcgagagagcaagggcacccgagtgacacgggaagaaggtgggtgggaaggagaaagactgtgtgggaggtgcttagagcagcctgggcctgactgccaggtgaggggtgaggcacggagcagacttgagcaatagcagcagggtagggcccaggattagaacacagagcagatgtgccagggggccacagccagtaccaagattcacacccaacttggctaaagaggagagtttgacacaataggagcgtggccagtttgagtgaagggcaggactctagcttttgctcccagcaggtgaatggccacagggaatgtttccagcctcgtcctagtgggcaaagaagttagagccaccaggataacagaccaggttatcccagtggcctctacccagtcagtctctggggtcctgaaagctatgggctggatagaggaggaggaggtggtcatagaacggagtgttttggggggatctggtgtctgggtacatgccttctatcccgatacctctgaaggcagaggcaggaaggatgcgcaagtttgaagctaacttgggccacaacgcgctacccagtctcaagctggatgctaggttgagaaaggaagggaccacaagccaaggaatgtggtgcctccggaagcaggaaaggatgagggcaggctcctctccttggccaagaagcagtgcccactgatggaatcttaacctcggggcaggacccttcggacttcggagcgacacggcttgtggataacgcgtgccggtgggacatttatcagggtggctgttatcttttttccagttacctttagctccctatctgtagcactgagatcatcatgggtgcagagaccagagattaatgggacagcaagctggcagcagataaaatcccggtaccaccctctcacctcagcctagaggtggagaacacttagaggacactcaccaaacctgcaggtgctgacattctgaatgccagactctcggcatgggcagaagccttcgttgggtgggtagacggacccgttggcaaacagagtatcgggggccgtgaagcgatacgtgggaatgccttcaaacacccttgattcgttgtaggtcagcttcatggacctgcagaggggaggcagggtgagaactgtgccttgagcacagaggctggggcacccctgcagaagaaaccacagggaccagcaatgacactagtcacctgttgctgaggaaacttcagcggtccctcaatgttctgcctgctcccttggctccccactcactaatccatcctcccaatgaggcaaattaaaaaccagaactcagcacagtttagcacagtttggccagcatgccctaggccggaggttctcaacctgtgggtcgtaaccgcccacaaaagcccactggaaaacgcagacatttccattatgattcataacagtacggtagcagccgggcagtggtggcacacgcctttaatcccagcacttgggaggcagaggcaggcggatttctgagttccaggctagcctgggtctacagactgagttccaggacagcaagggctacacagagaaaccctgtctcgaaaaaccacacaaaaaaaaagaaagaaagaaagaaaggaagaaagaaagaaagaaagaaagcaagctaaaacatgcacagcacatgtctgcagtagctgtgtcagtcacttgagataatctgaagtttacagagttcccttacacttacaacgatgtgccatgttctcttgataggggcttgagagctgatgaggactgtggaaaccaaggctttgggcaatggttttctgtgcatgcggagggatgagcaaccaccatggccctgcagtcaccctgcagtgcgatgccatccacagatgccatccacagcttccctctccacttcctgtctcactgtacctgccagggccttagtcatgtcccttcctgcccctgaacctccggatcccacctctccctcagcccagacttcggctttcccagtctcccttgtccaccctgactcctcttcatccattcactcccactgtctggcctcaaacactcttctgatgggaaacaaggcccgggtgacccacactgtccatggtcaacaccataacacacacacatgtctgctcaatcctcaaaacaaagagagtccagggcagaactcggtctgtggctcatggcttcaatcctaggactgtgcaggctgaggcaggaggatacttttttgccaggctacacagtgagacccccccccccaactcaaaacaacaaagcaaaacaagaggaaaccaattgggatgaaccaaaaaaaagaggataagacattggcgctctctctctctctctctctctctctctctctctctctctctctctctctctctctctctctccccctccctccctccctctgccccttccttatgtagttctatagtctctctatgtaaagaactggaaatagctatgtagaccaggctggccttagactcccaaggattcccttgcctctgccttgagtgctaggattaaatgcaagcactgccacacctgaccgacacccagatttctaagacccaacactaagcaaaagctcttctcagaaaatcttttcacacagtctggtggtaagtttttaaatgtcaatttgacatagttagaatctcctgtgaagagactctcactgtgtgaaattgtctggattcccctaattgatgtgggaagagccagcccactgtgggcggcactattccctaggtttggctcatggactgtataagaatggagacagccatctgagctataggcatgagtgcattcagtgtgactctgttcctgtaagtggattgattagctgcctggagttcctgctttgatctccccccaccaccagccacaaagatggcccctaatctgaaattataagcacagtttgttttgttattttatgcagcagcaccagcttagaggctcttattagggcgatgttaaattctctgatttcgatccttgtgattgtgtaagaagaggcctttgtttctggagataaccccatgaaggactgaaggaaagagacacctggcctgcaccctgctctcatataattctgccaggctgaaatcctatttagtgtctgcggcatgactcagtatcaggccacttacttagagtgtgtgaggccctgggttccattatcagcacacacacacacacacacacacacacacacacacacacacacaaataaatgggctggagaggtggctcagtagtttagagcaacacttaagttcgagtcccagcagccgggcgtggtggcgcagcacacctttaatcccagcacttgggaggcagaggcaggcggatttctgagttcgaggccggcctggtctacaaagtgagttccaggacagccaggactatacagagaaaccctgtctcaaaaaacaaaacaaaacaaaacaaaacgtttgagtcccagcatcctcgtagggcagctcacagccacctcttacaggagctccaggtgatctgacgccctctgctggcctcctcaggcacctgcactcatgtgcacacacacagatacacaaaattaaaaaaccagtaataaataaaatgtaaaaacaaaacaaaaccaaacccgaagttctgcttttgaaagtccaccagagcacacagactttgctcaccccgtcgtggctgtgttcacacctggcatgaagcatggctgcctgtgtgagctagagaggaagagggctcaaagatcagcccagtgagtccccaggccagagtcatctctggtgtggccagaatggatgcacaggctagggcaccacctggaaatgggtctctgaagacccaccatgtcttcctaggccacagttaggaccctggggatggtggagcccaagctacaagactttaacactttcctaccagtacccttcaccactgccaccatgactgagtccccagacacctcgcaagtcacctctgtcaggtatcttgtcacagtgacaagaaaaaccattgaggcatagtacacagaaggccagacactttgagcacacttccagggagctacctgagtggaccctgaaccatctcagaagcagagtttcctggtaggaggcagggagtccctacacagggcttacctgcatgcctccgggctgaagaattccagcgaggattcgggtgtcatgaagggtgcccacatctgcccggaagtcccattgatcatgttacactgctctgaatgccaataatcgatctgcaggacaggatgagatatagccttgagggacagccaagatctacacccaatgtgtgccctagtacagacatcatcatatccaagcccgtgagcaggctgtgtgcacagaggttctagcccagcttcctgttccccacagtggggacagaacatacagtattgtggggactcagttaagtcacctgtacaatatcgagttccaggctagccaggactacactgagaccctgcttccaaaacaaaacaaaacaaaacagcaacagcaacagcaaaactaaacgcacttcccactctgccgtaagagctttcaatcagcccttctcatagtagaaaggagacgattaggggctggagagatggctcagtggttaagagcactggctgtttttccagaggacccaggttcaatgcctagcacccagatggcagctcacaactgtctataattccagttccaggggatccaaggccctcacacagacatacatgcagacaaaatgccaatgcatataaaacagcagctggttaatgtgaacagcacccactaagaatagctgttggctgggtgtggtaacacacatctatgaattaaacacttacaaggcaacagagacaggaggattgaatttttgaagctagcctgggatacacagagaccttatttcagaataaaaaaatttaagggtgtggctcagtggtagagcacctgcctagaatcccccagtgaggggctgggggcgtggctcagtggtagagcccctgcctagaattcccccagtgaagggcagaagtctagctcagcagtggtgtccttgtcaaagattcacatggcctgcgttccatctttagtacctgggcctctggacaacacaacagaacaaaaacacattatccataaagatgcccctaaggagaaaagccagcagcaaaatagcacatgacaggatttctgtgtattcgaagaaggaaggaaaacacatttctctgggtacacagaggcgtggtggtgggtaaatggccaggaagctgggttctataagcagtgttgggggatttccgggtgggcctaggcaaggtgctggacctcattgtcttatctttatgggaatgtcttcctgtcagccttagaaatgacaactcaggaacagaaaagagttcccgacagaaataccgcagggacagttgtgggatccgtgaagtcctcgggtgacccggacaccctctgccaaggcttgttctggtgtagtccccacaccaatcgatggggactgtctgccctcctgctcaccttgctgagtccgttccatttgtccaccagatggatcctgctgaaattctggacgcccgtgaagacagtgaagaccccagaattcgagttgttcatctacagacaggcagggaacagcacctttagccctgggcatagatcacaacataggcacaagcccacctattcttcagctataggtatgtcccctcactgttgctgcataaatgatggggacagaacccagtgccttacacatgtgggcaagtactcatccactgagtcacacccccagcttccccccaccctttaaaaaattttatgtgagtacactgtagctctcttcagacacatcagaagagggcatcagatctcattacagatggttgtgagctaccatgtggttgctgggaattgaactcaggacctctggtagagcagtcagtgctcttaactgctgagccatctctccagctccaccctccatccagcattcttttttattgcacattttcagacagggttgtccaggctggttttgaatttgccatactcctgcctcatactcccatgtacacagatgacaagtctactcaatcagggccaacagctaataaagtaaaaaggcattttagcgggggtttagtggcacacacccttactcccaacactcaggagagagaggtaggcagacatctgtttgaggccagcctggtctacaaagtgaattccaggacagccaggactgcatagagagaccctgactcaataaaaataataaaacaaagataaaaagaaagaaagaatttaatacaaatttctgacaggaacgatctagaagctcagtagaagggccccacctcaattgtcaggaagagagggatggcagtctctatggggtactgggaagggcaggtacagacaggtacagggctttacccagggcctctaactctgtaaaagctttaagactgggtattcagcctgccgccctcgttatgtgttcaccccatggggtccccatctggtcactgggagacacagtgccttaccccgtctcctctccacaagattggacatatttttattttatgtgtctgagtctttttgcctgcatgtaggtctgtgcattgcctgcactgcagtgcctgagtgagccagaagagggtgtcagatcccctggaactggagctacagatggggtgtgagccgtcatgtgggtgctgggaatcgaacctgggtcctcttgaagaacagccagtgctctaaccactgggtagtaaatctcacgtgaactcagtaataacaggtcctggagggtgtgggtaacgttactgcaagcacaccccgtcagtagatccccacagagaaagctgagctgaaccagagagttggggtcaggggtcagagaccaaaccttagctcaggttaccaaaggtcaactgtgagaaatagtgggtgcctctaagtcacactgatggggacatttgagaggtgtgcttcgaagatccagtcctcctcctcctccccgcaagctgtgcctcaaatcttctaagttaaaccccagccatatccccccactcgaactggatcaagccgcacctgaatgtaatcctggcatctcctgttatatgagctgataatttcccaatttttgtttaagctggtttgagttagggtccttgagagataacctgactctctgaagggacagaagacacttaccccaacaaacaggccaaatttgccctttatgggaagcatgtctgggaggtacgtgttgagaaaatgcacgaagggatcgtcatagccccacaggatctcaccaactgtgcggttcataaaagcacgctggcccatggtgaccagcgccaaggtcatcatcagcttcaggctcacaggcttgctctccatcaatatcgagcccccctggaaagccaaggacatgggattagggtaaaggacatggtaggacaccatcccccactttcaaccaggcttcaggcaaagagctcaggccctcaggatggacctttctctggtccttgttgccagggtaacctgtactctcgagaacacccgatgatgggttcagattgagtgaactctacaaggactcagaggcatacacgaagctcaggcctgacctccggaagccttcctgagccactgtgtctgtagagccacacctgaggcctaaatggaaccagtgaaccaccagagacactccgcagagccggggcacagagaaggaggctcccatgccatccctcaccaagcgaacggatgaggctggagccaaggttaagagaaaacctaacacagaagggggccagcaaagatatgaataccttgttttgttttgtttttgatttttaaagatttatttatttattttaatgtatatgactacactgtagttgtacagatggttgtgagccttcatgttgttgggaattgaatttttagggcctcttcttgttcccaaattcatttattattataaataagtacactgtggctgtcttcagacacaccagaagagggtgtcagatctcattacaggtggttgtgagtcaccatgtggttgctgggatttgaactcaggatctctggaagagcagtcagtagtgctcttacccgctgagccatctcgccagccccttggatacccggtttatagctaggacgtgaaccctattctatcagtaacatgagcctagaaacacagcatatggagaaagcctccccgactccccgtggcctccttttgaacatgtttacagcaaggtctcaatgattaatctgggctggcttggaaatcagcattctcctgccgcagtctcctcacagggattccacctcacttctcatgtccctgccccacctcaacactgggagcccagaatatctactcccccgaagcccccccagggtctaactgccccaagttcagttgagtttatagttttcttgtttgttcttcctccgtatggagcatctgggctcttgttttttcccaaaggccattcaaccaaaagccaccttccacctcctgggcaacgcatggctggtgtctccaggttctttccatcaagcaagcgcatgatgcctacccaccaacacttacaggtctccttcaacacagggcttttattatatttattgaggggtgctatagtgcacgtatagaggtcaaaggacaatgtgaggcagtcatgtgggtcctggagattaaagccaggccatccgacttagtgacaggcaccttttacctactgagccatcctgctggcccagcacagaatgctgttgctttttcaatatcaaaaatggaattaagggctggagagatggctcagtggttaaagtactacttcctcagttcaattcccagcaaccacaaagtggttcacaaacatctgtaatgggatccgatgacctcttctggtgtgtctgaagccagctacagtgtactcatatacataaaataaataatttttaaaaactggaattaatatgacaaatgtggtggctcacacccagcacttgaggcagaggctggcagatctctgtgagttcaaggctggcctggtctacataatgagatacagggcagctatggctgcccagtaacaccctatctcaaaataatgataatgatagtagtaatataataaattaataaaaacaaaaagtgtccctccagccccatcggacccgggggacacctctgaaaatggactcgaggcaaggtggctaaaggaccaatccagtcagcatcggcccgcatcaactgcaggaaagctggtgttttcaacagtttcctatggttgagggtgggggtggggggagatcagaagaatcttctaaaaagcatgaaaatcacacaaagctcacagttccaatctctcaagttagtgtcactgggaatggtaatgcttacctcgtgacatcatgccttgactgtccccccactaccaaccaccgtgtaccctgtcctcaaacttccagcgagggccgtgatgtctgaccacaggatccgatcctgccttggtaacactggcccaattggtatctgggattttgtccttggggagggtccttctggcccctgtgtaaattccctgcctctgcctggcttttgcttcctcccctgaacagcagggttgagtagatccccgcatacaccaaaggacagactcagcgaccccacacagtgtgctcaataaatgcctgctcttccggactcccacctgccctctggcccccagtggctctgaccttcatgcttccccagggaccacagtggaggtcccggagtctcagatgggaggtaaggcaatgagaaggaggggatggtcaccatggagacagtggggctgaggtggcccttgctctctgactcctgaaggctaagctgggaggaagcagggttggcatggggttgacacagggccacagtctcaccaggaccaagatgttaggcagtacaatgtagtcactctctgagccatgcgacttgtcaggctggaaatggaggctgcggttctccacgaaggacacggtgtcgttgtcattgaaggtgatgttgaccttttgtctgaactccctgtaaaaaggcattgagtcagctgtggctctgtgaggtcacatgaaagcacccatcatctcccagcatgccctggggtgatggtacactgatacccaacagcaccaaggccaccaaatcaagcttgccacctcttgtttatatcctcgctgtctgtccagggcaagacactgccaccaccaatcagctcttctctgctttccctggtgagccataaggctctttgagcctctctggaaaacaactccaactgctgcccccaccccccacgtctccctttcacttgacaaccagcatggagcagatatccacacaggcagcgtttactgagagtttatggcatggcagacagagcttaagtggctccaactaactatctcatcttatccttgaacctacccacagtgggtaccattacctctgtctcacagatggggctaaaataggcattatggaagttaaaactctctgtccaaggtggaggaccaggcagccgctcctggatccagttttcaactcagaattccacctgcctctgcctcccaagtgctgggattcaaggtgtgtgccaccactacccagcaccgctcacttcttagatgctgcgtaactggcttcacttctgcatgtttgtttgacttttctgactcaacagcagccattttgcccattttgtgcgctgttgggtcctctgtgccccgcccccatgacaacacatttacactcacattagccctcaccccaggacacgcatgcgagtatgcactcgcctcggacagacaccgcctctccacagactgtcagccactgtggcctccggcttctctgtgtggctgacagtctgtggagaggcggtgtctgtccgacttctgtctctggagcaatcaatctccaaaactcagcatggcagaacacccccctccacacccacacacccacacacagtcccaccccaccctgcctggcctcacctgtagacatagggtccacgctcccggactactggcttctggccgttgaggacctcgtttgggttgaccacttcgaagaagtagacagacaagtagaaagggacggggatctccttccacatcccgaaggacaggctgctcgggtctatgcggacattctgtggggagacacagggaggagtgtgaggaggggcttccccactttacggctctgcaacagctgcctgagacttggcctgcgccatggaccctccaaggctcatctggaagggtgtctggggtggtctgaatgagaaaggccccacaggctcagatatttgcagcttagcctttagttggagaacggcttggaaggattaggaggtgtgtcgttgtcggaggaggcgtgtcgctatgggcagggattagggggtgtgtcgttggaggaggtgtggccttgtcggaggaagaggcgtgtctttgtcggaggaggtgtggccttgttgaaggaggtgtgtcgctaggggcagggtttgaggttacaaaagctcactccaagcacagggtccattggtctccctccctccctgtctctctctctccctctctgcctgtgatctcagctactgctccaacactaacttgctccaacactaactccacctaacttgcaccatgctccctgccatgaggataacggactaagcctctgaaactgtaaacaagcccccagttaaatgctttataatacagagttgtcttcgttgtggtctctcttcacagcaaaacagaacactggctaggtagtgctcatcgagggaggtgctcctagggctggagctctgcacaggtggctgtctctccattctttcagtcaataactcatccagaaagccgttcgttcgttcattcattcattattcactgatcatttcacatttactcccgcattcttttgttcttttcttcattcattcatttggtcactcattcattcatttttgacagatgaggttcccgcagtagcagacaggagtgggaagtagacaggctggctgtctccagtcccgtgaagcttttaccaaatcgggaagacaagggctttatgcaccgggtgggggggtgggggtgggggggggtggagcgggggcagagccagtgctgtgtgatgtactgaggagcagggagagggaagaggatgattcttgagtcaccagcagtgagggacagaagacagtaagcaggaccgggggcggggcttagtgattgcctagtgtgcaggcagccctgggtccagtcatgcagggctgtcatcctagcacttgggacactgaaggagttagatggtaactttgaggtcagcctgggatacacagtgaatgagacactctgtctcaaaacagaactactgattttctccaaggctaggaggaagaggtggaccattccctgacctgggacctctgctaatgccacagagctaagagtcaccacccccagctcatcagagatagcagtgtccaaaagccaaacagctttgactttgaactcgacctgccaggacaaagacaaccaccccactgtccccaaacagccagaaacaacaggcagaggctccaggggaggtggcaagccagaactggcaggtcaagcccagccccacgtcagagtagactccgaggcaggcggacactgggccacactctctcaggcctagcttggctctctgggcctggggtttgtccttgagtactgcaaggccggagtcatgaaagccatggctgggtctggcctgtcctcctcgggacccactgaaagaaaaatcccctgctgagtccacctaagagatgtcctgccgcaccttccgttggtcacccacagcctgaacatctggcaaaaacagagaggcatttcaagaccctggcacccttaggcagctgtgactcctgcaaactaccctgcagcttatcagcctggtaagatctgcccacggacgcattagtggcacggatattatgggtttagccaatactctctgactggatttaaggccttctccataggacgaaaaacatgcccgatactataaatctggctgagaatcaaatggctgagacaggctctgggggtgctgttcccccatgaccccagaactactattttgcttactgccacacagtgtaaaactgcccctacaatatgtatatgggccacagcaattggattgagtgggtaaataagggggaaaaagaaaagacaagaagaaagtactggctgtggtggcacgtgactttacttccaacgcttgggaggcagaggcacaaggatctatgtgagtttaagaccagccagcactatctagtgagatcctgtctcgaaggggtgaacaaaaccaaaaccaaaaccaaaatggatataaaatcaggagtggcctgtagggggatctgggaggagtagcaagcgtgtatcattgaaatacgttgtatgaatgttgtggttctcaaagactgaataaacgattttacatttaaaagaagagaagacatagatgcagctcagtggaaaagagcttacccagcccgtgcaaggccctgggttcaatccctaccaccacaaccaaatcaacacatggtggaaaactaaaaaaaaaaaaaaattaagagctggctctcggggtgcacgctgttggagcacacgccagtcactttagcgctcaggcagctaaggcagagggttgactggctttctgaggccagccttgctgcatggcaatcacccgcttcacaacagcaagaggacaaaacaaagacaaaacaggctttgccaggaaaaggtcccaggagggtgttccagcaaaggctggcctgccgagcaagcgtgcggggctccgtgtccacccatgacaggagtgtttataaaccgagactctaggaaacatctgtggagctgctgggagattaccaacctgcctctgccaacacgagacaagtcccacgggtgctcatggctccactcgtgtgtgtgtgacctggtggattaaattagatccatccccagccctgaacaaagtgggcacagtgcccacctctgccaccccagccctccagaagcacaggcaggaggagcaggagtcccaggccatcctcagctacatagtgaattcagggctagcctgggctacgtaagaccatctcaaaaagaaaaagggaggggaaggggaaggactcagtatactactgggggagagaatacagaaggaaatatgcacagggcgttgtgagtcctactgtgagaaattccagaataaacaaggctggcgtgtctcaataaaggtttttatattcttttaatctctgcagttacttatttgtgtatatgggtatgtgtgtgggtttgcttacgccagggtgcatgtgtggaggtcagaggacagttctccctccttccaccatatgggccccagggatcgaactcaggccattaggcttggcagcaagtgccttcacccactgagccatcttgctgcgccctccattgaataccgaaactgaaatgcacccatcatttttaaaaggtcagctgtaaagtcaagtagactatacttccccagaacactgcaataggaagctgaagctaaataagtgagggcatgggtgaggtacacagcccgggcagccagcgggtacttgtgtgcacttctaacatagatcatatctgtgcagtgccctatggctctgcggagcctctacctgggacaacaccccgaataccagctcccaaatgctgcctgccacccagggcaacctctccagtacaaaatgatttccaccccaactccaggatttctgatttgatatgtagctgaggatgactctgaaactcctgatctttctgcctccgcctcttcaatgtccagattatagggagcctggggtatcattacacctggctcacactgtgttttagacttttatatatttgcttgtttttaatttgcgggggtggggtgggggtggggagctggcttagtggttaaaagcacttgaggctgttccaggagactgaattcagttcctagcaccccacactcaaatgtgcgtgcgcgtgtgtgtgtgtgtgtatgtgtgtgtgtgtgtgtgtgtgtgtgtgtgtgtgtgtgagatgagacatactcctcataacctctgagccatttctttatcaccccatcatcaccagcacactcccgccatgttttaaacatcagttgcccacacaccccagggatgtcacaaccgatatcagaaagataacatcccagtttgaaaactctgccccggagggattctcaaggtttgagaggccaacagagcggtggagagcgcccgaaggtcctcatctcagacagattgtctcccttcgccacccagagaactctcaggagagcaggaaaggcagcctccccaaagattctgcttggcttttttggcacagaggactaggcagaatctcactgaaaaccatggggtgatgggcggttccctctgcaagcaggtggttggggtgttgcgggaggctgaaccacgaggtacctcatgtacagccaccagagtggggaatggaatgcctgtggggagtggccttcccctatctgaagcccagggcccagcatctttcagattgtggcctgcaaaataaaggagcttaatcaccaagcctaaggaccagagctggatccccaggacccacacaacagaacagaagactccaagacattgttctgtgtcttctacatgcaccctggcatatgtatggccatccccaaaccaaatggattgtttgtttatttatttattgtaaattttaccatgctaacactgacctataagcctttgcccatctggctcagtggcatctctagggctgtgtcttactgatacccccattagtcctttagaccagcctggcatgcttgctctgccttgcctgttcacacactctcacccaccaggcccttgcactggtcgtcgcttcttctgccttccatgtttgcagaggaagcctcctgggatcctgtgtctgtgctcaggaacccccacagagcccaccccgagccctgggctccctcttaaactcttgtttattccgaggctctccctgccttcttcccgattacgttaatgactcatcctgtgtattgtgctcacgtctctctgccaggccataaaccccaccaatgatgctcatgctggatccgtgaactctgagcagtgccaggcacctggaaggacctcagaggacttggaggaaggagcccaagccaattctggagcgccataatccatcattgtaggaaacaaacccccagcatcctgtgggcacctttgacatagtgtgttcttgagaacagagtttggaattctagggagatggctcagccataaagtgcttgcttcataagtggaaggagccgagtttggcccccatacaaagccaggcatggtggtgtatgcttgtgatcccagctctggagaggtggagacagcgggataatgcccagggcttgctggccagccaggctagcctaaaaatggcgagactcacatcctagtgagagaccctgcctttgaacaacaaagtgaggtggttcattggttagagcattggctgggttcttccagaggacccaggttcaaatcccaggacccacttggtggctcacaatcatctgtaactctagttccatgggatatgacatcatcctctggcctccaaagtcaccgagtatgcacatgtgcacagatacacacacacacacacacacacacatttatatttctaaaataaatgaccacagctcccacttcctgggccagctgtcaccaaagcatccctgagctccagcggtgagcctctcagcctcgtacagcctcttggctcccacccctgcttctctgtcccctcctctccactgcacattcttttctgtcttctctaaaggacactcattggcccaccagatcattaccttaaaaatgtctgctctgcaaacactttattctcgtgctttcggtggcagttggagacttggtctctgacatgaagccttgggaggggaccctcaggaggcttagccccactgggaaagggctggggattggtggtggggatggtgcagactttctttgccttctggcttccccactgtaatctctcggctcatagctgctccaagcagttcgcaacaacatgaagtggccccatcagatgtgatgctaacaccaagcctgtgtctttcattacagcaataccgacagactaatgcactgaggtttcctccttccgtggggagccatacgctacctcgactccattctgcaagccttggggatgtccaaaatgcacaccaagtgcccgagagacaggaaaactggagcaatctccatgctccacaccacaaaggtctgtgagcattctgatcatttgcttggacccctgctcccccacgaccccagtacatactaggcatgtgcttggcagcagtgacctgggtacagaataagcacagaataagccatctgccttccagagagggattgggtagggtggctgggcatcagagaaacaaaggctttgagtctgaggtggggtctgggcaagccaaactgggagtgagcaccataatccgggggttagcgggttctctgatggccaggatataggtcagtctgcaggaaccgaacacacttggacatcagaggctccattcaaaagaaaaacaaacaaaaaggcagctggagctgatcaaggccgccacatgaggtgctagggacccaacagaccctctgtgtgggtaacaggacacttctggtcactacacctctttaactctctgaccatatatcccaggtgcacaggcatcaggctcagaggcctctggttcatgaagatcacagagatggaagctcccccagcctctatccccacacaggactgcacaggatctccaggacactgtacctagcctctccaggccctgctcagtgtggctcagctcaggtgctgcagccctcgcaaagcaatcattaatctgacctgggaaattgcaaaatccagtccctcctcccccaagaatcacagcaaacacatttcaggttcaaaaaaaaaccaggtttttgagccaggctgacagaggtcggctcacacctttaatccaactcttaggaggcagaagcaggtggatctctgtgttcaaggctaacctggtggtctaccagggcagctagggatgcagaaagaaaccctatctccaaacaagaggaggaagaagaggaaggagagaagaggaagaagaagagaaggaggaggaggaggaggaggagagggaggaggaggagggagaggaaacagttctggtcattgccactgggttcaccagccctggatctgggttgagacacatatcctgtcagctctgagccagccagccagtcgcaatgtactagccctgtagagttactatgtatacaggaaggatgggccccaaaggacaatccagcctagggcatgaagacaccacacaccaggaacacaccaggaatggctggagagatggctcagtggttaggagcactggctgctcttacaaaggacctgggttcagttcctggcatccacgaggcctctgctgagcacccagtgcacaagaggctgtgtgctaggcctaaaccacagcagggaagaaaatggacaagggctggagagatggctcagcagttaagagcactgactgctcttccaaaggtcctgagttcaaatcccagcaaccacaaggtggctcacaaccatccgtaatgagatctgatgccctatgcatactgtaggtgtctgagtatacttacatgtaataaataaataaatcttaaaaaaagaaaaaagaaaatggacaggaccaatctttgtaacagcagcccctcccaccacactaaaagttccggtggtttcagtgaaacacccgccacccccacccagaaattcggtcctgatggagagagctacagagctaccttggatcatgggaaagctttgagactgaaaaccatacccaaaggatgacagagcataaagactggtggcctgtgacatcataaagccctccccaactctggacatatcccccaaattcacaagaatctctatgacgtataccagcacagccaaaaggagacggattgataatcacaagtgttggcaaggctctggggcaaccagaatgcatgcacgatgtcggtggaactgtgtcggcgccatggtttgcctgctagagctaagtacctgttcactgtacatcctggggaaacgccagcacctgcccgctggttatccataaatgttttcaagggttttgctacagtagcttaatacacaagggtgaagccgacgtccgattgagtggctgggagatgcataatctcatcctcaaatgatccctagacgtcaaagggtgtggccggtgagtccctcgggctatggggaaactggtttctgctccggtgacacaccagagcaggcagatacatcttagggacagaagtagaaaggtgtcctcaaggtataagccttgtgacctcactttgaccccagcttgacaaagcagagagcctgtccagctataaaagtcagagccccaggaaagagggctaaggtggctccatcagaaggtcccagcatcctctagggcaacatcaggacctagtgagtttccctggagacaagtggagtgagagccactccagggttcttaggaagctccctggttggactggactggacgcaaacacgtgggcacctatgtgtatgtcaatccccggaccatattccttctgctcccaagggctaccccaataaagtccctcagaggagaacccctaccatgctgaccagggagcaggtgcgcatatcaaccgtgtctggcccacagacagctgtcagtgggagaagcttacgggaggcgtgtgaggttggctctcgctctggggcctgttactgtttaacaggcttctggtgtgcagtaattttcccagactcgatagaaactccaacgctcaagtctcaagggccaaatgctaacatcggagcacttgtgtggtatgtgcacaggcccctggcttgctacatacatacatacatgcatacatacatacatacatacatacgtaggacagaagcagcttaaggaaggctaatctggctcactgatcaaagccgcagtccatcttggtggaaaggcaatagaggaagaagccaggggcagcttgccaggctgtgtccacagtcaggaagcagggaggggtgaatgactgctaggatctttctcctttttctctgctccagcagttaggatggctccatcacagacacatccagagatttgtctccaaggtgattctagaccctgtcaagttgacaccacacactccccagaaaagaaaaggaaacaaacaaaaagcaagagtgtctatgtgcccaccccacccccaaaccctgtcagacataaccaaggttagtctcaaaagcctcgtttctgactccctttggaaaactaggtgctgcccaacaagggttgcaccccaacactggtgcagcccacaggcagccttccctctaaccccaactccatggctcacatagtggccacaccctttgacattcccactcagccctgacccagaacagcacaggctgagaacacttcattcattcatcctttcatcagtcattcattcatttagctgttaatgaacctgtttgctcctttttttttcattctaacccgccccactcccccgcactgtcgaggccccaaactggtatttagtactacgaagcaaagttaaccgaactggattctgccctcagggaaacggttgtgagtggagaagaggcctcctaagtctgcatgactcagggacatgagaggaagtactcagagcatcagacgcctatgccggcatcaccgggtaacagccattaaagtagaatactgaagcctgtcacccactcccaattatctgccatctgtcactcaatcctacacatcgctcagagagatgaaaacaaccagtgagagacttagcgagattcctagaggcctccatcacagccctaatccggagcccactgaccagggaccagtttgctcataacatgaccaccagcaccaagcagcaaccagctatgacttgtaagcatctcaccagcctcaggctgagctgcaccaagccactgcagagctaggtcaggctgccactctgaaatcgcagaagcaagtcgatggagagcccagctcagtttaggtcaagccaatccatgcagaggaggctagtataactcacgtctacaatctctgcacttaggctaaggcaaagggattgctgtgtgacttccacgagagccagagacacagccagagcctatctcaaaatgaaaggctttctggtgccccaaaggattctgggagttcttgtttcttgatcctggcgcctaagtgtcaggctaatgacaatggttatcacttaaccaaggtccaagccagatggtgaatgcgaatcttttcttgtagtttttctgacaggttatgtcacccaggctagcctggacctcagtgtatagctcatgcccatgatcctccggtctctgcttctcgacagccacatgccagataagaaattgacacagaagcagattaccttgttgcccacccaaggcctctctgcctcctacccctctagaaacacatgtggttcacctgttgggtagagcccaaccatacagggaaggtagccctgactttagactgagtgagaagtctttgggagacttctagagaatgctttcagtagcagctacagacattagaaacgtgtgagttctccattgagccagtgccacacaaggccgttggggttggccaggggccccatcctcaggtctctacagcctaatccccaggctgttgcctggtccccttagggctccttccagtggcactgcatgcaatagcctggggcacaaggctgtccctaggaagataccaactcccagacacttcaaggaagacatatcacagagcctccagctgtagactggctggggttcaagaacaatcccagagccctgccaaacctcagaggaagggcagtggcagccagcatcagctatcagctcagggccatatttccagggaactgggttttttctaagacactcatcaggctggaacatagtcactatggccactgggtcccccttttacaaaccagagtaaggagggctgtgacccatgtcccttcaggggacatcagccataatgatttattcatttttatcatgctaaagtctccagacttgggttttgttttgtcactctccccccaagcccccaaccccagacatggtttctctgtagcctcagctgtcttggaacgccatctgtagaccaagctggtcttgaactcagagatctgcctgcctctgcttccactgctaggattaaaggcagtgccattttatagcatccattctgatggtgttaagtacacccatggcttgggcaactgtccccaccaatggccacgcccttccatgtccttctgagaccctgtctccacttaacactctccctggcccctttcccctcccactacctccttagtgtcccatttctccaacctcatcaataggtactctaggggccccagtaaacgaaatcacgctgcaaccatcctgccgtctctcagaatctaacttcagcattcatccatgttccagtgtgtgggagaattctctcctctgcagcagctatcgcaggactttaaagctgaggcaggaggaccacgagtttgaactatttacctggggactatataatgaaaccctgtctccagatagatagatagataaataaataaataaataaataaatggaatctctctcttcctttatacggctgcatactattccctcttggagagccctcttttcatttctgaagatttaatcttaattttattaatgtgtgtgttgctctgtgcacatgagcacagtccctaaagaggctcccagaagggtgtcagatctcctggagctgatattacaagtagctgtgactcgcctgatgtgggtgcagggaactgaactctggtcctttggaagagccatgtgagctcctgacctctgaaaccctctccagctcacctctctgtatttcatctgcttttcctatctgcccatccagcatcactaagtattgggacccttctaccttcagctgttgtgtggtgtccagactccccaggaggacggctgcacgggacagtgacctgacaccagcttctcatggcagctgcacccttttacagtaccagcaacatcacctacgacctactaagttcaacagaggctgtccttgtgggtttgcacgacctttgaccttcagcaacctgcagcccagtgacaggtgtcctgagcatctatctgctccagggctctcaccacctgtaaactacttcggatactcatttcgttttctgtcaggtggaaatgctccttgcctggccctcagaggggcctgcttctcctcagcaccagaggcccctccctcaccagtggccttgttagccacactcaccacaggccagtcacactgcccctcttgtgcaggtgtcaagtcctgcagacagtccatcaagaccctgtttctctgcccaccatgcaactccagggcctgggaggggcccagcatgcaacggggcagtcagctcaacaggaagagggaacacctgcttccccagaagagcctcagactcctcctcctctctaccctgctcctctgtgtctgtcccatctgccagatcaataatccccaaggttttggtgggactgaaagacacctggaggtgacttaaggcaccaagtgtcttaaatcgacacttagagctggagtttgtgggtatcccagctgctaggagacaggcaccttccaatcccacaggttttgtgttgttattgttgtttggggggttttggttttttttttcagccagagctcagctagaccccgctgtgggtctgggtagggggcaatggcactctctgaggccaggctatacatatagggttcttccacaatggctctccattggcctctaccttgaaacaaagcccattctatatctcccttccccttctcccccgcctccacttccacatgaggactcggtgaccctgactgctgatagctcggtccacttatctgctcctggaccacacaccatgaaagcccagactgggaaggtcagctgtggggagacctcgaaggccaggctgctcagtccactgcagcctcccgcccacagccatggccatttccctggctggcctcttctcctcacctttctttgactcgtccccttgtgtgagaggtccccggggacaccttcatcatcatcaatgactcccaccccagacaacagccttataggtaggtgggctgacccctaagtcctgacaactggatacaggaattaacaccaaccactctgcagaccgggaaactgagtccttgggagatgagaccctgactgagtcggaagctagacctgggcccgcctcctccattctactccatacggccatcggccataaacttagtggagaattacagaaaacacaggacacttcttagaccctttcaattatttttttaaatcacatttacttatttgtgtatttatttattatgtgcacaggcacagatgcaccacagcacacgtgtggaagccagaggatagataacttataggagtctgtctgtccttccaccatgtgggttccagagatccaattccggttactaggcttagcagcaagaacccttccccgtgatgagccgtctctctggccctcttcactgtcgatttgaattggccaccttgctacccatgccagccagcagctggatccgatcccggcaacacctctctgattccccaatgatacccatttatctctctcagccccagccccactgacaagcaggaaaccaaaggcgcaaggaatcaagttcttgccctcagccacacaccagagatgaccatccagagaggagatggtctaaagatcaagatccttaaggggacagctctgccaggggctgccacataaatcctgccatcttgatgcacagcaagttcctggacatggggatttgagtcaaggttcactcatctggcctcacacgggtacctctacctcagtgcctgtgagcctccacttgcagaaaatgccttgagtggacctcagtagatgggagcggatctggatctggtgagcttgcctggacctcacacagcatggtacctggagggtagaccaggctggccttgaactcagaaatatgagcctctcaagtgctgggattaaagacatgcgacaccactgcccggctgttctttttttttttttctttgagaaaagttcttactgtgaagctctgagggtgactaaacacggcaagtgacttcggggaccaaattctgtgttgattaacctttactcttttacgtacttaagccacaactttgagctaagcacgcccaatgatgtgtcttgtcctttaaaattataaccttgcagcggttagctctggcaacctgacacaacgtagattcccctgggaagagggtctcagtgaaggacggcctgcctacatttggattggcctgtggggattgtctaaatgattagcttatctgacctgagaagacctagtccaccattggcggccccattccctaggcaaggggtcctgggctgtatgagtggagaaatcaaactgagctcaagcaagcaagcgagcaagtatgctgaatgggggatatgtcaggactcctggggccctagaggaagctcagatctggtggcaccttaatccacagatgtgatttccaggcacccagccaggagtaattagtggcgtctgtagaaacaaatatatctcctgagaaagctccggaagacacgggaagatggtgctggaataggcccaatttcccagagacatgctattgaatgcacagccattccccgcggccttggctgatgggaaacacggctgatccctccagcgctctggaaagaagggggagacccagagccatctgagtgcccaatccgagactgcaaagtgcaggaagtgcgcacgggtaccgggggccaggagagggaggccagggagggcagggaggggctcttctaaacacaaacatgttttttgcagcaaggaacaaagagccatgaaccaaagttacctctgtgcttgggacgctgggggacgcgagtgtcatgtcacctttgtcttcccagagggtcattcccctctggactggcttcaaactcactattagcagagatgaccttgaacttctgatcctcttgcttcctaccttcaagtgctgagagccggctatcaggacagactggtgatttttgtcctgtagtttattttcacagtaggggctgtctgggcaaaaggtactctgccatgcatctatgtaggtggtgatcctaagatacttgactgtgccctgtgtgaccttaatcggaaatagggtctggccagatgtcaagttaaaaatatcagatcagcgcagtggcacaggcctgtcacttcagcacttgggaagctgaggcaggaggattgtgaatttaaagcctgcctgggctgcacggtgagactcttaactcaaaataggaatgaatgtcaaagtgtttggacttaggttgggtctcaaagaagagcaggggagctggaaagatggctcgatggatgcaggcatcggtgttcggttcccagcagctacgtggtggctcacactatctgtaactccaggtccaggggctctgatgtcctccggccttcatggggaccaagcacgcatgctatgcacataaactcatgcaggcatatgcacatacacataaataatactaataactcagttttgaagaggaaatggaaaatacaaaggaggccacgttgagacagagatagagacagaaacaggagcattgatgccgtcaactgaggaacggtgaacacctccaggaatggagagagccaagagccctcaagacactagaagcgcccagcctagccatgaagttcccacggcttaaggacacaagtttagacctaggtgactaacacaggcctctctaggaggctggggcaccaccactgaaagaaacacaccctgatttcagctctggtgatgggacagactcgtccttggcctctagcccttggcgggacgtttctgctggcctctatcaaactgtcatcccaggcaagatgcagacactcctgagccccatgaccttcatcacagattcctttttgggggccagtgtctctctagcccagattggcttcctactccctagagtagccaagcagaatctgagatgacagatagggaccatcatataaagttcatggggtcctgggggctgcccccggggcctcgtgtgtgccaggcaagcagctacaaagtgagccacatgctcagcgcaacacaaatgctctgaagaagtgaagcccaaacctcaggttagcctgttaaagtccttcaagttctcagagccttactcacaagccagcgaggctcagcaggctgcacagacggctctagacacaagtaccagccgttcaagctgaggacccgagtgcggaccctcgccccagcacccatgaaaaagccaagtgggtcatcaaacccagacatacaggtctataactacagcactctgggcattgggatcagtggagaaaggagggttcctgaagcttgatggtcagacagtctagacaatcagcaagctccagattcagtgagagaccctgagtcaaaaataaactggcagggctggagaggtggctcagcaggtaagagcactgactgcccttctgaaggtcctgagttcaaatcccagcaaccacatggctcacacccatccgtaatgagatctgacgccctcttctggagtgtctgaagacagctacagtgtacttacataaaataaataaatctaaagataaatctataaataataaataaataaataaataaataaataaataaactggcatgggaggtaggagagtggcagagagcttaactagcacctacgaagctctgggctcaaactccggcaccaccaaatatacatttacttatatatataaatatatataacataaatatagtatacattttgtagatttatataaatatataatttatatacacacacataatttacgatcaagtgtggtggtgcatgccattaatcccagcacttaggaggaaaaggcaggtgcatctctgtaagttcgaggctagcctgatctacatagtgagttccgaggctagcctgatctacacagtgagttcctggtcagcctacactacacaataagagcttgcctcagaataaacaaacatgcaaacttgagaatcatgggggagaacacccaacctagactctggtatccacaagtacacagaaatgcacccacctacacatatacacacactcatagatgtatgctcacacacacacacacacacacacacacctcagaaatgcaaactgaaacacccacaggtcgtcttcttcaagaaggctggtcacacagaactctgagagggtgaatggacacttgtgtaaccagcctgctaacagtaggcagccagctgcctactcaaacatcccagggaccaatctgaagccacccaatgtggcaggtcccaggaagtgtgttgcgtatgctgtatatggttgatagagttggaaaaaccagggcatctgtcaccatggtaacagacaagctctcacagacattaaacagggagaccaggcaacagcaaggagccaggagccagatatgcacacgggcaacccagataagatggtaacacctggctaagtgattggccagtgctgggatatgccaccacctccctggacactgtaaccagaatactagaatctacctttattcccacagaaaatgacagaaaaagaagacacctgatgtcatctttgggtctgtaggtctgtatgcacacacacacacacacacacacactcgtgcatacgcaaaaactcatgcacacacacacaaacatacatgtgcacgtacacacacaagtaaatacataaacaaaataaacataaaaccccctggggtttttttttgggttttttttggggggggtggttttttgagacagggtttctctgtatagccctgcctgtcctggaactcactctgtagaccaggctggcctcgaactctgaaatccacctgcctctgcctcccaagtgctgggattaaaggcgtgcgccaccaccactgcccagcaaaccccctgttcttgtgtgatttttccttgagactctttctattcaccccaaagtgacacctgacctaagaggagattctggcccatcagatggggtgcagcaatgatactggggtcacttatagaagcacggatgactcaaaggcagctgtgtgaccccaccccatccctagcaactgcttactgcatggctactccagggcacctcttcattcccacaagacccagtctttcaagggtcccagccactaatcacagagactctgatttcaaggtgtccacatagcgtcattgcctgaagcgttccaggtgccgaaccactcccacctgtctaccccacccccatgcctcaaactgtattggaatgtactggattcagagcccatgatggggccacagtaggttaaaaaaaaaaaaggaggcaataaattagtcaggatggtccctgatgcggtgtgaccggagtctacagcaagaagagctaggagagagatactgaggatagcagcagggagacagggaaaggcaggcagtggctgcaagctagacagcaggagcagccatggcagccaagggcatgcagcctccagaagagccagaaaggaagcggatgttgcttaagtcacacagctgatggcctttcacgatgatggcctggtaaagcaagtcacctaaggcagagaggtgagccaatggcactaggtcacatagctgggagaaggctgagccaacacctggaccccagcccaaggcctcggaacgtaagctctcacccacagtgatgtggatggatgggactgaagcagatggaagaacgtactcaagatcgaagccagagagaggatgagccacagagggagacactgacaggaggagacagggaaggagagagagaggacatgacaagtgagcatgtgtccacaccccacagcaccacgctccccacacccacaagagccactagctacctgctgccaccggctaaagacagataaacacaatgtgacatctataccattaaaaaccgcacacacacacaaaacattgtccagtcacagagagttaggaggcacaggtatacgctattacatagatgaacttgaaaaaaacgggccacagccaggatgcaaatgtggtcaggcttggcggtgcgcatctgtgggccttgcatgccagagactgagacagaaagactgataccaggttagtctgagctacagagcaggcttggtctccaaacaaacaaacaaacaaagcaacgaaagcaaaatgccacagcaataaagtcagagtttgtagacactaaaggaagttcaaaaccagaccaagtcggatatatagggatggttctacaaaaggcaaggagcacccaagggtggtggctccctccagcagggcctcgggaccatgaggctccatcttttcacctggggctgatttaacctgacggatgtgtattatgacctttgttagaactttgtactatttcacaataataagaaaggaagcgcaagaggcacagtgagggctgggaacagacaggagaaggagatcccgaggccagcgcaggtcaggaccccagctacaatggagcactggctaagatgggctctcagcccaggggagcctcctgggctaagaggccagatgaggggaccagggccagggcttagaatttctgcagggctcagaggtcaggatgggggttggggtggcggtagggagcagagcaggatgagcccccaggtcccaccttcctgggcctccaactccagaaggccagctctgacatgccaggactcctacagctgcaagggtgggtgggagccctgagctggcctcagcctggtcgtcagagggatcaacacctctccgaacatggaggtggggctgggaaagccaggaaactcaagcagaagctggtgcaagaaactctaagccccgctgctcgcactgcctgctcagccaggataaccctaggcagtttatgtgcagggtctgtgggaagagcacatagcaaccacaaccagggcgccctgcctagaaggtggccatcagctcctgggaaacaaggcttgcagaacaggtggcaagagaggcctggttgtaccactgataggaggaaggagatccacacaggacaaacctctaaacttaacagctacaaccaaatatggactctgtgggcaagcctgccaccccaggctaaagcaggaggactgaacatccaaggctagcctgggacacttagtgagactaactttaataataatattaggaaagagttgggctttcaaaatggctcagcaagtaaaggtgcttgctgtcaacatgacagaaaagggaactgacaaactagggatgtcctctaatcgctatacaaacaaacaaacaaacaaacaaaaataagggccagagagaccgcttagcagttaaaagcatggagtgctattgcagagaccctaagttccatttccagtaccctatagtcaggtggctcactagaactcttgctccaggggatctggcgccttcatgtggcctccacaggcacctgcactcatgtgcacatacccacacaaagacacataatttaaaaaaaaaatctttaaataagtaagtgtaaaaaggtttttaaggagaaaggactggggatatggcacatcaagcaggagaccccaggttcagttcctaccctggcagaaaataagtaagacagatttgaatggaaaaaggacagagctggaggcagaggcctcacacacaggggccagcctgtagctgcaggctgtgggcaggaggataagtgaccttgactctaacagaggtctacgcacattctctgcagggccaagaggtttgggtgagtgccaatgtgacccactgtcccattgtgtcagcgatttttccaaaacaataatttttaaaagaaaaacctagacgtggggagggagaacagccggtggctgagtttactgggacatggctagccagcaaggtacttgggcaactgcagaatcagtcttgagacatccccagccactcttaaggctggtgggaaagctgggtgtgccatgagcatgccctgtgacatctcagagcaggatgtagaagagaagtcagttgcaagcattgatgacaggtccccgaggatgtgtgcatcagcatactgagcgatactcagcagcttgttattctaggtgtttaacaggtatgatctcctcagacacaggacactattaagaacacggtgaaaaggcacagaggaattaaggcacttgcccgaggttacccagcagggaattggcagagccatcccccgcaaggctcaagcccagagactttccaatgggtttacaaccttggcagtgaccctccaggaacacactcacctcccacctctcctccaggcagacggcaaacatgtgggtagccagagagcccagctcggcttacaaagagacactagcagaagctcagcttcagtccccatactgctccagaaggacatggcgtacctcagagtcttgggtaagagccaacagctgctctgtctggggcgtgagccgactcctgagctatattgcagaacacgtccagagcagattacctcctctgcatctgagcctgatgccgagtgtagtgaagggcgcggaggcttgggctggttctcgctgtttgcatcctacggcgcactcagagcctcagagaaggcgcatagagcttgaactttggtataccgggtcctgacatctctcctactttatcaaaacacctcctcccactcctacagtcagatgagagcaaagaagaggtaggtgggagggagctgggagactgcccgaagtcaccagaaaacaacatgactagccctcacttaccgagatctcttatctttccctagcccagcaccccacttccccggccagcctggcagttaacctggcccacgaccagctaacactggctaccaactatggccttgaacagatcacagctccctctgagatctgggtccttaaagagaaaaataaaacacaggcgctaagctgggcggtgatggcacacacatttaattccagcacttgggaggcagaggcagacagatctctgtgagttcgaggccagcctggtctactgattgagttctaagacagtcagggctacacagagaaacccagtctcaagaaacaaaataaaaacaaaaacaaaagcatgagggcaggagagatgacttagccaataaagccccagcagccaagcctgcctgagttcaaccccatgcataatggtagaagaagaaaactgactcttgcaagttgtcctctgccctctacacatgtgtagtacacatatggcacccctaccctccacaatacacacaaataaacaaacatgtgattttaacaaacaaaaagatgggccaggcactacggcacatgtctttactcccaggatttgggaagcagaggcagaaggattgccaaaagtgtgaggccagcctgggctacagtgtgagcccctgcctcaaataataataataataataataataataataataataataaataggaaggagaagcagaagcagccgtagcccgtagcaaaatctgggcgtggtgaaatactctaatcctagcactcaggagggaggtagaggcagatggatctctatgagttcgaggacagcctggtctacaaagtaagttccaggccagccaggactacatagagaaaccctgtttcaaaaaaccaaaataacaatgaggataagaatgaaataaaataaaaagagagaaacccaagtaagtacttgaagacccaacaacctaagatttataaaatttaccctggcgcgctgcctccccaatcaaaaaagcctggagccagcgtcaaaaaaagcacccatgtacgtacataagaggcagcgagcggaacctggggtgatccggtgctaactaggggccaagggttctgtccttactctggctacctgtctcccttgcctcctgccaacccatagaacatcgctccatcccctcctgagtcctcagagagagcgcctctttccaaagaaagctttcttgacacacactgattggctcaaacatgagcatgtgacctaagccaatcagaggcaatggacagccccaagccccgcccccttctcccagcccttaacgtcattgctttgcatttgttattgttttttgcatttgttatttgagtgtatgtgtgaggagtgtgaatgtgcctgaggtacacccacagcggtcagaggacaacttgaaagagcctgttcttttcttccactgtgtgggtcccaggatcgaacgccaatcaacaggcttggtggcaagcattactcactgaaccctttagacagcctctttagccagggctggcctccaattccctctgtagtcaggatgacttaacacctggttctcttgttttcgcctctggaatgccaggattacaggtgtgtaatggcacccagtttatttttgttcttcgcacctgtgagccacacctcccaggtccttctatatagatcactggcaggagaaagcagctgtccactgcaccccgcactgcatcccgcactgcatcccgcactgcatcccgcactggggcaggttatctggaactccggggaggaagtgacttcgctttattcataaacctaaacttgtcccctgcggaggactgtacacggaccacgtcaaaccaaggctgctgaagactcccgttcactcccgaaggccgtgcattgcaaacctgcaccccacctcctggtctctcccgcccttggctaagacaggtgtgatttatttatccaccgcccacagccatcccgatgacatggctgagaactgggtctcttccttctggtccactgcctttgtggtgggacaggaagaggttactgggggaagccagcagccctggcacagacaccagtgaggagttgctggagtcaagagaaaacatgcagagactcagaccctggatctagggtcacctgccagagactcgggccagtgggtgtggtctgggacatatgaacaccaactcacccaggtggcttcaagaaatggcatccaggggacagaggctcatggtctgaggcttaggtagtggcatcaggaggcagccccctggagacagaggcacagcccttgctgggcagtggtggcgcacgcctttaatcccagcactcgggaggcagaggcaggcagatttctgagttcaaggccaacctggtctacaaagtgagttccaggacagccagggctacacagagaaaccctgtctcgaaaaaccaaaaaaaaaaaaaaaaaaaaaacaaaaacaaaaacaaaaacaaaaacaaaaaaacaaaaacaaaaaagcaaaacagaggcacagcccccccccccccaatggagcagaggcagtcagcaaggcttgtgacctcagcgatggctgctagggtcccaccccagccaggccaccactgcaggagtaaagctatgtacaaaacacaccagatccccatcctggtaggacatcaaccaaaggaatgagttcactagagatgggcgcaaggaaacttccaaaggtcaagggaggtcagggaagctgggaccaggaagtgtcttcaaaaacatccccacacaggctttgggtgtactggtgtgagaacacttgtctagtatgagtgcctctctgtgtccctcccaagcaccccaaaatacaaatacgtgtcatttattttgaaacacaggagaggaactgagtgaaagagccaaggggaaaagtatctgggcagaaggaacttccggcgcgtgtgagaatggaggaggagagagacttgtgggcttagaacagaaccgctgactggccagacaggttggagcctgtgaagaaaggactgatggatcggggcaagagtgagtgagtgtgtgcgtgtgtctgtctgtctgtctgtctgtctttgtatgtgtgtctgtgtgtgtgtgtgtgtgtgtgtgtgtgtctctatatgtctctcctccgtctctgtgtgtgtgtgtgtgtgtctatctttctctatgcctctgtgtgcatgtatgtctctatgtgtgtgtctctgtgggtgtatgtgtttggctctttgtgtgtgtctgtctgtctctctgggtgtgtgtgtttgtctgtctgtctgcctctgtgggtgtgggtctctctctctccctctctctctctgtgtgtgtgtgtgtgtgtgtgtgtgtgtgtatgtatatatgtagaggccagaggccaatccaacctcaggtgtgctccctccagcactatctatctttttttttaagatcgattctttctaaagcctggagctccccagttgcgttgcaggaatgaatcccgggagccccatggagtctcctgtctctgcctccccagggatggaattaccagcttgtttgacgtgggctctggggatcaaatccacatcatctcacctagctggatcctgaaacagctttaaactaaagcactgtgtcttcgaaagagcactctgtctgtgacagggggaagtgccggatcagccggatcacccatggcaggacagtagcaccacggcacccatggtctagcctggcacaggacttcctagtgccagggtaccagaacaccctgtgattcgaccctgtccactttgggtaaacatttgggaacccaaggcccagtgtctggcatcagttccaacgctggggacaaagaacaaacaccacagaggtccttgccctcctgagcctggggactccccatggggacaacgtggcagaaggaaaaaagcccaatgtacatgtaactagtgtggcatattgggtctgaattgacctcagcggagtcccacttggaaatgtcagacattagactatagacctagcccacgcacgagaggaatcaaggggtggggtgtgcaagccagaaaggtatcagagggcaaggtactggcctcttgacacatgggaaggacctagggtctgtttctggctgctgtactgggagctgggaggaacacaagagacagaggaaaggaatttaaggatccagataagaaaatgacagaagtcagcctcgggaaacggacaaaaaggtgggagacgctcacttccccagggctcacgtgtgggaagcagagagggcgagggaaggccgctgccaaggtcgtggcttgctgccgccacaagctagaagaccacaggccaagctaaccaggaaggtgaagggggacaggcctggagttgaaggggaaggtcaggaaaaagttgagccacctggcacaccagactcctttgaggtcaaggcccaggaggggacagtttggggctgagcagggggtgggggtgggggggttgggggggaagttaaggccctgagctgtgaattgggcctgggcatattccaccagagtctggctgaggcaaagggggaaagagaacccctgccccacgagaaccatggagacaacccacagccagagaggccccagccaagacccttttctagaagcttccagagagggtggaaggaacttcattgaaaagccaggaagcaagcaagggtcaggtcactcctattccttcccctccctaggcagctgaagatcacaaagcagaggagatgggagctggggagaggccagaaagcccgggatctgaggagaggggtggaaatcttccctcggcagccatggaacctcctcagccactgggactcagagccaggctgagccagacctgggtttttttgttgttgttgtttctctttgtagctcagcctggcctgaccctgccctaggccagtggaggccaaggtcaccagtgagggagagagtgaggagagaggagagaggtaaaaggatcaagtgtttttgttttctggtttttcatttttatggaattttttttatttattttggggggagggtagcccaggctggcctagaactagcaatccccctgctttagcctcctaacctgtttctattttgggcagagccccacctacacccccacccacccctgccaggctaaatcctcctcaaactaaattgatggcacaggatctggcactgaaggtattgagtttcaaaccctgcacaaatggtttaggtggctagttaacatatcaaagcagacctggctgccacgttctcccagcatccctcagtccctaccagtttcagaaccccttcaggctggcataccctgccccctaccctgaactctatagcccagagggctgggctactctccccaggataatccaaccattttgattgccctccctccttcttggcagttgcacctggctcccctctctcctctccttttccctccccctcccctcatctagctcagggttcaaggtcatgtccactctggactcttccagcggtctctgcctctagctatgttctcccgttctcccttttatctacaataaaccttctcctccactatacccaagagcatccatgttttcttctctctctctctctctctctctctctctctctctctctctctctcccccccccctctctcattcagaaggcctctcagctgaactcatggtccttaagagtgaaatgtcaaacatccagtggcaacctggggagaagctcacggtagcccagggcctctcttttgctggccaaggaaggacatttgaatactcctctgtaccctaaaagccacagaaggccacagagctggcagcctgggccaagcctcctaggaaccaagatgcacctaggataagctctgcagagaaccaagtggctctctccaggactggccccagagtcggctgctgggatccaaggccagagaacaggattcctggtagccgaactccaggaattggagcgaatgaggggatgagtcactgtgggaagatagcaaagaatccatccttccaggaagggtcccagggtaacttccttccaggaatgcaacaggagagtctggcttcaaaataccagcacctaactactgcacacagtgaccatgcagtgcccgtgaccccttctgtctgctgcagtgctaaggtcggagcccagtggcttgcacctcgaaggccatcattctgccatgcagccatgtccactgcccacccccagcaaatggaacaggcatcaacatatgtgcatgtgtctacatgggcccagacaatgacccatgtgcctgcatccccttcctggcttttctccatgtggataggttgtagctcgtgcggtacacagaaacactcacatccatggatgtcagcactggaccatacatacaccaagctctgtctgtgtgctactatacctgggggacactattacgtggacccgcaccaaaaggtgtgtataccaacagacacacacactgaagctatgaggacttgtggatgtacgaggagccagaaaggaacagaaataaatgcttgggactaaaaataggtagtctatagccacagctgcaccctgaagggaactaaaatagttccacacatgccagggggaccggaagccatgggaaccggaaaccaggcatcaggaaagaggaagaaaacagaagaaatcccagcacacccaagcattcttacccagggcccagagaacagggaacttgcagggacacccatcctgacatctggggccccagtctccacttggggagcagcccacgatggcccaggcagaccttgatcccaaggtcacagggtggtacaaactgggaaaaggcagaccttcccacttaagagtcctcctgaggaggtaccaaggggtgctgaatctgcagccttctcttgtgggagaaaaccctggaatacacccgctagccatgcacatcgatggaagagaagggagaaaaagaaggaacggccagtcaaggccagctgttcaagggttacaatcttttagcagaggctacatcttggttctgtcacctaaatctggaatgcggaggtagagggttggggtggggagacatgggacaccaggggacaagttttacttaatctctctttgtgtccctctccctagatgaagcagagagcaactgtagtcgtttagatacttaataaaaggctctgaggagcatcgtaacacagtatctatctacaaggagctatctgccatcagggacaccttccaagtgtcaagccaatgggctctgccagaggtcacaaaacaactcaggaacagagtagatatcccaggctagcccaactcctagctgtgggagaagggatcagattagaattgaggcaaggaggggtagagagccagctattggccagcatccagtcagctccctagcccttcacctggctgaccaacttctcaatcaggaaaaagagcgagccacatccaagcctgtgacagaataaggatggtgggctggagggatggctccgaggtttacaagcactggctgcacccatagagaatctgagttcggttcccagcacccacatgacaggtcacagttccagggaatcctgacacctcttttgaccctcctcaagcaccacacacgtgaatacagacaaaacactgaaaataataaataaatcatttttttagggggatagggcgttttgagacagggtttctctgtgtagccctggctgtcataaaacccactctatagaccaggctggccttgaactcagagatccacctacctctctgccttccaagtgctgggaattaaaggcatgtgccaccaaagggacacgccagggcctctgaagagggactaggtctaatgggctcaaaccaggagcatagtggtgtgggggtggggtgctgaattgagggtgggaaagagaaacaaattgggagccttcaagctgctgagaggaatttggggttcactcagaaaaagacgggaatgttagagagtctgagcagggtgggcaccatccctcactagaagagcaggatagactaccacacgggtccaagcaggcagtaaggccatgggggtagaggggtcataaaaggtaatggtgaagcaggtatgaggtagcagaaagaacaacggagcaggtgagggcagcctgaggcttccgctttgcacctaggggacacatgggacagaggagggaggcatcagcagatgaacagatcacgcacagtgcaacaggaaatgccacgtcaggacagtggagctgatgcagacccagacttgggaaagattatgaggctctgtgctgaaggcggtggccctgtggacgggcaagccgcgtgccaggctgggttctaggtgagacacacaggggttccagggctggtgggtttccctccgtgtgacacttacacacactccaagaaagtcacggggtacttcttaccattttcagctgtttccttaactgacaaggacctgtgtcaaccacgctgcctgtgccggctagctttgcgtcaacttgacacagtctattgtcatttgagaggaggtaacctcaattaagacaaattcctccataagactggggggggggggggggggggctggagagatggctcagtggttaggagcactgactgttcttccagaggtcgtgagttcaattcccagcaaccacatggtggctcataaccatctgtaatgagatctgacgccctcttctggtgtgtctgaagacagctacggtgtactcatatacattaaataaataagtaaatcttaaaaaaaaaaaaaaagactgggcaatgggcaagcctgtagaacattttcttaattagtgattgatggggaagggcgtggcctattgtgggaggggtctccccagagctggtggtcctcggttctgtaagaaagcaagctgagcaagtcataaagagaaagttcgtagcagcatccctccatggtctctgcaccagctcctgcctccaggtccctcccttgttctagttcctgccctgactcccttccatgatgaacagtgatgaacaagaagctgaggcaggaggatttcaaataaagcctgagtaatacaacgaaaccttgccctaaagaactacaaacaagatagtaaccattgggctcagtgagacggctcggcagcctgacgacctgagttcaatccctaggaccccacttaggagcaggagagaaatcactcctcaaagttgtcccatgacctgcataggcatgttgcagcaccacccctccactcacacaccaacaaatacatacacataatattttacaaaaagaatcatgatggtttggagattgctcggtggttaagagccaggctggccgctctgatacaggacctgggttcgtgaaattcctagcaccctcatggtggctcacaaccatctgtaagtccaagttccagaggatctgatgtcctgtctggtctacaagggcactgcatgcacagaggtacatgcaggaaaaacacccctacacataaaataaaacaaaaatgtacagagagtcgtgcagccagcattatctaccttgtgtgtctggcacgcacccttccgcacctttttctaaaccattttggcactaacacgagtctgttgaaaatatagaatactgttagggttttgatgtcattcttgtcattttgggtttggttggttggttgacttgttttgtcttgagacagggtttctctgtgtaaccctggctgacacagagatcactctgtctctgcctcccgagtgctgggattaaaggtatgagccgccgctgcgaccaccgactggctgagggattttggtgtgtgtgtgtgtgtgtgtgtgtgtgtgtgtgtgtgtgtgtgtttctctttatgttttgcagtgctggggattgaacccagggatgtgcacatactgggaagcagtctatcaatcagtgagctctatcttcagttttccacttacctatttatttatttacttacttatttatgtgttatttatttgtgtgtttgtttctttatgagacaggatctctctctatagccctggctatccaggcacttgacttgactcagagatctgcctgcctctgccttctgagcgctgggatttaaaaatatgcactaatgcaccttgcttacatttgatataaagacaggggtctcactaagctcccctgagcttcctgtgcaacccaggcaggctctgaacttcctccggctttgaatattcattcctcctgcctcagactccaagtagctgggatgccgggtaagaggctggggaagagggactttaatagtaacagagccttttttctatcatgcatgtcttcctgaaacctggcccttcttaattcttttcttggactgcccagcagctcactgtacagaaagagagggctcttgcttgcttcctacttccctatggaaggtaaaccgagcatggccgcttgaagtccctcccagcccaccacaggccatgtttaataaccagctgccgacctttgctatgggccagatcccttatctgtagagaggaagaattcgcagcctctgcctgtttcacaacgctgccgtggttagattgagtccagaagcaggcaagctcacagggcatttccaaaggccgcttgtaatctcctttgcaacttgctaatccctcagggacagcaaaccagatctgacccctgtctcactgctgggggaaaaacttggctctcttgagtgatgaaccggctccagctagcacatggtacagtaggcctgagcccctgagctctgaaaactgtcacctacacggggatcacgttcctcctgcccaaccttgtggcgctgaagatgtgaaatcaaaaccacaggtagccaaagagggtgatggggtttagaaatgacacttcattgccatcgaagtggatggtcccacagcttgacagcgggagcaatagtagagaattccaaattccaaacagagcgcacctgtgggtccacagctaaggctcagaccgtgcaagtgttcctggactcacacaggacgctatgtgttctctggagtctgagacaaagacatggccagtcaacagaggaactgtaaacaaaggaatcccagcacagtaaggggggaaaaggcagtaacagacttggcatgttcggcctgtcaaaacctttgaaaggggctgggaagatcgcccagtgggtaaagtgctcgctggaggatctgagttctgattctcaaaacccaaacaaaagctcaacacagagccaggggtggtggcctatacctttagtctcagcactcaggaggcagggagagcctacagagggagttctaggatggccagggacacgcagaaaaaaaaatagctgagcacgtctgatacatgtctggaaccccagtaccaggacaggcggagacaggcagattccagggacctgttgttcagtggctagcagagaaggcacacctcatatttaatgagagagcctgtctcaaaaaaataaggtggagagacactgtggaagacactgcacttcaacctctggtctcaccgcgtggcaagcacgtccatacaggtgcatgagtatacgtgcatgtatgtgtgtgtacacgtgtgcgtgtatacacacatacacacacaggcatacacacacccctttgaatactaacactgaacagaaaaaccatactatttaagccaggcatggtagacagacctttaatcctaacactcaagaggcaaaggtaggtggatctctgagtttgaggccagcctggactatgcactgagttcctgggctatctagtgagaccacgaatcaagagaaaggagaaaaaagaagaagaaaggaaggaaagaaaggaggaagaaaagaagaaaaccacatactatccaactcgggttttgtaaaagatgtccacgctaggcaaacatgaggacctgagttcaaactcccagtgacatatacaatattgtgcatcgataggattgcacctgtaaccccagagacagggggatggctgtctagctcatcaagagaccctatctgtaagggaagaaatcaggtgacctacacacacacacacacacacacacacaatttatgtcaaaaaatgatatcatcagaagaaaataagagtgaaatctctctctctctctctctctctctctctctctctctctctctgtgtgtgtgtgtgtgttggaacccaaggccgttgaatgcaaggtgtgtgtgtgtgtgttggaacccaaggcctgttgaatgcaaggtaagttctctaccactgagctacaccccaagtcctgaacttgttttcttaaacaacctagtattcctgacttttataaatcaacttctttaacttacaaaaaaaaaaaaaaaaggaaagaaagaaacacacacacacacacacacacacacacacacacaaagacaaggcttccattcaagtagcacagaacgcaagaatccaaagtcaactccagggtccctccctgctcccctcgctgccatcctcccaccatcccctgaagtgaacttttttttcctccctcaagaggtcggcttccagccagggcctctaagaagaggctgttttgggctaggcgtgtcttaggctcttccttccttcacgccactcagcccccaaccaatcgcctttgggattttcacaagtaagattgtggaagccgctcgctcaaacgtgaagccccaagctaccagctatggggcaattctgccagtcgtggtctttctcaagcacgggcagatgggaccctgactgatggagcaggcctgcgcagtcccaacgctaacgtgcacgcccacacacaccaaccccccccatccttagtctctgtgccaacccccaaaagaaaacattcccgaaaggagtttgagaaggaaccagctcagattccccctcacccccaaatcgaagaacaggggatatctgctcactctacccactacaggctggctgagcaggaaacccagtccacgtgcggagtgcacagggctgggttcttactgaaaccacaggctgccactgagacaaggctgtcaccactactttgccaaacctaacagaaaggcccagagcaattctgatgctccaacaagaaggatcttccctctacccaagacagggcaactcctgggaccttcatgtacaagggttgaaaattctaagcaagagaaatgacagtgtggccaagagaactcggaaatacccaccacaactccaggaaagccacctgtggctccatcctgaagacccgccaggacctggcaggtagcggccagcccaagagggagtatccctcattcattccctcctttcagcgggcgatgggacatgggacacgaagccattcttaaactcccagtaaacaaacccgctaagaggaaagatgtcagtcaaaccctgtgacaacagccccttctggatcccagatccagttctaactggatgttccctgagagccagcccccgtttccccttccgcagtaaccctgcgtctcagaaaacacaattactcggtaatctccaggacttaatgagctcccggctcaaatagaaggacaccggatcccagggcagagtctgtggctggaccggcaccacccgcctaatatcggtgcccggttgaaagggcaaaacagggcctaaggctgagatcaagggagaggctgggctgcctatcctcggcagacctgagtcgtgtctacctctgccagagcgtggggggcagaaagcagcttaactctcgagactggcaggcagtgtgggggcgagccagggcatctctggggcatctgggcgggaggaaacaggcagagcacccaaagaactggagcccgtgggagcctcacagatgtacaggggtttcgcgcagctctgaggttactaggtacagtcaccggccggcgcgttcagaagggctggaggtcgcgacagctacagtcgaaactcagggacaaccaggccatacttctgcttcagtgaggtttaggctcctgggacgctggtgactcagaccaagcctctggggtgagcctgggcctccctggtggtgaggaggtagctccaccgtcccaccctgcgtcccgatccccaacccccatctccccaagacacttcactcaccttgagcacctgctgcttgatgagggagggcaccatgaggatcatgacaacgccgagcgcagcaaacagcagccccagggcgcccaaccccaaggccacccagcgcgccctggagctgccgcccatgtccgcgtgcgcggaaggggctctcggggctcaggacctgaaggagacggagacagaggtgacggaggccacagagatgacagaagccgagactccctcagcagcaaggtgtgtgcctggcggtggccggagcagcagtagccctgcaggtggccagaggctttatgcgccatggcccgggcagcccgcccccgagttcggcgcgggattccggcgaggggtgggaagaggcggggagtgggcggtgctctgatggtgaggcgtgggcgtggcttcctttgggcgccgcccctccgagctgctgggctttcctggtggttgctggtctaggtgggaaccgatgtgccctctacagagggcagaagaccctggcaccgtctgcatccactacccccgcccctgcgacctcttctttcttccggactcctgcgaatgcctcccgctcccctgcattaaaatcagttgcagtcagcccgggccagcctctgggccatgaacgccctccactcaaaattccgtgtccctcggggccctttgcacttcccccactcggaattccatatccctttgggcttttgcacaccctccattctgtgtccctcgtggcctttgcacactgtcccctcggaattccatgtctcccgggacctttgcacacccttcgtacagaattctgtgtccctcgaggccttaagcataccctccactcaaaactccaggccccagacacgcgctgggcccctgactccatccaggaatgtgttcgaggggcttatcagactgcctggcggctatgctctctgctgactcttccttatcacccagagacaccaccagctcagttgagctcagttatgcgttctttggccatgaaccccactcaggataccagcagggtggtagggactctgtctttccctgctctgcccagtgcccagttagctcgttctcagaccacagccagagcctttaagcctttaattctaaatgcttcgtgttacagccaaaaaaaaaaaaaaaaaaaaaaaaaaaaaaaaaaaaaaccctgaggcatggggtgacttccttcctcagtgaggccaaggcctgcattccactcaggacacaaaaagtggatacggagctgagaaaacccagccccacacctgttaaaaccgagtcccagctcctgttaaaacccagtaggactgctcttgaagaccaccttcagcaatatgacccagagttagctcatattgagtcagagtaggttctccagagacagccaagtcatatttccagccctgacagattccacccatcacatggaataaagacttagctgtgcaaaggaccgtattggtagagtgcttgacacctgatattggtcgccagcatccgtgttcaggtgagatacccaggcctgaagagatggctcagaggtagacatggctcagtggttaagagcacttgctgctcttgcagaggacctgggttcagtccccagaacccacatgacagctcacagccatccttaacttcagttccaagggatctgatgcccctcctctgacctctgagtataccacgcatgcccatggtacccagacagacatgtaggaaagacaattgcacacataaaataagtaagtccaaaacaaaaacaaactctaggctggtagttccagtgcaggggagtcagggacaggaagaaagatccctggggccagatggccagccagacttctctaacccggttcctagtaagatattctgtctcacacaacacattcaggtgcacccacaaacatgcacacgtgtagacacaggagaaagacagaaaggagcctagaagttcagtagacaaaggagcaggggtgggcggggcctgggaacattggctgtgttacacccgcgcatgttccaagttcagaggctcatgagcgaccaactggctttaagaagagcagttcacacctccaccttacagaagagggtcctcaggactcggggtgggagtcctcacagcccaggttcctctgaacctgctcccactctgtgcccctgatgatggagatgggaggtggggggagtggggctgaaagtctctccagaaactacgtggtgctcagggacatgtttgctaaaggtggtcccaaagaggagaccttctagatttgaacgggaacctgagtggcccgtattctttaggagtgttaaccccggggtatctgatgtcactactgggccattctatgtgacctaggaggaggccgaatgaggcagcgaaatcctagagatctggtctgcaggaggttatccaaagggagctgatgtcatctcagaccagagggactgggttttctcagccatgattattatgaaggaattctctagatcctcagtgcctgactcctcctctctcaagtctcagcctgaagcctactcatcaaagaaggccttcgtgtccaatttgttggaaatgggggtctttacaggcatggcgagcacccctgtgatcccagcacttggaaggaagaggtcaaagaaacagaagttcaaggccaatcaaggctacatgaactcctatctcaagccaaagaaaagggctggtgaggtggctcagcaaggaaagacacttgtcacacaagcctgaagacctgaatcgggaatccaagaacccatgagggatggcgagaacagatccggttgccatggtaaccccacactcaataataatagtcaatagaattcaaatcaaaagaaaagaaagtaagtggtctgttcagttgaaatggttttatttatctctctaaagagagaggtttttttttatgatcttttaaaaatttttgtgtatttgtgcagtttcacaaagccaggagaaagcggcagttctcctgaaaccgaagttacaggcagttgtgagccaccgtgtgggtgccaggaagcagattcagaccctgtgggagagcagccagggctcttaatccgtgagctacttctccatcggagaagctggttctttttgagtatcaatatatccctggcccctagaactcactccctcaagttgtcctctgacctccaaggttcaaacacacaaaataaataatggagccaggcatggcaatgtacactcttaatgctaccactaaggaggcagaggcaggtggatttctgggagtacgaggtagatttctggtctgcttagccagggctacatagtgaaaccttgtttaagaaataaaacaagtcgggcagtggtggcacacgcctttagtcccagcacttgggaggcagaggcaggcagatttctgagtttgaggccagcctgatctacagagtgagttccaggacagccagagctacacagagaaaccctgtctcttgaaaaacaaaacaaaacaaacaaaacaaaacaaaaaatcaactttttaaaaataaaatttccttgaggccttcaacatctttcagtcctggcttgttttctcccgctgatgctgccagtggccctgggagtttgccagtcagctgaaagctcaagtctgccacccccctttccttgatacccacttgccttgatcaactcacgcagtccaaattgttgccaagtcttcaaggtccaaacctacgtgatgcttacctcagagagcccaaggccagggccaggctttggggacaggctacactgtcattggatgacacacagacagcccatatgacagagccatggccttgatggggggagctagggagacaacacaggatggtctcagagatgggaggaaggtcgatcaattctgctcgggcggcagagaaggcctgtaggggaagtccaccaggaaaagtctgtcctggtttgctttctcttgctgtgataaaacactgaccaaaggcaacttggggaagagtcgttttctttcagcttatgagtgaaagtctgtcattaggggaagccaacgcaggaactcagagcaggaacctggaggcaggaactaaagcagaagccatggatagatactgcttcctggcttgctcctcacggcttgctcagtttactttgttatacatctcaggaccgaccgggtgaccaggagtggtcccacccacaggaagctggactcttccaccatcaatcataaatccagaaaaagtacactattgccctcaggctaatctgatggaacagatccctcttcctgtgtgactctagtttgtatcaaattgacaaaactaaccagcgcaaagtgagtgagagagagagagagagagagagagagagagagaatgtgtgtgttagtcatgtacaaaaagaagaccctgtcagaggaggccttcagtacagaactttccacaatcaaaacacagctaggagccaggcatgccaatccagctatttgggaggttgaggcaaaaggagcttaagattaaagccagcctagggtccagaatgagttcaaggctagcaactcagtgagagcccatttctaagggtaataagaggacagggtggctcatcaaaaatgcatttgcctagtaacctgtaaatggccctggatccatctccggtgcagaggaagagaggaagagaccaaggaatcctgcagaggacaccaaaaaaacaggatgtatacattcgtgggcaccctctggcactagacctatgggccctatgagccccctgctccgtttccaggtctgtacccagagagagagagagagagagagagagagagagagagagagagagagagagagaaaacacatccacagcaactcctgtgcacaggattcctttcttgtgttccacagcagttaaggcatctagcagccaaatgggtgtgttgaacgtggtctgtgaggaagaagggataccaagtctctgatgcacatggatgaatccagaagatacctgtaagggagagaagccagacacaagagcatccaagcatgcacaaaacaatcatgttgctgaacccaaacagaaagacactgaatggtttccagggctgaggaaggggcagaaactgctgagggctgagctctgttactcttcttcctactctgtcgctgggccaaaagccactgcatcttacagttaatttatattttacctttaaaaagcgaaatctcagctgggccgtggtggcgcacgcctttaatcccagcactcgggaggcagaggcaggcaaatttctgagttcgaggccagcctggtctacagagtgagttccaggacagccagggctacacagagaaaccctgtctcgaaaaaccaaaataaataaaaataaataaataaaataaaataaatcttggagctgacgagatggctcaatgggtaagagcactgactgctcttctgaaggtcttgagttcaaatcccagcaaccacatggtggctcacaaccacccgcaatgagatctgacaccctggtgtgtctgaagacagctacagtgtacttatgtataataataaataaatcttaaaaaaaaaaaactcatcgtatagccctgtctggtctcgaactcacagagatctgtcttctcctgcttcccaagtgctgggattcaaggtgtgtgccaccatgccttcagtcttacactttacatgagttaactatgtgcaaataaaattataaaatagaatatatgttatataaaataaaattattatacacacacatacatatatacatatatacatacatatatatccatcttttcttttgcttccttctccctcagaataaagacccaagtccttgctgtaattggtaaggctgtcactcttgcctctcaaactgccagttcctacctcagggcctttgcacatcagctccctccatctactgggatgcttctctccccagcagcctggagagtcaaacatcatatcaatgaccacttgtttcctgtctatcctttcaaatgtcaggcaccccacatcctggccatctccttccctccattccttttcccttggatttatctccactcagcaggaagccaatgggctttctggcttccctggcttccttcttcctgtgccatgaaaagctgttaaaccctctgattcctcatccacagttagggacacggaggtgcctgtggggagggggccctgagcacacaatgggtgactcctggacacatacctggcaaggactcagtctgattcagctgttcagccccagggatgccctgtccccaacccaccttgccaaggacagaggagaggttacactgctgagctgaagaacaggaataaggagaggatgcgccagctgcgagggctcacgcctgtaatctctacgccggagccaggagggtggttagaatttccatgccagtctggactatggcgtgagatcctgtctcaagaagagatagggagagaccccaacagtgaatctgaagcagacagattcaaggacagagtgtgtgtgtgtgtgtgtgtgtgtgtgtgtgtgtgtgtgtgtgtgtatggtgtgaatgagtgtgtagtgtgtatagtgtgtatgtgtatatggtgtgtgatgtatatggtggtggtggtggtgtgtgtgtgtgtgtgtgtgtgtgtgtgtgtgcgtgtgtgccttaccttctacaacaaatcttcaaacataaactggtaaaagaaagatgtgagggggagaagggaggggatagggggtttctgaaggggagacctggaaaggggaaaacatttgaaatgtaaataaagaaaatatccaattaaaaaaaaagaatccaaaaaaaaaagaagacagattttcctacttcaaaagctataattaaaccaaaattcccaccaaaaaagaagaaagaaagaaagaaagaaagaaagaaagaaaggatagaaagaaagatgtgaattgtttccaagatcctaaattgattccacatgggaattacaatatttagaaaaacagggttaaacatactattaaaagcccaacatataaccgggcagtggtggcacatacctttaatcccagcacttgggaggcagaggcaggtagatttctgagttcgaggccagcctggtctgcagagtgagttccaggacagtcagggctacacagagaaaccctgtctcgaaccccccccccaacaaaaactaacaaagaaaacatagtattaagcagaatgtagtaacacacacctttaatcccagcactaagttcaagggcatcctggtctacctaatgaattccagccaaggctaaatcgtgagaccccccccccccaatctcacgaacaaccaataccaaacaaatacttctagcactctgttacagtgcaaatcacagagagctgcctccgtatgtcccctgtgttcctctctcagggacttccctcttcctgggactgccagctagacttcacctttgccctggtttcaggacctgtgctatctttttcctcctgggtgaggccagtacagagatgagttgtctcggacgaaggtgcctgttcgagggagtccccatgggatgctgagctacacagtcaccatgagattggcttcccaccaagatggagacaagaagacactacttggctgcccttccttcattatagcaaaaatttgcgtcaacctcattgttcatcaacagatgaaggaatggcaaaacaaaatagaattctgcccagtggtaaaaagcacttactgttcttgcagagggccgccttgttcatattcccacaccctacaccaggcagttcataaccatctgtaaatccagttcaggggacctggcgcccccgtctggcctcttccagaactgcacctgcatggtgcacacccaaacagctacaaataaaaagtttatgtaaccctctcccatggattatgtcatgtgaggcagcctgaaaccctctttctagccgcggttatctcagggtccctgtgctatctgtaagagcggctctgcgtttctgtctgtaggatgagtgtgagcattgctgacgtctgttctgagttaagccttcctctgcttgagaaggaatgtaagatcgagtggccctaggtcatgtaggccattacaaaaccatgcctggttacctggaaagacactaagaggtagggaatctcaactgtacctggccagaaggatagtactggacaatgacttagttccttgttctctctctctctctctctctctctctctctctctctctctctctctcacccccagtctctttctctcaaaaaatttacaatttgtactcatgtgtgtatgtgtttccatgtatatctgtgtgctacatatgtgaagtgcccacagaggtcagaagagggctaggatcctttggagttatagacagtcatgagccactatgtgggtgctgggctttgaacctgggtcctctgcgagagcaaccagtgctgtcaactgctaaaccacctctctagcccgtagtctggttcacttgaaggaaggtctatcgactttatcacggaggccgctaaagacaaggggagaattctagaacatgttgagtagatgatactgttggaccaccaagcctgtccatcacgtaccctgcagcctccaggccttccagcttcagggtggacatagcctgggagagcggaggggacacagagggacagtgggctctgcctcccaacactctgtggcattttctgggtcactagatgagacaacagccagtgttgctcttcattctcagacagacagtgtgaccattgtttcaactaattggatgtggaagaaatgaatactacattgtcccaagagatgcactcactcaggagtaatcgttattgtgacctgggtgttccaaaactgtggagaaggagaaacatgcccactgtccccctcctctaccaggagtccctccatggcccctcaggccaccagctggctggttggtttggtttggtctgggtgtttttgttttgagagaggaagaatctcactctgtagcccaggctagcctccactaaagatcctccccactgccaccctaagagtgggatgacagtcaccagctgtggggacgctatctacttcccctttcagaggcaggtcaatacagcatttgggttgaagggatcggagggagaagaggtgttctcatcttactcttagcccaaggagggaatagctgcgggtgcaggcatgggggtgcaggtgtgaagctgcaaaggggtgggatataggcaggctcctcccagtgaggatctggaggcctccatgaagccaatttttaacttgggaactattttatagccaacactgaaagctatggtgagtgggcagggaagtagtttggccctatgggataagagggaatgccaactccctggtccaaaacacacctggtcatttgggggacctaactgggtcctggccacctggactaagctattgaatcatagctatatcctgggaagggttatctagaatgggttagcctctgaccatgtgtataagagattatcttgattgggttaatggaggtagaatgtcctcccccaactgtgggctacgccattgcttcggtggtggactgtcagagagaaaaagttgtatgccagaagtcattggtctctgcttctctgcttcttgactcttggtccagagtcaggactttctccacctgatggactaacaccctcagactcacaaatcttctttttcttaaggttgtgagccatcatgcggttgctgggaattgaactcaggatctctggaggagcagtcaggtgttcttaaccgctgagccatctctccagcccttttactttttttttgtttggttggttttttttttgtttgtttgtttgtttgttttttctagacaggctttctctgtatagccctggctgtcctggaactcactttgtagaccaggctggcctcgaactcagaaatctgcctgcctctgcctcccgagtgctgggattaaaggcatgcgccaccatgcctgaccccttttttttccttaaggtgcttttaacagggtcttttttttatcacaggaccaagaaatgaagacaatcacttttattgttgttgttgctgctgctgctgttttgaattctgagacagtgtctctttacacagccttggcctgtcttggagctcactttgtacaccagacagccctcagactcagagagatctgcctacctctctgtcccctgcgtgctgggattaaggcttcagtcatttacacttaacaagccagaccctgtcccaaaggatccagatgtgatgactcactgagcccttataccccctgtgtccctgtgtcacattccactgacagcagtcactgccctggctgctttctgtgcaggaggtgccgggtgagggggtcccccaggatgcctgagggcacatcacaggctcctgcagtcatctgacacagcaaaactgcgatgagacagcattactggaccctgggacagccactgctgatccgcaatggagggctcagtactgcacatcactgggagggcaaatatgtctcaggattttacgcgagtgtggtaacaagaactagcggcacgggcacagttggtagctttcccaaatgctttccgattgtctccttttcatcctggcaaggcctcctgagtgctaggcaggctctgtatccctgaactaccttctcaggcttggttttctttccttttgtttgttttgcaacagggtttccctgtatatagagccctggctgtcctggaactccctctactgtagagagcctcgaactcaaagaatggcctccagagggctgacctcccgagtgctgagattgaaggagtgcgccaccactcctgaccccagccttccttttctttctttcttttcttttctttttttttttttttctattatattttaagacaggactttgctagctttgagttcatggcaatccttctgcctcagtttccgttgctgggattacaaacacacacactccgtagctacttctgttccctctccttccttccttcctctttttttttttttttttttttggacagggtttctctgtgtagccccggctgtgtagaccaggttggcctcgaactcagaaatccgcctgcctctgcctcccaagtgctgggattaaaggcatgtgccaccactgcccggcccctctcctttcttgcaggtttatttctccccatagtcagataggctcagaaaagaggaacctaagtccccaacaggaaaacaccctcattgtctagatcaacctggctaatgctgtgcctctcactccgattagttgaggagaggacacgtgaccaagttctgaccaataaaatgttggaggaattctggggcagcccacccccaccaataaaaacatagtttgcaagcctagcatggtggcccatgccagtaatccaagagcttgggcagtggaggcagaaggccataatcccagtttaaggccagccaggggctacatgagactctgtctttaaaacaggccttcgtacacctcccttgttggatgctggctgcctaggtgaggtacttactgaaaagacagtagccttcttctgatccagagcttttggcacgtggatcttcgtcaaaagcctgaaactggtatggctggagctgctgcctctcctcgggactcagtcttcctcgttaacatcctgtactctctaggtctctgctccggggcatcccactggatgtaggtggaggcagctgcttgttcggcttcttcatccgttcgaccgttcacagagcaccttccttgctcaggacagtgctgggctctggacacccatggggagaatttgcttttccagagaattttaggcgagtgtggtaacaagaactagcggcacaggcacagttggtagctttcccaaatgctttcctattgtctccttttcatcctggcagggcctggtgagtactaggtaggctctgtatcccagagagtggaaacagacaaagatagtcaccaataggcaaagtatgtcaatgccaaaaaaagtacgtaagcctcggaccttgaacacattaaccactaaccacaggtctaccacagagtcacactctgtttctacaaagtaatttctaaagggtagagaggtggctcagtggttaagagcactggctggccactcttccggaggatgtgagttcaactcccagcatatgagggctagcaactgtccagctccgggggattgactgccctct

SEQ ID NO: 107 - DNA, 61027 bp, Homo sapiens
ttgaagctgagggtaatagcactggagagttgggcatgatgagacttcaatgatgtaatcttttataagatttttaaagaaatgaaataaatgtcaacaataacagaagaaaattgaagattatagtaagcaactgagacaactaaagtattctagaaccaactgttgaatctccccaggttatctggtgctattaaattgcataacctagtatcataagaacgttgtactcaaggtccattttccaaaggttattaaagtacttcttgatgtggggaaagggcaatgaccaggttatagggtagagctggtttactaagctttgttccaacttgacttgccctccttaacactatcacttatagtgttaacactaacacataaatccttcttctttgactgccggaagttccatctagtccctatttccattttgactttctctagtgtctttaatcattccataggtgcccatagtgggagaaggtgagaccagccacagtaatagtgacactgataatgtgaaggtcaccatttgcagcataaagaaatgtttctctgtgttcatgcgtgtgaccttaaatttacttaagaaagccaggggacatccaaaaagaaggaaaacagtacaaaaggaatttgagttacctgtttgttacctgtgcttgaaatgttacccttggtatcagatggaaagaaacataggaaggcaatgataactgtcatagtgataactgtcatcactatagactggttgtgatattctgtggctgctttgtggggtttttttgttttgatattttattttattccaatcttttcacagagatatttttgagtgttgtcttgtttaggattttattattgctgctcttgtcattctgtgcattttttgttgaaaatttcagagtttatagggtgagagagctattttatttctgataaagcagcttctaagtgaaaacaatattctgtaaaagtcagaagttttacattctactcaacaacctactgttagtttgtgtattagggttctccagagggacagaactaatagaatagatgtatatatgaaggggagcttattgaggagtatcgacttgcatgatggtaaggtgaagtcccacaataggctgtctgcaagctgaggagcaaggaagccagtccaagtctcaaaacctcaaaagtagggaatccaacaaatgcggccttcagtctgtggccaaaagcctgagagcccttggcaaacctctggtgtaaatccaagagttcaaaagctgaagaacttggagtctaatgttcaaggcaggaagcatccagcagggaagaaagatgaaggccagaagactgagcaagttggcttcttccaccttcttctgcctgctttattctagccaggctggcagtttattgtatggtgcccacccaaattgagggtgggtctgcccctcccagtccactgactcagatgttagtctcctttggcaacacactcacagacacacccaggagcaatatgtgcatccttcaatccaatcaagttgacacttaatattaaccatcactgtttgccaagtattggggagccatctaagtttttagtattattcctttagaaatggaaaaatgccctgttttctgcatggctaaatgttataatttcactcaaagttcacttttgtttaggaagtttggtggcttgtttacagttaaaaaaacaacaacaacaaaaacagtagtttcactgaaagtttttccccccaattcctggtcttttctatcacacatgtttcctttatcattaaaatcagaattctaaatttcacaactctctccacctcttctaattgggacacatctctttataaagctaatatcagaatcctcaattggcctcatcctttccagcataaatagccatattttatatatgtatgtacatgattatactacttgcagtgtctctttaaattgttaatgtcagcttattctcaatcaattacaatggatatacatttgtgtcctaggtatatgctcatgaatctaaactcacaaacaggccaaagctttggaacatctgcataaagtatcctgtttcttatttgtattattactaaagtcatatgttttatctttatagcctaactgtccccttgggtgtttgaagacctaggtgatatgcccatttgtgatatgctctccagaaacagaagggttaagattactgtaagcttcagagatatagtgggtttgttctttggaatttggggaaatagaaaactcttatatttcattaaaaggtactcagaaatattttctgctggttggttgatgattcttagagcttaatggtattccttcctgttccctcctcctccttcatcaagttctagagaagaatatgtctcctttctctaaactttctagactcctgaacttttatctaccaagccctagcatgccacattaatacagaaatcagtacctgagtggcaatcgtgcatagccattgtcgacaaaaagagtcaaactctgtaaaatatttgaagagatttattctgagccaaatatgagtgaccatggcccatgacacagccctcaggaggtcctgagaacatgtgcccaaggtggttggggtacaacttattttatacattttaagaaggcatgagacatcaatcaaatacatttaagaaatacattggtttggtccagaaaggtgggacaattcaaagccatggtggggattccaggctatagataaatttaaacattttctggttgacaattggttgagtttatctaaggacctgggattatagaaaggaaatgttcaggttaagataaaagattgtggagaccaaggttcttttgaagtctaatagtggctgcccttagagacaatagatgacaaatgtttcctattcagatctttaaaaggtgctagacttttagttaatctctttaggattgggaaggcctggaagaataagatctagctatgttaatagagattctttacagatgcaaatttttccccacaaagaacagctttgcaaggccatttcaagatatggcaaagaagcatgttttggagtaaaatattttaattttcttccttgtcttgtaatgttatgccagagtcagattggaaagtaagtcacgatatatataaggttaaataaaacccatccgatgacaatttatgatttgtagggcatgacttcccagaccccttagataggaatttggacaagatgaaaaaatcagaatttagtcctcatcatgtatctttctcaaaaataatagattgatgggaacagatatttggggaccaaagaagccaaagtggttcccatccctttctctctgtaacttaacctctgtgacttggcaagccttcatgttctaggctataaagcggtaagggcaagagagaaaaaaataatagttgagtaccttttataggacatctctgttgtagatagcttttaaatattaaggttaagaacattgctctcactcttcctctgacccccccccaccaactcttttactttccagtttccaccattttgtgtagcccctcctagatttctcagttaatcatggagaatagaacaaggaagccactttcactctgcatttcatgaaaaagatatttctgcagcctgattctcatttacaaagtagcacctacaactatacattttttattccattaagcatttattttcaaaatttaaaccagtactgagaggcattaaacatgtaaattatttctctccatttaagaaatgatttggcaatgcatctaaagaaccatgaaaacatttataccacttgacataataatcaaagttctaaggaaagaaaaggctagaatgcaaaggtgttcattatagatctatggaaaaatcaaaagcagcctaacagttaaacaatcaaagatgatacatgctttatctcatttccacaaataccctttatcccatctgcaaattagactcacaggagcaaactcactctgtctcatctatcagtgtccagtactatataaaaacacaattcctttataaggcttttaactccagatatttatcagaggtcacatccaagtcatgaagggtcaagctctgccaatctccatgaagctctatactcttgagtgttagccagggaacagttgactagccactgcaggttagaagtttttctgaggtattcaaagcccaaatcactcacagaaaaagaatctgatttcagcctctccttcctctttcatatatatccccacactaagaagtactaagtagagtggagtttgagaaactgaacactccttactctagcccttgaggagtttataactataaaatttgtggcaaacataagctcagtctgagtccacaatatgacattcgtaaaattctaactttgtgattcttcttcaataaactcatttgtcatttttaatatcgtatttctctggctttggtcagaactttagcagagtgcagaagtacaatataattttctaaatatattttaagatattgaataaaagccaggcatggtggcccacacctgtaaacccagcattttgggaggccaaggcaggtggatcacttcaggtcaggagttcaagaccagcctggccaacatgatgaaaccccatttctaccaaaaatacaaaaattagccaggtgtggtggtgggtgcctgtaatcccagctactcaggaggctgaggcttaagaatcgcttgaacctgtgaagcagaggttgcagtgagccaagatcgtgccactgcactccagcctgggtgacacagtgagattctgtctcaaaaaaaaaaaaagatattgaataaaaagttattcaaccttgttattaaagtcacatattacaatcttatagcctgaccatccccctgggtgttgctaaacatgaaggctcctcccttcaggacttcacaaacacaatcttattgaaataactgaaagcttctgcttttgatatgagcagcagaggatcctggagattgatggttgtaagaggttatgtaagtttcacacagcattgggttaggtgtcagacttggatttgaaactatattttgtcacttattatctggatggtcttaggcacattgacttttttcattttttaattgtttttatatttgctggtttattataaaggatactacaaaggatatagatgaagagatgtgtaggatgaggtatagggaaagaggtatagagcttccatgccctccctgggtgtgccactctccaggaacctccatatgttcagctatccagaagctctttgaaccatgtcctcttgggtttttacataggcttcattacagaggcatggttgattaaaccattggccattggtaatcaacttgaccttcagcctctcttccctctccagagtttgggggatggggttgaaagcccaaccctctaatcatgcctttgtctttctggtgaccagccctaccctgaaggtgtcagtcaacattaccatataaaaagacagcactttggcgattccaagggttttaggagttatatgccaggaaactgggatgaagaccaaatatatattttaaaatatcacagtccacccctggtatttgaacctggatcctttacatcaaaagggcatgcaactcaaaagatattgaatcccattcagtcattaataattggtccaatccatcatcttgcattaatgtgtcccagggtgaggccactcaggtttacaggcttccttttaatcttgtcaggttccaaaagcagttgttgtctcagcaaacatataacttcacactttcaggcatctggaataactgggctaagaggcagtgtcatctcttgctgtctcttttgaagtatttatgtaatgtttaatttctctcaatttttaacccatttatttactcaaactcacttttggaagggatgttagaaacaccactgtgctggattgcaggcagcaatactagtctagcaagtgcctcctcctcagtctactcccattccaataaggtaaggttacataggtacagaactagtgggctatttttaccaccaggcaatatagctatatacattcactattagcctccattttgccaaatgtggaagcacaatccacccctagaagccttttaggaattctaacatagaggtttaaaggtaaagttttttgcttaaaaagcattcctgctattagtaggagttataattggagccctggtcctaggaccaccacatcaggtaagggagagaaaaaaatttgaggcaatttggagaagaacaaaaattatagtagttataccagtatactcctcctttggtaagaattgcagttttaccagcatcctccccagatcaaccagaaagacagattaaaaaaaaaatctaggccaggcgcgttggctcacgcctgtaatcccagcactttgggaggccgaggcgggtggatcacgaggtcaggagattgagaccatcctggctaacacggtgaaacctcgtctctactaaaaatacaaaaaaaaaaaaattagccaggcgtggtggcgggcacctgtagtcccagctactcgggaggctgaggcaggagaatggcatgaacccgggaggtggagcttgcagtgagctgagatagcaccactgcactccagcctcagtgacagagcgagactccctctcaaaaaaaaaaaaaaatctagtcctacttatgtactgtgagcacacacttgtgaaggatataagcaagcccttcatatctatttctcccccaatttagaaaaccaatatttcaattgctccttccttttggttccatatgaaattttaaagtagttttttctaattctgtgaagaaagtcaatggtagctttataagaatagcattgaatctataaattattttgggcactatagccattttcacgatattgattcttcctattcatgagcatggaatgtttttccatttgtttgtgtcctctcttattttcttcagtagtggtttgtagttctccttgaagaggtccttcacgtcccttgtgagttgtattctaggtattttattctctttgtagcagttgtgaatgggagttcactcatgatttggctctctgtttgtctattattgctgtataggaatgcttgtgatttttgcacattgattttgtatcctgagacttgcagcttaagaagattttgggctgagacgatggggttttctaaatacacaatcatgtcatctgcaagcagagacaatttgacttcctctcttcctgtttgcataccctttatttctttctcttgcctgattgccctggccagaacttccaatattatggtaaataggagtggtgagagaggtcttccttgtcttgtgccagttatcaaagggaatgcttccagcttttgcacacacagtatgatattggctgtgagtctgtcataaatagctcttatttatttaaggtatgttccatcaatacctagtttattgagtgtttttagcatgaagggtgttgaattttatcgaaggccttttctgtatctgttgagataatcatgtggtttttgtcatttgttctgtttatgtgatggattacgtttattgatttgtgtatgttgaaccagtcttgcatcccacggatgacaccaacttgatcgtggtggataatctttttggtgagctgctggatttggtttcccattattttattgaggatttttgcattaatgttcatcagggatattggcctgaaattttttttacattgtgtttctgccaggttttggtatcacagtgatgctggtctcataaaatgagttagggaggagtccctctttttctgttgtttggaatgatttcagaaggaatggtaccagctcctctttgtacctctggtagaatttggctgcgaatccatctggtcctgggctatttttggttggtaggctattaattactgcctcaattttagaacttgttatttgtttattcagggatttgatgtcttcttgcttcagtcttgagagggtgcatgtgtccaggaatttatctatttcttctagattttctaatttatttgcatagaggtgtttatagtattctctgatggtagttggtatttctgtgggatcagtggtgatatcccctttattattttttattgtgcctatttgattcttctctcttttcttatttgtcttactagtggtctatgtattttgttaaaatttccaaaaaactagctcctgaattcattaattttttgaaaggttttttatgtccctatctccttcagttctactctgatcttagttatttcttgccttctgctagcttttgaatttgtttgctcttgcttctctagttcttttaattgtgatgttagagtattgattttaaatctttcctgctttctgatgtgagcatttcatgctataaattttcctcttaacactgctttagctgtgtcccagagattcaggtacattgtctcttttttctcattttcaaagaacttatttatttcttccttaacttcattatttacctagtagtcattcaagagaaggttgttcagtttccatgtagttgtgtggatttgaacgagtttctgaatcctgagttctaatttgattgcactgtggtctgagagactgttatgatatctgttcttttgcgtttgctgaggagtgttttacttccaactatgtggtcaactttagaataagtgccatgtggtgctgagaagaacatatattctgttgatttttgttggagagttctgtagaggtctattagttctgcttggtccaaagctgagttcaagtcctgaatatccttgttaattttctgtctcattgatctgtttaatattgacagtggggtgttaaaatctcccactattatcatgtgggagtctaagtctctttgtgggtctgtaagaacttgttttatgaatctgggtgctcctgtattgggtgcatatatatttgggataattagctcttctcgttgaattgatccctttaccattatgtatgtccttctttgtctcttttgatatttgttgatttaaattctgttttatcagaggctaggattgcaacccatggttttctttttttgtttgttttttgttttgttttgttttctattttcttggtaaatattcctccatccctttattttgagcctatgtgtgtctttgcacatgagatgggtctcctgaatacagcacactgatggcttttgactctttatccaatttgttagtctatgtcttttaattggggcacttagcctgtttacatttaaggttaatattgttatatgtgaatttgatcctgtcatcatgatgccagctagttattttgcacattagttgatgcagtttcttcatagtgttgttggtctttatattttggtatgtttttacagtgactggtacccatttttcctttccatatttagtgcttttttcaggagctcttgtaaggcaggcctggtggtgacaaaatccctcagcatttgcttgtctgtagagaattttatttctccttcgcttatgaagcttagttttagctggatatgaaattctgggttgaaaattatttgctttaagaatgttggatattggcccccgctctcttctggcttgtagggtatgtacagaaagatccactgttagtctgatggacttccttttgtaagtaacctgacctttctctctggctgcccttaacatttttttcttcatttcaaccttggtgaatctgatgattatgtgtcgtaaggttgctcttctcgaggagtatcagccagtctggtagaatgaataaaagccactataaggtctgtttaccctgagaaggggactgcccaactctccctataaaatgccaagtggcgcaccctacatgaagcagctgatatgcttcatatgcaagtcatgttggactggctttaccatgatattcgcccactgaatatgcccattacccagaccatggtaaatgctacggttcaaagggacccttctacatgggtatcctgggtgccattactcctacagaatcaaacaatggttcaagaagccttatcaaatatgctgttgcagcttttcctcatgagtcttacaggtgctaataaaacataaggataattaaccaaaaaaaatgagaaaggcaaaaggggagtcaaaggactcatcttagaagggtagaaatctttagatggttattaagaaatgaaatagccaggcacagggctcattcctataatcccagcactttgggtgaccgaggcaggcagatcacttgaggtcaggagttcaagaccagcctggccaacatggtcaaaccccatctttatgaaaaatacaaaaattagccgaatgtggtggcatgtgcctgtaagagtatgaattcccctggagtctgtggtttccaagggctctatgcactcatgctagcccacacttggcctttagatgtttaacttttaatcgaattcctcatacttgcttatatggaggccttatcttcccattgacacaggtgagccagtgttcatgttctgtcttttcttgaaaaagtccatctttccttagagttcaggctagttagttgccctgcaccctcagctcttcaataaattcaaggtttgttttgatttttttgagacagagtctcactctgtcacctaggctggagtgcaatggcatgatcttggctcaccacaactgcagcctcccaggttcaagcaattctcctacctcagcctcctgagtaactgggactacaggcacatgccaccacacccaactaatttttgtatttttagtagagataggatttcaccatgctggccaggctggtcttgaactcctagacctcaggtgatctgcccaccttggccacccaaagtgctaggattacaggtgtgagccaccatgcctggcctcaagttatgattttttagtttatcggtatttttcttattgttatgtggaggacactgcgtttgccaggttttttgtttttgtttttgtttttgttttttgagatggagtattgctctgtcgcccaggctggaggacagtgatgcgatcttggctcgctgcaatctctgcctcccaggttcaaatgattctcctgcctcagcctcccaagtagctgggattacagttgcatgacaccacacctggctaatttttgtatttttagtagagtcagagtttcaccgtgttggtcaggctgatctcaaactcctgacctcaggtgatccacccaccttggcctcccaaaatgctgggattacaggcatgagccaccacgcccggctgcctttgccagttttctacatcctatgtggaacccagaaatccctgatgtccatttgtgttgtagttatctagttttttttctagttgttacagtgggaataatggtctttcactatcttctacattctgacccaaagccaaatgtcataataacctttctgaaacataaattggatcataacactcctttgctttctatccttcagtggtttctaatcatacatcaaactttaaaaataataaaattcaaaatttttcttttgcttgtaatatcctgcatgatcttgggtctttttgctgtcttttttttctatcttttcaaacacatctcatgccattctccttattttctatactccagccaaggagttggcaatcttttcttataaagggcctgatactcattattttaggcttttgggccacatggtctctgttgcaactacaactcttctgttgaagcacgaagcagctatagacaatatataaatgcattagctttgctgtattccaataaaactttattaatggacattgaaatttgaatttaatatattttttgtttgtcatgaaatattctataatttttttcttccaaccatttaaaaatgtaaaagatcagctgggtgtggtggctcacacctgtaatcccagcactttgggaggctgaggtgggtggatcacgagatcaggaattcaagaccagcgtggccaacatggtgaaaccctgtctctactaaaaatacaaaaattagctgagcatgatggtgcacactgtaatcccagctactcagcaggctgtggcaggagaatcacttgaacccaggaggtagaggttgcagtgagccgagatcgcgccagtgcactccatcctgggcaacagaacaagactccaactcgaaaaaaaaatcaataaaaatgtaaaagatcattcttagcttggaggctataaaaaaggatgcagcatgtcagatttggcccattagctgcagtttcctgacctctatctacctcaattggttctttacttacattacatggaaagtgcaaacttggatggcttcaatgtctggcttcttttatttatttatttatttatttatttatttatttatttattttttgagacggggtctcgctgtggcccgggctggagtgcagtggcacgatctctgctcactgcaagctccacctcctgggttcacaccattctcctgcctcagcctcccgaatagctggaactacaggtgcacgccaccacgcttggctaattttttatatttttagtagagacggggtttcactgtgttagttagccaggatggtctcgatctcctgacctcatgatccgcccatctcggcctcccaaagtgctgggattacaggtgtgagccaccgtgcccggctggctggcttctttttacccttcacatctggctttaaatactaccttttcacagatttcttctctaatcactctttctaaagtaaatatgctgtttttcattattagtcattgcatcctatttctttccctttaattttcttatcacaatgtataattatatgtttttttttttttttggttattgcctgtctccctcaatagatcataagttccatttgataaggtacaatgtctgttggtttattagccagtgcctaacactaccatttaatatgtattcaatgaatatttgttaaatgtattgattgaatttaaagtgactactcagcctacttctgccccttggagcttggattgtttcttcaaaggtattgatccttttgactattttaattatgaattcactaaagacatctggaaggcttattgtgtcaagcagtgccaaatccatggcttgatgaacctagatccatccccttcccctttccatatcacagatgacaacttgatggttggcctatgacttgtaaaagttgtcatatttgaattctgaaatttctctaattttcttgggaagcagaaaggaaaaattagtagttggcctcaaagggacagttgaatttcacatataatgagcaaagtagtgtgaggaagagaggagggccttttcttttgaggtcataactaaaagttaggtgagcaaatgccataagcatgaaaatagcaaaccaagcttcttggtttctatccaaaggctttgttgggaaaagtatcaaagtgtgttcatttgttatgtaatatataaggtagagaacccaatttgaaggaggtggaataactttccaaaatacttatggctaaattctcagttgatcttggaataagattcaagaatccaaatgcacccttctttgttatcttgctagaaaacatgctgggcatggtggctcatgcctgtaatcccaacacgttgagaggccgaggtgggcagatcacgagatcaggagttggagaccagcctgatcaacatggtgaagccccgtctctactaaaaatacaaaaattagccagacatagtggcacgcacctataatccgtgctactcaggaggtaggcaggagaattgctggaacccgggaggtggagtttgcagtgagccaagatcacaccactgcaatccagcctgggtgacagagcgagactctgtctcaaaaaaaaaagaaaagaaaaaagaaaagaaagaaaaaagggaagggaaggaaaggggggaggggagggaagggaagggaagggaaggtaagggaagggaagggaagggaagggaaaagggaaaacaatgtgcttttacccacagctgataagcttttctaattgtctacctttgggttaaactttatcattgagtgtttttatcccattatgaaagaattaaggtttgaaggactgaggtaagggtggatatttactcttaattgagtagcttaaccaagtcaagccacagattagctgaagccaaaaagcactggcagcatttgaaataactgagaacatattatacttaacactttattatctaagagaggcacttgaagttgagacctagaaatttgattctgggttctttgtttctaaggggcagggtgaacccagctatagcattcacagatgctatagaattatatatattctatatataattatatatattacattcatattaatatatgttaatatattctatattattcatatagaattcacagataatccaagtgcttttttaatacattgataccaaatctctcctgctctcaaaaaaaaaagcccaaggcaaaaatttttgattagcctgtatccgcaaattcatagtgcatggcatgatgggtactctacatccctcctcctattgcactcactgtgcccagatgaacctaaagtcaccagtaatagtgctaatgtagtaatgggcccaagcttcaaaagaaggaaaattagtattcagtatttaaatgtgggaaagaggaagaatatggaaattatcaattttataatacctatacatattcttacctgcattaatgtgaatagacatcaatgataaacagaataatgccccataaagatgtctacactgtaatctccaaaacttataactatactatatcacatggcaagagggaattaaggttactaatcagctgaccttgagatgggagattctcctggtttgtatgggtgggcccaatgtaatcacagggtccttataaatggaaaaggcagacaggagattcagtgtcagactgatacaatgagggaaagactaccagcagttgatggctttgaagatagaagaagggggccatgagccaagaaatgtgagtagcctctagaagctgaaaaaggcaagaaaacggattcttccctagaatctccagaaatgcagccctgccaacatggtgattttaactcaatgagatgcattttagacttctgacatctagaattgtgttattttcagccctcaagtttgtggtaatttgttacagcagcattaagaaaatgtacaatgaccatgtgcagtgcctcatgcttgtaatcccagcactttgggaggccaaggtgggtggatcgcttgagtccaagagttcgagaccagcctgggaaacatggtgaaaccttgtctctacaaaaacacaaaaattagcctggtgtggttgtgtggacctgtagtcccagctactctggaggctgaggtgggaggatggcttaaacccataaggtggagattacaatgagccaagatcatgccactgcactccagcctggacagtagagccagaacttctctcaaaaaaataaaaaagaaagaaactatacaatgctcctgtgattctagtgctatgtacatatatcctttatagggaattaaggaggttatagacacaaccagaagaggaggcatggaatagactaatgtataatggataggaaagtgtatcttttacaacttctctgtaaaaacaccttcacctactttatgagtttgcctcagctgccataacaaaatatcagaccaagtggcttaaataacaatttattttctcacagttctggaggctagaagtctaagatgaaagtgccagcaagtttgatttctggtgaagtctctcttccttgcttgccaatggccgctttctcactgtgtcttcaaatgtccttcctctgagtatgtgaggagagagaggtttgatgcctcttcaccttcttataaggacaccagtcctactggattagggctccacccttatgacctcatttaaccttaattacctccttaaaggttctatctccaaatacagtcacatttggagtcagacctacaacatatgaattttgagaggacacaattcagtctataacacctagatggaaggcaatttcatataaagatgatatgcagtctatgacagcaaagtagctagtggaaatcacaacccctaattctatttttatgtcattccctaagtccaggtcccatgtggatatagcattgttcagggctatctctttgctgttctttttttttttttagactcacacaagcaatgtggagaaggaacatgaaaacatctttgagatagagcttaatacagatgtcaatctctttgtaaataagcaattaaaagtggaaccactgtccaccatgtgagaagagtgactggctatggctggatatttttaaatacacataaaatgtggtataaatggtagaatgccagggatagaaggagtatcttataagttacctagtcaacgttctggcttctgggcagaaaactatctaaactcagccagataatcagtttcaactaaatcaggaaaacatggaatcatctttatctaggtagtgttatagttacattgcctcatttatctacacatcaataaattctttctcattgctaatatttatcattcttatcatagtataagcaaatgttttaattctattatggtaaagataaagcttctgtaattaaaacactttaatctggaaagacagcagtaaacccttcaagcaaaagcccaagtaggttcaaaaataatagccagagaggttaaaggtaaaccaatagagtgatatgttacagcaactaagggagagaggcaggagttttttaaaagagagaagaggaattataacaacagaaacaggttagccagctgccagtttagatgagcataatgagtcccttagatagatcattggtgatttttatcaaaacactatcggtggagttgtgggagtggtaggctgactatagtggattggggaattaaatagtgatgaacccaaaacagaaagtctgaagaaattccctttgagccaaaaaaaaaaaaggccgggtgcagtggctcacacccataatcccagcactttgggaggccgaggtgggaggatcacctgaggtcaggagttcaagacaagcctggccaacatggtgactctactaaacattgtctctactaaaagatacaaaaattagccggaagtggtggcaggcaacttaatcccagctacttgggaggcagaggcaggagaattgtttgaacccgggaggtggaggttgcactgagctgagatcgagccattgcactcaaacctgggggacaagagggagacttctctaaaaaaaaaaaattccctttgagcatctctactgtagagatgaaataagagagaagtggattctttagtatagagatggaaaggtatggagctagaacatgtgggttgtgaacagtggctaactaaaccaggaccagtaacctagatatcacattgggcttaattgctgggttattcattcattcaggcaacatgtatttgttgagagcctgaatgtgccaggtaatagaaacacaaaggtggttaaaatagaccttggcctctgtcttcaggaagcttccagtctgaagagggatgaagacatatattaatcaaacaatcccacaaatgcaggtataatctgcataaactgacaaatatatctactttggagtcaagaaattaagagaaatcactgatgtgatcagtgaacaagtaagatttattaggaagatggaaggatgacattacttcaaatatattacaggaaaccccaaccatggtaacaacatcaggcctatctttacatatgtttaataatgcttaacttcacttttgctcctatcctccccaaagcaatcttcaagttcttctgtatctttgttttattttctttgttcttttttgtctcatttcctatactgtttttattccatactttgacagttcagtgaactcctttgatagatcccaagtcctcctttttcaatatttacacttataatcatttttgatcactccaaaactgagaactttgagtgtagattttctaggcttcttattttatttttagacattatatagaaaaattagagggaagggaaaagaaggatggcaacatggtaactgggacagtgttcaaaaggtctaagtcctacttctcactccatacaaattatctgcaatttttttatttttgagacaggctcttatctctcacctgggctagagtgcagtggcacaatcatagctcactataaccttgaactccagggctcaagggatccttccatttcggcctcccgagtagttaggactacaggtgtgtgccactacacacagctagtttttaatttttttttattttcatagacacagggtctcactatgttgctcaaactggtcttgaactcctggccccaagcaatcctcctgccttggcctcccaaagttctagaattgttacaggaaagaggtcccaatccaggcccaaagagattttatttatgtactagtgtggagcctagcctaggacacatcaagcagaagtgcagataaggtctgactctttccagtacagctagggtgcctggctctccacatgtccccagaccttatctagaatctaatgtctccaaggtaggtacattgaataattttcaaaagtcaaggaagcagtttatgaccttaaagtagttagcaaacttaatatctgacctgactaatttagaccaaatgtttacatttttgaagatatttttattttatcagtaatctttaaaactattttctattttccaaagattacttaagtcaaatgaactaaaaggcattatacattttagttttctgatgaaatatctgatttaagcacttattatttttgaaccaattaaagcttttttatatcacacacacaacacatataaatacacagacaggctgggtgcagtggctcacacttgtaatcccagcactttgggtggccaaggcaggcggatcacgtgaggtcaggagtttgagagcagcctggtcaatgtggtaaaaccccatctccactaaaaatacaaaaattagctgggcatggtggaggatgcctgtaatcccagctactcaggaggctgaggcaggaggatagcttgaacccaggaggtagaggttgcagtgagccaagattgtgccactgcactccaggctgggtgacagagggagaccctgtctcaaaaaattaataaataaatacacagaagaagataaaggacttatcccctaaggcaggaatcaaaccctgaacacaggccaccattgtgaaaagaaaaagcacagccacatggttacaaggtcaagctcccaaggacatacaaaacaagaaggaaacctcatccagttttttcagggacctgcagcaaagtttgtacctgataaatttactgggccatcttgaacagcaggtttacaggtgtcctaagctcatgttctatcctaagatacccctctttatgacagaacaatacagaaagacacacaacagatttgctacaacttaagactagcctcataaatccattttttcactaatcaaaactttacagaggaaatgaacagtgatttttgccatccattcaaccagttttatagagagagagagaggaaagcattgcctgaggcagggtggggaaggcccggcactccgagtgccagagaaagccccacccattgcagcaacactgaaaagttcatgcagctgcttgtcagtcatgaacggattttttccagcagtcccatcagctctcatttccctttttaggagggaaaagctccccatgttctacaatcctctacatgcctaattctgtcaaccatagccatcagcaaagagtgcaaggcagatcaatccaaagagaatagcggttaacatcctataatgccaaacctgttcttagccgaaagggactttaaggagagggactttactgagagggacctctaaccccctaaatcttaaaagggactctaatcctcctaagttgggcctctaacccagtgtcagtcaagcatccttgccttttattgagaggaagctttaaccctctcttacgagagactctaactcccctaagttgagctataaccaatcccatcctttgcctgagtaccccaccacttacccaaagttgtccaattagtaatgctgcagtctatttcctttgtgctgggggtctcctcagtatcatcccttcgagtttcaccagaaagatgttatcaggccccaccacttacccaaagttagcctttggattgggggtttctgcattatagtcacttcagtggttgccaaaaagatgttataggacccccaacacttacccaaaattaacctttgggtcaggtatttctgcactatagtcccttctgtgataatcagaaagatgttataggaaaaggatcctgatccaggcccccaggagagggttcttggatcttgtgcaagaaagaattcagggcgagtccgcagtgcaaagcaaaaccaagtttattaggaaagtaaaggagtaacagaatggctactccatagacagagtaaccccaagggctgctggttgcccatttttgtgtttttttcttgatgatatactaaacaaggggtggattgttcatgccttcccattttagaccatatagggtaacttcctgacattgccatggcatttgtaaactgtcatggtgctgatgggaatgtagcagtgaggatggccacactaatgtgttttaagccttttcctcagccaaactacaaaaaagcaaaaattactttgtttcaatattacccctactggctaacacactagcaggtcatcagaatatttgccattcctacaaaattccaagattctgtgatgatcctttgagtataagaatcacagagatacacacaattgttacatgctctatttaagttttctatgttatattttctctttataccccccaccccatttcctgactctttctttttaaagggtctttgggatcatgaaagcaaaatgcagcatcctcagtgtcacacacgtccatgtgaagagaccaccaaacaggctttgtgtgagcaataaagctttttaataacctgggtgcgggcaggctgagtctgaaaagagagtcagcaaagggagataggggtggggcagttttataggatttgggtaggtagtggaaaattactgtcaaagggggttgttctctggcgggcaggggtggaggacacaaggtgctcagtgggggagcttctgagccaggagaatgaatttcacaaatgtcatcagctaaggcaggaaccagccattttcacttattttgtgattcttcagttgcttcaggccatctggatgtatacatgcaggcttgggctcagaggcctgacattcctgtctttttatattaataagaaaaataaaacaaaatagtgttgaagtgttggggcggtgaaaaattttttggggggtggtatggagagttactgggtgatgtttcttagggttgctttgagtgggattaggggtggcgtgggaacctagagtgggagagataaagctgaaggaagattttgtggtaaggggtgatattgtggatttgttagaaggaatatttgtcacatagaatgattggtgatggcctggatacagttttgtatgaattgagaaactaaacagaagacacaaggtcccaataacagaaggagaaaaacaggtattaaaggactaagaattgggaggactcaggacatccaatcagagtgcctaagggggttcagcgtgattattttcttggttgatgagtttttgggctctatccttgagtttttttatgttgtcatataccaagccagattgatttaggtaaaaacaacacttttcatttaaaaatacacacagtcccctttttttgagcagtaagtcaaggcctcagtgattttggaggaaagagaaatgcaaagccagcaatcattttttaaagaaggattagaaacagctaggagagagtgaatgagattgatagtgtggtggagatagctggggagaggtagagggtcgcataagaacaggaatgagaataagagtgaatataaaggtaaagaataggactttattagggtgaaagtattggagtgtaccttgtcactgaagatcttctatccacttcaagagagacttaaggaaggtggtttgaggtaaaaccaggagatatgagttatgatggtttggaggaaaagtgtaaactggcagtgtaaacaagggcagggcatttacgagtagttgagaatggtgaataggagtatgactagacagaagatagtagggatgacaagttttggggttgcagtccaagtagtgggggtgactgcataaagccttgttgcaataagtagggtaataaacttaatagaatgaaaggatgttttaggctcataagggttactactgttcttcagaaatgtgagtgagtttaagggaagtagggttgagtacttgcaacttctaggaggaagaggagagattaggctggctgtccaatggacacagctttattctggaatggtgagcctaatagggagggtcttacaggcggatggcagttggggtattatagatgactaagtagggtccggtctatcaaggttatagagtttgaggggtcagattcttaacaagaactgatcgtccatctagggtgtctttatatggctgggaatatggagtaggcaagaaaagattagcagcttggcaaatttcctgtcttgcctgctggaggaccagcagatagattcctagaggactggtgtctgagacgaggttggggccaagcaagaaagtgtgtctatataaaagtttaaatggactgtaccctctagcatctcaaggacaggctctaattctgagaaaggcaagaggtaaaagtactgtccaatcttttttaagttggaggctgagcttggtgagatgtgtctttaaaagaccattagtccattctacctctcctgaagattgagaatggtaaggggtatgaaggttccactgaataccaagagcctgagaaactgcttgggtgatttgactaataaaggccggtccattatcagactgtatagaggtgggaaggccaagcctaggaattatgtctgaaagaagggaagaaatgactatggtggccttctcagaccctgtgggaaagtcctctacccatccaatgaaagtgtctacccagaccaagaggtattttagtttcctgactcggggcatgtgagtaaagtcaatttgccagtcctgggcagggcaaattctcgagcttgatgtgtagggaagggagggggcctgaggaattcctgagtagtagtagtatagcagatgggacagagaagtgatttttttaggatagatttttacaaaggaaaggaaatgagaggttttaagaggcaggatagcagcttgcaacttacatggaaggggttacaaaatgacaacagaatagaataggcctgtgaggctggaaggagatattttccttgttccaagaaccatttgccttgtgtggaaagagattgataggtggaagtttcagtgggagagtaggtgggagtgacagatgagaaggagaaaaactggccatgagggacagaagttgggacactagctgcttctttagctaccttatcagcataagcactgtcctgagtgatgggatctgatgccttttgatggcccttggagtgaatgactccagcttcctttggaagtaaagtggccttgagaagagtttttattaaagaggcattaatgatggaggacacttgcatagcgaggaaacctcttttagcctacataacagcatggtggtgcaggatatggaaggcatatttagagtcagtataaatattgatgtgtagtccctttgcaagagtgagagcctgagttaaggcaatgagtttggcttgctgacaggtagtggaggtggacagagtggtaacatcaaggatagatgtggaagatactatagcatagcctgcctttgctaatgagtgacaattaggcctgatggaactgccatcaataaaccaagtgtgatcagggtgaggaacaggaaagaatgaaatatgggtaaatggagtgaatgtcaggtagatcagaaagatacagtcatgggggtcaggtgtggtatcaggaataatgtgggagccagcctaaaacagtaagatcaagttgcttggacagaaaggctacaggtcatggtcctggctcttgtgtaagaattctgaccgcacagccctgcacttcagctgtgtgtaatgaaaaagggttcagatgagttagggagagctagtgtgggagcagcttccagggctgttttaagaaatggaaaaaggagtggggaaaggatttaggatctatggggtcagctaggttttcttttgtgagtttatataatggtttagtcaggacagtaaagctaggtatttaaaggcaaaagtactgaaccatgctcaggaaagaaaggagttgttgctttgtcaagggggttggggtttgggagattagccagacacgatcagcagggagagcatgtgtgtttttatgaagaattatgtcaagatatataacggatgaggaagaaatttgggctttggaggcagatgtgcaatgtccttttgagaatagattgttggagcagcaggagggtgtcctgttgggaagatttgtaggaggggctataaagtagaaggtcatcaaaatatttaataaggtgagatgtagatggatggaaagagagtaaatcatgagaaagggcctgactgaagtaataggagctgtccctgaagccttgcagcagtacagcccaggtaagttgctgagactgatgggtgtcagggtcagtccaggtaaaagtaaagagggccttggaggaagggtgcaaaggaatagtaaagaaagcatatttgagatccagaacataataatgggttgtggaggggttgtgaagggaggtattaagaataagagagtatatgggtttggcaccatggggtggataggcaaacaatttggttgataaggtgcagatcctgaactaacctgtaagacttgtccggtttttggacaggtaaaatgggagaattgtaaggagagtttataggcttcagaagctcatgctgcagcaggcgagtgataacaggctttaacctttttaaagcatgttgtgggatgggatattggcattgagcggggtaagggtgattgtgttttaatgggatgctaaggggtgcatgatcggtccccaaggagggagtaaaggtgtcctatacttgtggattaaggtggggagatacaaggggaggatgcgaaggaggctttgaactggggaaaaggcggcaatgaggtgtggctgtagtccaggaatagccagggaagtagataatttggttaaaatgtcttggcctaataagagaactgggcaggtgggaataactgaaaaagagtgcataaaagaatgttgtccaagttggcaccagagtgggagagttttaaggggttttgaagcttggccgtcaatacccacaaccgttatgggggcaagggaaacaggcccttgaaaggaaggtaatgtggagtgggtagcctccatattgattaagaaggggatggacttaccttccactgtaagagttacctaaagtgtctgtgatggtccaggaggcttctgaggtgatcaggcagcgtcagtctccagctgctaagccaagcagatctgggaaagtgtcagtcagagagccttggaccagagctttaggggctgtaggagtagctgccaggtgagttggacaatcctatttccagtggggtcctgcatagatgggacatggcttacgaggaatcccaggctgcagcattccttggcccagtggccagatttccagcgtgtgaagcaagatcctgggggaggaggtctggaaggaatgcctgactgctgtggcttaggtgctatgaagttcttgtgtgctggagatgtggctggggtttctctcacagtggaggcaagtaattgcaactcttctctattattgtacaccttgcaggtgaggttgattaattcctgttgtggggtttgagggctggagtctaatttttggagctttttctaatgtcaggagctgactgggtgataaaatgcatattgagaatgagacggccttctgacccttctgggtctagctagggtggtaaagtgtctaagggttgttgccaaatgggccatgaactgggctgggtttttatatatgatgaaaaagagcctaaacactaactgatttgggagaggtcagctaaagaaaaaggagcattaaccttgactatgccttcagcttcagccacctctgtaagaggaaactgttgggtagatgggggagggctagccacagaacgcaactgtaagctggaccaggtgtgaggaggggaggtgatagaaggattatagggtgggagagcagaggctgaggaaaaattgggacctggctcagcctggtgaggagcagcctggggaggaggggagaggtcagatgggtctgtagaaaaggaggattcaaaggactcagagcttggggtggagactgaaggaagagacaggagagaaagaagaaagatttgggatgagtcacattgggagcagagattaggaaaagacttgttgcaggaagtcagggaccccaaatggagggaccggctgaagccatggcagaagaatgtggattgtgaagattttatggacatttattagttccccaaattaatacttttgtaatttcttatgcctgtctttattgcaatctctaaacataaattgtaaagatttcatggacacttatcacttccccaatcaatacccttgtgatttcctatgcctgtctttaatttaatctcaatcttgtcagttgaggaggatgtatattgtctcaggaccctgtaataattgcattaactacacaaattgtacagcatgtgtgtttgagcaatatgaaatgtgggcaccctgaaaaatgaacaggataacagcaattgttcagggaataagacagataaccttaaactctgactgccggtgagctgggcagaacagagccatacttctcttctttcaaaagcaaatgggagaaatatcgctgaattctttttctcagcatgggatatccctgagaaagagaatgcgcacctaggggtaggtctctgaactggcccccctggggcgtacctgtctcttatggttgagactgcaggggtgaaataaactccagtctcccatagcgctcccaggcttattagaaaaaggaaattcccacctaataaattttggtcagaccggttgatctcaaaaccctgtctcctgataagatattatcaatgacagtggtgccctaaacttcgttagcaattttaatttcaccttggtcctgtggtcctgtgatctcaccctgcctccacttgccttgtgatattctattaccctgttaagtacttgatgtctgtcacccacacctattcgcacactccctccccttctgaaaatccctaataaaaacttgctggtttttgtggcttgtggggcatcacagatcctaccgatgtgtgatgtctcccccagatgcccagctttaaaatttatctcttttgtactctgtccttttatttctcaagccagtcaatgcttagggaaatagaaaagaacctacgtgattatcagggcaggtcccccgatagggactgatgtgcaaaagaattcctggatatcaggcacctcagaccatttgcccattttacgacaagaattatctagatcttgtaggatggagaaatcgaaagtgctgttttctggctatttggaaccattgtcaagtttgtattggggtcaagtggtattgcagaagaaaataagatgtttaggttttaggtcaggtgtgagttgaagaggttttaagttattgagaacacagtctaagggtgaagatggaggaatggagggtggaagtttgcctatagtgaaggaggcaagccctgagaaaagagagggtagagacacggagagaaggggtggggggtacttgcctcccggggaggtggtgcttgccaccaaggtgaaggatcaaggcaggcatccccatggtgatcagacacctctgaaatgtgggtgaataatcaggcaggcatccccgcagtgattaaacactgagggaagactgtcttcccgagaccatgaccatcgtcagagttttgggttcacacataaaacatgtctcctctgtctctaccagaaaaggaaaggcactgaaattaagggaagggagagattgaagggtagcacagaaattgaaaggagaaagaggttgagggatagtgaaagaagttggagaagagagcaaaaagaggctgcttaccagatttaaaattggtgagatgttccttgggctggttggtctgaggaccagaggtcataggtggatctttctcacggagcaaagaacaggaggacaggggattgatctcccaagggaagtcccctgatctgagttatggcaccaaatgtcacgtgcatccgtgggaagagaccaccaaacaggctttgtgtgagcaataaagctttttaatcacctgggtgcaggcgggctgagtctgaaaagaaagtcagcaaagggagatagggatggggcagttttataggatttgggtaggtagtggaaaattacaatcaaagggagttgttctctggcaggcaggggtagtggtcacaaggtgctcagtgggggagcttctgagccaggagaaggaatttcacaaggtaatgtcatcagttaaggcaggaatcggccattttcacttcttttgtgattcttcagttgcttcaggccatctggatgtatatgtgcaggcttgggctcagaggcctgacactcagcagctactaccaccattggcaccactggcaccactgccaccaccccactgcaccccagttgcttcactctccatcacagaagccttttcagcaacagccaacatttgtaccctcaccaagccctctgattttcccaatcacaaggccttcactacaatattttcttcattcacaagtgtcacctattctccatccccaaggtaagtcaattctaattttcttgcaagggttgacagaggtaaaacctgtccagataccccaaaggtgtttcatcttggcaattcttgactctttcaaggaaataagaatagtcaaatataactaagtaaaataaataagaatatataaggtctgtaaaccaaaaatgaaattctaagccccccaaccaactgaatggacccctcctctcagccaagggcattctaaagttaacctgaaagactaattcaggccatgatggaagtgggtggtcaggcatgcctcattatatcctcctccctttggaatttagacacaaatgaccaacattaacattaaaacagagaccttaagattgacaaagtagactctttgtagcaataagatatgaacacaacagatagcaggccccaaaatatatttattcaacatatttttaaatggccctgcaaagctgtctcttgtggggaaacctacattctgtagagaatgcccttccctttccagatcttttcgcttatccaggagagaattaactaagagtctggtacctttttaagtctgataagaaacatttacaatctattctctctgaagcctcctacctggaggcttcatctgcataagagccttagtctcagaagccccttatgttaatgcagatactcccttctattgatttcaagactttaatcagaaaacctctgagtcttcctatgacctggaagcccccacttagagttgtcccacattttcagacccaaccaatgtacatcttacatgcattgattgatgtcttatgtttccctaaaatgtataaaaccaagctgtagcctgactactttgggtacatgttctcaggtctcttggagctgtgtcatgagctattggtcactcatatttacttggctcagaataaatctcttcaaatattttatagagtttgactctctgttgacaagtcctagttttaaaacagtttttatttcatttatttattttgagatggggtcttccctctgtcacccatgttggagtgcagtggcacaatctcagctcactgtaacctctgcctcccaggctcaggtcatcctgccacctcagtctcccaagtagttagaaccacatacgtgtgccaccatgtccagctaattttttgtatttttgatagagatggggtttctccattttgcccaggctggtctcaaactctctaagctcaggcaatccacctgcctcagcctcccaaaatgctgggactacaggcatgacccacagcgcccaaccaaaatgacttgtttttagacaagaggttagaaattttttttcctcaaagggccagacaataagtagattaggccagggtttctcaacctcaacagtattcacattttgggccagataattctttgttgtggagtgctttccttttcactgtagggtatttaactgcatccctgacttctactccctaggtgccaataacatcttattctcagttgtgacaataaaaacattttccagacatttctagatgtcccataggaggtaaaattgccctgaggtgagaataactggtatagactttgcattccatatgctatctgtcacaactactcagcagtgccattatagcacaaaagcagccatagacaatatgaaaatgaatggacatggtactttcccaataagtactatggaaactgaaatttaaatttcatataattttcacatgtaataaaatattcctttaaaaatttaagcatttagagatggaaaacccattgttagcttgtgggacaaacaaaaacaggtggtaagccatagctttccaactcctatttgttttatttttgaaagtttaataatatatgtaatttaaactactgtatccaaataatattattttaacatgtggtaattataaaaatcaattcataaattcagtatgtattttacatttataatacatctcaatttgtactagccacattttaagtactcaatagtcatatatggctagtagctaccatattgggccatgatgccctagagtatttgcttttaattattaggcatacttcctctcaagaggccctagtcattgggaacatgaggtcactttctctttgaaggtaaaagcctctaagtcctgttattgatctaaactcacacaaaaaaaaaaaaaactgaaagtaaggtttaaaagaccaccatgacaatatttatccaatttgtgactgtatttctgattggcaattcaaaattttgtttggcttagtaatttttcttgctatcttgaatagaattaatcccagaaggtctggtagacaatgagtgttttggtgtaactgggtttctttatgtacaaagctacagaattccccttgaagacactggccttgacatccctgaaatagcaaaatagacttttttgtttactccacgtgtagtatatgacagttagtgcattgtagatagggccatctattgaaatctacatgtgattatactctatcgaacatctactttaaaacagcaaacatgagagcctacaattgacatctcactgtttaaaaaaaacaatttcacatatatattcacaaacatactaaagtggtcaatattcaaagtaaagactcagatattcctcactttgcaccatggtttagttaaataatacaagtaccccaacaacacagtttaaatttcagttaccatggtatattgactgtgatattaaataaagtacaaatttcactgctaggttttcagtatgtaaattactatataactaacagatgtgcatcatgatcaattatgaatcacatcacttctttcacagtctttggtgactggtcacttatcagctattcagtacatgtgcagagaacaaaccatgtgtttgtgttgcctctttgtctgccagtgataaacccaagtgacatttaacaaaaacatataatgaaagagggaattggccaataaaaatgaaagctcaagaaagaaactaaagtcacaatgctggaaatgaaattcaaatcaaaggtaaatgaagttatagaggaaacagctgactgtgggaatgttgacactttcactggttggaaaggctatatagatatgaagccaaaggaacttagttaaagcagacattgacataaatgaggaatttggttgtgacaagcaatgcctattttagaccaatggcttgtatcctcattagggactgtcagtataccaaaagaatgggtgttaagtctaggaaaattataatcatcattaagttgacttttagttcccaagatttcctataattactgttttcagtatttagatattactgctaatggtaaaatggcctatgagtagaaaatatgaaatttacatttctctttatccaaatttcctagtggaaccctgcccctaacaatgtttaccacttcttactgtccattttcacagatatgggggacatgattacatgccctcaacccatatgttttctaggtaactctaccacagaataaagcggtactcaaattactctcagcttgcttaatatccactttaggacactgaaaaacaaacacaaagggactaaacaagatgaacagtacgtatcccatttcttttaagtccactatcttgatatcatgaggccccctcactggttttatgtagatgggctactggaatgcataagctagtgccaattcttattttccaaagatgttaaaagattaacataggatgggaggagagtgaggatcaaaaaatctacctatcaggtactatgctcactaccagtgtaatgaaatcatttgtacatcaaagcccatgacacacaatttacccatggaaatttacccattggcttttgctgcaaaagtaccccttgaacctaaaataaaagttggaagaaaaaaacttaacatagcaaattcttagacattgttctgacttgtttgcaagacctatgctttcttcctaagctggtgctggatagttcttttgacttttttcattattgatcttctctctccctagcattgccaccaagggaaactatttcatgtaagacattcttttccatccagccatctggttggccctaatttctctgagcacatctttcccacctgtattgtgaaccatagagcaggcctaagggaaggttataaagaaggtaaggttggtctgtattgtctcagtctcttttaatatctattcccttctgtatggtactccttcttctcagagactcctgttctctagcttcttcataatcggctttcaaaataggatctgctgtcagcgatttatccctttagtgctaggatggtaaataaattttatcttgcatgccaactctaaattattagtagcagccacctgaaatgctacgtgaaggattctggggatgcatccagttgaattagttatgagaagaaaaattggctactataggaaagagaatcaacaattcaatggattaaacaaaaagagtgttaattatttcttacatgacagtatcaatgtaaaaagttcaaatcagagagggaattctgtttcttagtcattcagggacttgatttccttccaagtcattgtactttcatctcatagggaatcactcccatctgtatactgaaactgggtagccattacatctgagttgcagctggtgggagaaagtatggaaaggagagcataccctatgtcttaggacccaggcatggaaatggcatacatcacttctactcacattttattgatcataacaatcatttggctgcacagaactgcaaaagaagctgaaaaatgtaccctagctgggcagccacacatcaagcaagaatgggagaatgtattttggtgggcaacgagcatttttgtcccttactaggcttaacaggaatcaatgctatgattaattaatgaaattttccacgagttggaaaaaaactgtggcatccacccatattatggtattagctgatcttgccttaagtgtgaaatggaagtcttgttttctttcctagagggtcctgaagtttaaatataattccaaaaaatttgacaggcattttccactatgagaaaggtacttttgttaggtacaaaaataaacttgtccctgctttatcacttaatgtagaatcaaagattcgtctccagataacagaatttcagacatcagctaccaaggagggaaaatataggcttgggaaagaaggccttcttgtatgaaatcacaccacacaggcactagacagctctacttatataaagtttagctctataaaaatgagattggggtgtttcagagattttattaggaaatgtacagagaaaacagttgatggggcaaaagctataaacactaaggtgagaaggaatcagaatataggcaagagttatagaagcatctaaatggcatttgtatctgtttaatcagcctatcaggtaaatctgcccacttttctccctaccagtgaacatctgttttgaacctctaggatatgggacctcttgcttgataccagtctttctgtgcctacctattctaaagcctgatgtcatcttctgtgccttcccttataggcttacttccttcaacgctgaccattcctccagcatttcttattctaaagaggaacaggtaagaaacttcgttggagggaaaattaagcaaggattggcattagagagggagctgtgcacagtccctgtctcaacaaaaatagcttaagatgagacaagtactttacttagcataatcttgctactgaaggggctattctaaatgtccccccgcccaacaccattatgtaaacattctctaatattcgctacttaatttagattatccacccttccttctggccattgcattccttatctagcaatgcaggaaaagggcaagaaatcaaagggaaggaataaagggacttctgtttccagactgtattttaaagggaagtcatggttggttagcgattttctttagcttttgctttgcgtttgcagaatagctaatattattgttttacctatgggaactggtatccaatctagtgcccaatggggctgttgttactagagctattttctgtgaacctcatagcagactctcttctgctgaaaatgagatttactattcattctgggttctctcaaaagccagcctgccatctacaattagcggtcacatccatttggctatagttcaggtaagtccaattcttcatgtcctgcttctcagctctctgctgctcagagccaaaaaccttatcttagaaccccaaaatacatgtctagttgctgtatcaaagaccaggtagcagcctttacagaaagtcccttttctcagaatctagttgagccaatactatgcagtgtccactatattcttcttggttcattctctttcttttggaggcaacagcttactatggtgaggacaactggaatccatctctacctattcaccactttttaagtagtaaaattggtagctcaaaagtaactttattccctgctaagtcttgctctttccaattattattcaaacatgagaggtgacagtgagaagattggtttggcattataggatggtaccatgcaaggtactctaacaaccggccttctgtctcatggtctatctccctgcagattcaggttgcatcagctgtcctcctatgtccacaatccaaatgctatgggatactatggcagacaagttttccagttcttcaggaagtagcaactgtgagtattctagctcacaatgggaggagcacaacgactggactccagccatgagcaaatacaagtaaaggtttaactgagactgtctgctccccagttctccaacccctgcctaccccaagcccctttttgtcttgatttatagtagaaaagtaatagtcggtcgggcgcgggggctcacacctgtaatcccaccactttggaaggacgaggcaggtggatcacccgaggtcaggaattctagaccagcctggccaacatggtgaaaccccatctctactaaaaatacaagaaaaaaattagctgggtgtggtggcaggctcctgtattcccagctactcagggggccaaggcaggagaatcatttgaacccaggaggcagaggttgcagtgagctgagattgcgccatcacactccagcctgggcaacaagggcgagacgtcatttcaaaaaaaaagaaaaagaaaagtaatagtcacaaaatggatataaaaagagaggtaacaatgggaaactacaggggggcaaattaatacttttatagtttcagcagacctgtagtaacagaagaaaaactgattttcacttggttcagactatctccctgggctagaaagtatagggccaaggtagaggaatcggaggtagatgaattatcttcctgtgtcttcctttaagtagttcacattgctcccatttaggtaccagttaatagtcataattactataatccctctctttggatattctctaagactttatttcctcgtgagcataaagacataaaatagtacactggaggttagctatgattaggaagagccattctaactgtaaattactcataatccaagctctttcctgatgagcatgtatccgttataaaagaggctatgataatatacagtgagaaaagaatttgtttagaaattaagtgaatttggatctagggtcacctcagctattttgcgctgcgacattgatcaagttattttctctgggtttcagatgcctcatctttattttgtgcatttagatacacaattctaattggcccaatgggaattacacagctaacaccatcatgcagcaaaacaaaataaaatacagtggaactgaagtgagggagtaaaaccaccacactatgcagatgagactatctgcctagtaacaagacatttcttggactctggtacttcagccaaatgtcctctgggagtggagaggcggggagacaatatagtccactgccagaaagaacccacatctgttccaccactctcattgtcattgcgtttcctgggatactttcagaataattcattagtaacaacaacaacaacaacaaaaaaaaaaaacagcaaggaaaaggctacaaggggaagggtttttctaggtctttgggatatatctaatcatttcttcacggaatattataaagtagggtccactcaaagctcatccctcacaagccactcaacctttgacattcttcttctatttaatgtgagtcagaattcctaagattttttgaaatcctgcctgcaaagtctgcttatgaatttttttccttaccacggagttcccataaagtgacaggttctgcctaagtagttagctacctgcaaggctgctcgaatccaactttctttcccactctactttgcattctgctctccctttgctctcctctccttaggccctcaagtgatgccagcttttgttctagcactctagaaaggagttactattttgatccagagtacacagagaagagaaactggagtgggtaaaaggaagctcgtcactgagaatgctggtactgggagcaagactgtggcaaacccaggaaatactaacaataagaacccctcaaaagttcacctttaccaagccaatggaaacaatatagctgagtggggtttgaattttgagaactaatgactcctcagctaccatgtaattgccttggtgctccatttgctataattcatgggaaaggtactaaggtccttcaactggttttccttgctacctccacctttttcagaagttggacctatgattagcacacttcctgcctatccattcacagtgaatagaatggctggctaaattttaaaccccatttaaattattccacttcgaaatttgaatgatagatgcttgcctaagtctactggcctcagtaacattaccttttctcatgaccaagggtaaaagagtaaattgataggaggcacaagtttttgtggatgtgggttgggctggcaccaaatccaactacaagcatacagtgaccacttcatacacaccacataaaaaatacaaaaactgaaaaatactatcaaatgctttgacattttctaaatatttctgctgcccctataaaattgccttgtctgacctttcctcactaaccaggagatacggtgtttttcatttcctctcccttcaaattttacaagagaatcaaggaatttgaggaccaaagcaccacaaacacaagagtaagcacagcaaatatgacaaggggactgaagtaagcccctatgggaataggatctgctgaaggaatcaagagggatggacaaaggaacagaagacactcaagaataacttcaggaagtctccttaccgcctcacctgctttccctctgtcctacacatccagccttgcaaagaaataagagtaaagagaaaagtccatgtagcaccatcccagttcagaagcaacccccaagatatgggtcaactttatcacctcaaactctactcatttataatgacaaaattcaactgttaacacataggtaagagttcttcaggcatcggttttaaaggtccatgtactgggacgggtgcggcggctcacacctgtaatcctagcaccttgggaggccaaggctggtggatcacctgaggtcaggagttcaagactagcctggccaacatggtgaaacccagtctctactaaaatacaaaagttagccgggcatgatggcgggtgcctgtaatgccagctgttctggaggctgggacgggagaatcacttgaacctgggagacagtggctgcagtgagccgagatcacaccactgcactccagcctgggtggctgagcaagacactgtctaaaaaaaaaaaaaaaaaagttcatatactgaataaccatctgggcccataacagcttaagactttctggagaaaaaaaaaaaaaccagtttccagtttaatttccaacaaagcagtaggaactcttgcctatagaatactgtgctgggggctgggcacggcgacttatgcccgtaatcccagcactttgggaggccgaggcgggtggatcatttgaggtcaggagttaagagactagcctggccaaaatggtgaaaccctctctctactaaattaaatacaaaaattagcctgctgtcgtactacacgcctttaatcccagctattcgggaggctgaggcacaattgcttgaacctgggtggcagaggttgcagtgagccgatcacaccaccgcactccagcctggagacagagcgagactctgtctcaaaaaaaaaaaaaatactgtgctggttcatttgcctataaagtcaccaatctaatgtttgggtatttgatcattcagaattctagaaacactgaagatcccttcacctactcagggtctgggcctctttcatgaatgcttaattcccacagccttacagtttatacccttctcctctcccacttttgatcctcaagttttttgcttctcacattttttactgggtttgtgcttctcagtatccttgaccaaagcaactgatgctgtaagaaatgagacttcaaaccatttacccacactgggtgattaaggtagtttaaaaaaagaaatgaggccaggcacggtggctcccgcctgtaatcccagaactttgggaggccgaggcaggtgtttcactttaagtcaggagttcgtgaccagcctggccaacatggcaaaaccccgtctctactaaaaatacaaccattagccaggcatggtggctcatgactgtaatcccagctactggtgaggctgaggcaggagaatcgcttgaacccaggaggcagaggttacagtgagccaagatggcaccactgcactccagcctgggcaacaaagcgagactccatctccaaaaaataaattaatttattaatttaaaaagaaaaagaaaaaagaaatgaagaacttacggtaattagtgtggttagggacagtgagttagaaattgtcacatcaaaatacaaagttttcaaaacagtatattttattttacaatagcaaccaactccccagtttgtttcaattgtgacatctagatggcttaagattactttctggtggtcacccatgctgaacaatatttttcaatcttccaaacagcaaagactcaaaagagattctgcatttcacatcagttcacaagttcaagagtcttccatttatcttagcttttggaataaattatctttgaggtagaaggacaatgacgaagccacttaattccttgtgtctgcataaaagcagatttattcatcacaacttcatttatgtgaataaagcagatgatgataaaatgttctcttattcttgtttaatcagtagtggtagtgatgccagaaactgtgaaaggaaggcttttagttactttcttctttccattttccaataatccattccccatccccagctgaagaaaggggtgttactgagtccagctgataccacacattgaaaggtaaacattaatatttcaaatctgatgtctaactaaaaatgtacagaatgaaaactagaaaatttcaaccccagattatcttcaaccttgctccctccaccaatcatactttgacatttatctatttccttctccacttatggatgtaattggcttgctatagaaactacagttcagatgctttgaatgtatgaactacaatgaacaataaagtcctcttcttttgaagcatattttggcttcagctttaagataatcttatgacaagaagggtcacactgattcacttaataaattccattcttacctaacacaaggtttagttgataagcacttggacaaaaataatacttttcaaaaatgtaaagcaaactagtgaggacaaaggattttgtcctcatctcaacaatgatcagctattggaactgcatgaaactgaacaatttaaacctggagctggtaatgttcttaagaccaattcagaacaaaggcaggttgcccttaaaacaggtttgaccttttccttcactcttcctcctgtcccaccctctgtgagtgatttaaaaacggaaaaggtcaaagcccagccaggcctacatttagagaaattttaaaaaaatttttcctttcaattttggccaattatttccaatttttattttattcttaaaacttaagcatggtaaaatgttaagctgttttcatccactgatattattctactataaaaagcccttcttgagcagatttgatgataaaaaggagaacatttctaaggtataattagagaagctgttgcatgagaaatcatgtctccatctccattttgctatgcgttatctgaggattgtttctgaaagagatctatttaggcagtgtatgtatgtgtcagcatgtaaaaagtaaagaactgaaaatagacaaaccttgtaaatgcacttcaaaaccaattgtggctcaagtgtaggtggttccccaaggctggtaccaatgagactggggtttgggaattagttggtcatcatccctcctgctgcccagcagtggtcagtcatttttcatgagggatggactaggaaaatgaagtgtctattataaggagagttcctgtaacttaaggagcaagctcactacaaaacccagctacctgcttatcgtagtggccagagtggtagaagagatacggagtaggaattaaaccacacaatgttatttagggactaagccatgcccctaacaagaaaacaagccaaaaggaaagtattaggcattctctgggaaggcatgcatttttttcccatgtctctggggccaaaaaccttataccaagtacctattggcacccgaatatatttgtagaatgaatgaatacatgaaaaaaaataaacagtaacctttctcctatattctactttccaagccaattaataagcaagtgtcttttcgtcatgattttttttgttttctgtttaggatttaacaaaatggttgagataacagtcacttctgtttgatgaagagtatcacttcattccatttttgtgtttttgttgcatctccaagtcagaataaatgccttttggagcagatatatttcatttagcatttagtatcatcttcatcaatactcgtatgaacgaaaaaataaaaagccctctcttattcccactctacaacgcatgtcaaaggtgatctgtttagtttttccttagtatcgaacatatcacagctactcaatgaagtttcttctcaactaaagaaacacagtctcttagagaatttgttcctgtgtttccaccataagataaatgagataaagtgcactttggtttacgtctttcaagcacttaagaacagcactttattcagttttaataaatttttactaaattggtaaatgcaaaagaatcttttttttattgctcatatgtcttcctgtctctaagccagaccaatgagcaaatacctttaaaactagttgttacatcttgaaccatttaactgtaataaaagcagaatgtttagttaatgaattaaagaacaaaccctgagcccttttatcagtctcctggctttaaactaagccaatgaggaagtgatttgggggattcctgaaactaggaaaaatgtctctttattttgaaagaaacttgcatttttctttctttttttttttttttttaatctcaaaggcaattgagtgggtcttctgggccagacctatttaatttacgaaacatagtaccttgcagagaataggcattgaaatattatttaaacaatcaaaccaaagatgttcttctatcttcagctgtcagtgatctaatgccctcatctctcttatcctcaggacccagaatggtatattccacataaaagatgctttgtttatcaaatgaatcaaaaagcacgcctgaggcatttatttttactcctttacttctgtaggccaggtcaaggtgggtctaattcacttttatcatcagcacttaagaaactggatggaagaccacaacaccttgttttttgcaaaaattttccatctcctcaatcaggccaggaagcatgtatcttctggacaggactttatctctctactcagcttagtacactgccttatattagtccatttgtcccatgttttcatcactgaataaacttgttaaatgacttttggtctggatctcacacctatattacttcatttccttctgtgagcactctataatgataacatcatttttatatcctagggcatgtagttccgagccccacagaaagtaatcaccattcagtaagccaatagttcattcctatctgtatagaactgtaggctttgtaaatctacacatagatctctgttgtaggttcaataatgataataaatgtttgtgcccccagttgttatctctaaggataagagtaatcaatgatcattcagcagatatagcttatatatgggtggcagtttacaaattataaattgattttacacatattttcttctgctacccaagacacaataaagatggtttatctttgcatccccaatgcctagcaatgagattggcacacaatagataactactatagtggcattcttcagacaaccaatcccttgcgtatgcgtattcaaaagataatcattgttattcaaattttcctactttatttgcacaatataataactatcatacaattttataaacctagtacccagcaccaagtgagaaaatcaacagttacatttatatggtgccttagagttcacaaaatgctaacataggtattgccttatttttggctgtggctaaatgaaatatgataaattttcagtgcctttaacagtgagttcacatagtaggcaatcaaaattgatctatttaacaggtatttaaacccttggtttgtataactacttatagaacccttctcactgtggtttaactatacaatgagaattttgtagagacaatacctagcttacagaaagttttattcatacagaaagcatcaaatttttcatttacaagtgctttataatttagaaagcacattcgcaagctgaattaagtgactttcggtctggatctcacatctattacttcatttcctcatactagctctttcctggttacctggaaaaatgtatcagtaataatttaacttaacctcaccagtaaagtcttgattgtttaaaattaagcaatatatcattccttacatctgaatagtatagaggataaactttcctcttattacataggagaattaatcttgtattttacagtacccaaaatagctggtatgtaagaggcacttaatattcattcatccattcattcattcataaatatgtagcccattgacatttgtatcatgctttagtttacaaagcactttaatatgcacctttctgaaattttttgttctatgagaatacttttccccctttggtagctctagcacccagcatggtatctggcacattataggtgaccacaacaagcttagtcccttatgttttcagtatattttaaagtttaaaagcagtttccatgtgttttcgtttctgatacctggaatactgcatttttactcaaaattaccagagcagcaaacacaaattggcctcaaatatacatataatttattcatttatcaaacaattccttgtgtctgcatagtactatatccttttgaaagagcacttttttatgcttgctcctttctttgtatccacaacgcttatcacagtagaatacaagtgctttacagtttacaaagcacattcactattttttttcaggtcacctagatatcaataatcattgcatttttagtgcctagcacagggacaggcacagaaaaggaaactagtagtattcagaaattttctctgaataacaaataatacatcagggggtggtaagctatgaacagcaggccaaatccaattggctcaaaaactaagaatgattttgaccttataaaaacgttgtttaaaaaacaaatatgtaacagaaaccatatggcccacagtctaaagtatttatgatttgaccccttacagaaaaactgtggacccctgatttacataatgcttcacaatttacactgcactttcaaatgttaactgcatgattgccaatacactaattggtttttctcttatgttttacagtgctttcatacacattatcagtcatttaaatcaacttcccacataaacaggaagaaaaaaatcaaggaaagtattaaacatgctcaacagtcccaggttctctcatctttaagcctagagatgggtattaaacccaggagtagcgttggcacagtccaccaaattatttggccactactatgagcagggagttcaggctgtccccttgggacctcgctttgtcccaggcacagtcaccctttccataaccatcactagaaatcccaaaccccagaatcctgctcacctaagctcaaagaaggaagctgttgctggcaggtgcttctcagaagtctggcacatctgtgtatttcttgtctaattcttctcattggcctggagcatctcttcacatttttctctagagagcctggcacttttttttccccaacaacctgaccattttatcttctcagtctagggcttctggggtcaaaagaaaggactgaaatacagtatcacctatatgaatgtctgctcctgagggaagttaacaaaagccagattagatactgactggattttggtgtctctctcaagtggagaagatgtgaatagaaacagaagtttacaaaacactatagcctaacaaataggtaaaagctgtgatttaaagctggctcaagactggcccaggcataatactgtcaatctaaaggtaaccggcaacatcaaaaagtacatctcaaaagaatcaggcttaaagataaacaggagaactggaaatatctaagagtaagaagtgtaaacaatagaaaagaggtagggtttagggttctcatcttgggatttccccaggtcttcaagcttctatccttcctgggttctgggtcatgggcctccagattccggccgttagtcttgagatacctttttcgcttgggtcctctatccatctaggtaggctttgtgacaggggccttccatccttgggttgtaggtcttccagctacaaccctgggctaatcttaggtcgttggccttgtgtcacaagtctcagttcttaggccttccatgtgtcctgtcccaggtcttaagacttctaactcaagccttgagacttccatccaactcaggccttcggtccaattcaggccaccctctgttttcttggctcttgaggcttttgttggtttcaggcctgaggcttctatctatcttggaacatgggctttccatcttagtcctcgggtctcaagtctcaaaccatctgtcttatactttgggccttctatccatatgagccttccaccttctgccctacttgagttctgggttttactgcagtctagggccttgttttggtcttggatcatctcacatggcagcctggcataaggaaccgctccacaatgcttgctctgatagccgacgttctgcacctatcaggcaggggttaggaagcccctctgccacacatgacacacacacacgtacacttgcccacatatgcaaagaaatatttaaggagagattacatgaaatcaaagagagggagatagattcatgaagaggctgaaatactcaaaggtgagtagaaagggaagaagcagagaacaaatacaagccaacagagattaatactgaaatagaaaatcacaaacagcaagagatgctgaggcacgcaggggaggagagagagaatagcccaagagaggcagaaaggaaatgcagaaatgagaaatgtgagataaaaagtagaaacagcagaaaggaggccagactcagaaaaaaggtgaaatttaaaacgaacgagaaggggaaggggtaacaaataatcacagttcacaaagagaaaagagaggtaggcagagaaaggagaggtagacagaacaagaaaaggacaaaaagcacacagcatgtgacccaaaaaggagacatgaaataaagcgtgaaagaagagccacatctaggagagcaaagagaaatagcaacaaaatgaaaaatgagagatatgtctaagacaagacacagaccactcttgtgaacaaaaagagaaaatgaggcaaaggcacacacgaaagaaattagcaagagaaacatggaaatgggtaagacacactttagatagagaacaaagagcaaagacaagaaagaaagagacaaagaaatacacacttgagtgcaagagataagcaaaggcagacattcagaggaagtaagtagtagaagaggcaagatacagtgaggggcacaagaggcatgaaaagcatcacagaaagataaaaaaaatcaaaaagtgtcattagtaattataataaactattgttactacgaatactacttatagtactacaataataacaaccaccaataccaacacagatgctcttctatttataaacttttaccttagggatttcttacatagaaccaaagcatgccaactctgcctgctacctgatagtgctagtggtcacttatattgtgggaaatgaacttatgagtcttcttgggttaccttttacttgacatgtgccaggcactgcaataggtgagcactttacatacatgatttcatttaaccctcacaaacagagaagtctagagactttaagttgtcaaaggtcatatacctaatgagtagcagaggatttaaaacacacaatgtatgcctcttaacatcctgttacaactatttactaggatttctggaagagccaaatgggatgtcacagatgactaagtattttcataaaaggctctttgataggacttgctcaatcccctcctttagcatcacctttccccaactctttagaaaactgacttcattctcacacttttataatggctacttcagagtttagttttctttttacactaatcttaactgacgacagagtctctcacaaacggagatgagaaagggttaccctttcagcagaaagcagaaatggtgttttaagcttctcaacgtttaaggctctaagaatgacagagggcctatacagtgaagacatagaacacacaagcaaaggctaaattcttctgtgatacaactggtaagaagaccataatgtctttgagttgcttcagtgaacccagtcagtaatatggaagactggtcatctttccatctcacatttagccccacttcacattagaccaacacaccccatccaacaccagctcccaaaaaacagctgttataacagttctgaagtgatcctcacaggactgcaacatcaacaacttacttcattcagctatcctcaagtgctagagtgccaggcatgttgatcttcaggtgggaaggctgacttccttcagtgtgttcaaatttcttggacctgctgaagactcagctctctgcactgcttgtaggaagtataatgatttggcagataggaacaatgaagagctataaaaaaacatgagataaaccatgtaaatgccataaatattgagtactgtgctagagttacataagattcaaattaataagcaatagaaaatgtttccacagaactttgaaacctataaagtcaaaacttttaggtctttagagagaaaatttcctcattcaacagaataggaaactggcataaatgggaaaatgtcttgccaaatatcacttgatgagtcactagagacaccactaccagtcatagccttataccttagttaaagaccagaactgccgggcgcggtggctcacgcccataatcccagcactttgggaggttgaggtgggcggatcacctgaggtcaggagtttgagaccagcctgaccaacatggagaaacaccgtctctattaaaaatacaaaattagccgggcgtggtggtgcatgactgtaatcccagctacttgggaggctgaggcaggagaatcgcttgaacccgggaggcagaggttgcagtgagctgagattgcaccattgcactccagcctgggcaacaagagcaaaactccatctcaaaaaaaaaaaaaaaaaaaaagacttccatcctgttttaagtgccaatcagctaggaaagagtccctttaaatgattaataactgagatcacaaaaataatagatatgagagggaaaaacataaggtcttcccaatgtttaaggctcacttcgatgttttaagacccctcaagtttgctttaagtctcctggctcaggactaacaaaacacagccttagagcagcattttcaaaactcacaatattgctctttgagataaaggtgagtcactctggaaggcaaatattctcacaataagaaaattcacataggttgtttaacattgcagctaaaatacaaaaaaaaagaagaagaagaagaagaaaaagaaaattcacatagactactggccctaggagaatttatctaaagattatgagtacaatagatagatcttcctagataactctcaacttagctttctagttcctagactttctaacaatttgttagtaactctctatttctaaatctacagagatttctagtcaattataacatttcaagagttcttacccatgaaaatatttcatgaaatttatagctacccactatttacgaagaatgctgggcaaagcctatacgttcaggatttattgcaccgaatggtcacctttatctgccaattctcactcgctaatcagcctctcccaacactgacctagagaatgtagggtcctggttctttagctcctgcctgatgacagataactttgtgccatttttagtcaggtttccatttgtatttatgcggcttccatcaatcagcaaccatagcataaaaagacacacctctcacttgttgtattatacaccatggcatcccaagccatcctgaagtatgtaaatgattggcaaagttcttctgtaaggctttaagagagactttggggaccacatggaacagaatgatttgcccatgtgatcaatgtcactgatgtgacagttgtccatgttctcctaaaagaacaacttagctgtaagcctctgccacgtgctatagtcccactccaaacacccgaacacatgcaacccgctaccctctttacatcatcactttaaccagttaatctcacacccagttgcttcccaggttagttaggaagctgtttttaccaaatcatatgcagaataatgatgaatacgacctcagtgaaacactaagtgcaatgtatactggaaaacaaaatcaaaattaagactacttattatgcttttagggacagcttacgcaccttgacgtgtggtggttgtttttgagactttatcttcctatctgggaccaggaaagtatcttgacagaacctcctgacctagggttgttgcccagtggtagtgagcttttcccctggaggatcctcatgccccatctccacctagggatcgtcaaagggaatggatcactaacactgtaaaacaacaagcctattcttctgaggaagatctgaaaagagataaaagaaaaagtattgaaatgcagtacactgggaaagtctgttctaatgggcaactagtggttgagttcaaccatatttttacccttttcttcatgtggattgaagagtggacatttacagttgtgcggagctgttatattctggctaccaacttagcaaaaaaaaaaaaaattatcctattcattccagctctattctgtatgctttccctcatttccaagagaaatttagaactgagtaattgccaatattcccatgctgcattttattctccagtctttattactgagcgatcctctacaatgtgggttgttaatacccttgtgttctcagcacaaaatatagtaggggggtcaagaaatcaagaggttgaaactaatggaaggagaaactaatgctttctcaaccaagagagccatgaagccacacagaaaaggtcggatgtggtctaaccctatgagttatgtaagaattctcctccacaatgcctctggcttcctttataaagagctattttaagaactgagaaatccacctctatcaaagtgcctgtcagctagttctgtagcatccccctcttttaatttgtactttaagtagtgccatgccataatattgccaagataaagagaattgtttcctactcaatccacatggtaacatttcttcaacaacctgtataatagggcgccaccaaagttctaggatattcggagaaaccaagaatggtcacaagcacatagaactccagttataacaacagctggccaggcgtggtggctcacgcctgtaatcccagcagtttgggaggtcgaggcgggtgaatcacctgaggtcaggagtttgagaccagcctgaccaacatggagaaaccccgtctctactaaaaatacaaaattagcctggcgtggtcgcgcatgcctgtaatctcagctactcgagaggctgaggcaggagaataacttgaacccaggagacagaggttgcagtgagctgagattgcgccattgcactccagcctgggcaacaagagcgaaactgcgaaaaaaaaaaaatacacgccacaaaaacagttaagcaaatctatgcagaaggaaaaacaaggtacagaaaaccagggattcagtaaattccttatacaggcccccggggctctcctattccactttttaacaatttcaattgtttttcaagctaagaaattttgatttcttaaaacaaggaaatggcagtgataatggaattaggcctaccaaaactgagctaatacagatgaagttagtcttatttgtaaacaaatcctgagaacttaatacccatctgccaaaggaaagtgggaataatttaaaaggccactaatcaaaaggtgttaagttcattaaatctatcttgctgtgtggtgagaaaagaaataatttagtgctttgcatctctcattcttcattggggatcaagtatgcttgcccttacagacctcactggagcccagctctgagggataaatgaaacaggccgaactcattatgtaaagttaaaatgtatgtgtacatgcaaaagaaaaagtataggaattgatgaaaactggctcacgttctgcttttctttctttttaagagactgggtcccgctctgccacctaggctggagtgcagtggctaatgatggctcactgcagccttgaactcctgggctcaagcaatcctgctgcctcagcctccagagtaggtaggactacaggcacgtaccaccatgcccaactaattttattttattgtagagacatgggtcttcaactcctggcctcaagtgatccccccacctcaacctcccaaagccctggaattacaagcaggagccaccatgcccagctgtgttctgctttaaaaaggagagttgtgggaagttcaatccaaagacagaagcactacaacaataaattccccaaactacctttttctccagatagctggcaacccatccaagtagattagctggagcttggccagattctcaaagggaaagatatgattaatttggagcctcttatagctgtttgcagtcctcaggtctcacatgctcagaatgtccttaagaagaaagacagggttcagtaggctaccaaagcaccggtaggataccaaaagagttacaaaaaccccaatgaaaaaaacctaggaagtataaactgaagcattagacataggtatctcctgtctctactttctagcctgcttggtctccctaaagtcctctaatgacaagccctggcagtacacgggaagattagacaagtgaagaaaaagaactacatgaaaatatgggtcaaaccaataccgaccttaagggctgacactaaatttgtggctaatggtcatcctgttgctgaaaatacttcaagattcaaggtggtgtggcaactgctactactgcttagaggtgcaattgtcttgactgtttttaataattggctatctacctttactatagcataggagctcactaaaggggatctaagccaaatttgcagtcttgaaagcactttgcatggtactgtatagtatggtgtgaaaagcacccagtatgttaaacctgagtaccttaaatgaatacaggcttccagatccctgatcagggattactgtatcatgaggaaacctttatgtcaatgtcaaacaggaatatatggaacatcacttattcaacactattctctagctttaaaaaggccaaactgttctatgatgttctcaatataagcagaacaagcttcaaaatctcttgccaacatccttccccatcctaatttaatctaagattagatacttgacttccaaatgcaggcttccagttaaacatggcggttcatacatgtttatgcatttactctactgcttcctaaaactccattaatgagagtaaatgtgcactccatatgcaagcaaatacacctaaagaaattttaaataaacggatcctagctcaaattcatttatacactggcatctaaaagggaacaactattccagtctccccaagtcttcttaagcatatttatggagtatcttgctttagcatcaaagccctctagttttgcctgttactatggtgatgacatactcaaagagcattccctttcccttaacgggaatctaaggctagagaaaatggttacattttggaactgggaatctaaggctagagaaagtggttacattttggaactgatacagaaccatacatttcactagggttcaatattcactgacaagaattttgagaatccgtcatcttgcagaccaacaaaatatcaaagtcttatggagagaataactgagtggcacagccagccatctggttcaaatactccagcatcagacagaattgtcacagctagacgtgatattaataatcacataggccaggcgcagtggctcatgcctgtaatcctagcactttgggaggccaaggcgagtggatcacctgaggtcagaagttcgagaccagcctggccaacacggcaaaactccatctgtactaaaaatacaaacattagctgggggcggggggtggggggcgggtgcctgtaatcccagctacttgggaggctgaggcaggagaattgcttgatcatgggggaaggaggttgcagtgagtcgagatcgtgctacttcactccagcctgggcgaaagagcaaaactccgtctcaaaaaaaaaaaaaaatcacataattcaacattttcattctctaaggaaactgggaacccagaagatgaaactacctcaatgttacacaaatagaaggtaaccaagtgatacttaaacccatgtcttcccacaattcaaaggtcttttaactgtggggtctgtgcatagattctcaggacatatggggagctttctacaaaactttcacaatactctcatttcactgtaaggatagtttagatcagctatatgactacttcataatataggaccacgttgccagattagtggcaaatgttctagttttgttgcctggggattacagaaaagaagagaagcaaacaatatataaatgtgttttgtgccaaatgaaagtgaaatagcattgctatgtgctataatggcaggatttaaagcagtttgaaaacagcagtttggtgaagtgcatcaacacagcatgtgatattacagacacgccactcaaaagaaactataatactataatagtagtgccatatttgcattttagttatctattaactactaatttgtacatctgctatgttttatagttgtattatagatgtaggcaaacagatttcattccaggtttgttcatacactttaacttaacaattattcccataaacctaaatagtacataataatatttttcttttacagaaaacgtttaatcaaatatagcaaaatattaattgtagaatctaagcagtgattatgtaggtgcacactgaataattcttttcttgagagaaaacctccctactatcaaacttattatacagacttgagaaacactgtctcaaactaatatctaatataaaatattaaaattatactcaacataatttcatgttattttaaattgctgattaatatgcaatgcacatgacaatgctgttaatcagggcactttttgtaacagcacaccaactttcttgactaaaattgaaaggttaaaaattatatttgggttacaattgccaaggaagacatctactccttgggtcttaaataggcactttggaaggctagctggaggtcagtaaatgaacctttcctatcccacgtgtgaacatgcctttcccttcctttcccacctccagtgttctcagggtcctttagctcttagaaaaaaacggaaagaagaaatgcatacccaaggaacagcttacctggcgatatcagaataatttaatctgaaaatcaatgtcaaaatgtggattgaagtaaattctggttcttaagataaagtttgtttctgcaacctattttacgtttcaaaactggcagaaacatttagggcagaagggtcatttctagtttcaagaataccctacagctaaactctccctaaacttaaccatagaagcaaatgtcaaacactcactaccgtaatattaacagaaaaatttcccaaccaagccaggtttctcactgtagaaatgggaggtaacagataagcaaggaggtgagactataatgatccatgtggcaatgattagagttggagacgtaggtataaacacatttagtttaatatagatacagatggttatatatatttatagctatgtgcatatacacacgttagaatgcaaatatatatctccttgctcttgtcaactgaaaaggtcttgaaggaatgacactccagtagtaatgagcgcacctagcattcacttcttgatttctaatattactctccaataaaaagtatcaaggctccttgcagaaatacatcattttaggtccaggcaggagatatgcaaatgagtctgaagcatgttgtagttccaaaaataagaaagtgctcaaacaaaaaacccacattcatggggttatatcaaagccaaatgaaagacctcccaatggccaaagctggaacaatttgaacaacagaataaagtaatactgtattataacccagagtataaaatatccctgagatcatactgatataaatgactgaataaacacaatacattgtggagaaaagacatcctgtgcaaaagaattccaaataatttatgtaaatactctgccctcaatgaggtggaaggtaatttcccattccttaagtgctggctgcacatagtgacttcctatgtgaacagtatagtagggaaatggagaaataaagactaattttacgctggagaaacctgacaaatagtacctcagacaggtgattaaggataacataaacagtgataagtcatgttgatagtatgtactcttgataagtgataagaatggcactctacctttgtggtcttcctcctaaacactcataaacccaatctagtcatgagaagaacatcagacaaattccaatagagagacattctatagaatactggaccattagtcctcaaaactgtgaagttcatcaaaaacaaagagtctgagaaactgtcattaccaagaggagcctaaggagacatgactactaaggacacatgcagcgtggtatcttcaatgggatcctggaacacaaaaagaacattaaggaaaaactaaggaaatctgaataaaatatggactctagttaataataatgtatcaatattggtttgttgtgacaaatgtaccaaactaatgtaaaatgttaacactgggaaaaactgggtgtgaagtacacagaaactctatcttcagaatcattctgtaaatctctacactgttctaacattaaaaggttattttttctaaaaatctcccaaccagttgctgaagacttataagacacagtttttaaaaagcaagcaaaatggaacctaagaactggtaagtctatgttccagatttttctacagtacgtaccatcattgtttgcagatctgatctaaagacttactctctttcttttctgtttatatggatttataataggtaattttgatgttaaaatatacaaggcccaaataaccaggtatccgtaatatcaaaaagttattttttaaaaaaacattagcaattaaactttgtttttgtacatcaacagatttcctggaaagacctagtcaatctgctgtaaaaaataagtcgtaagttagtagctaattttcagtcaagggagatctataaggctggaaaactttaataacatatagattgtagagtgattatatcccatcactgttcaatgccaatcacactaacagcatactataaaatatactatgccactagttttcaaagctatgggtaaagtaacatagataattttataatgggacctggtaaagtacagtgatgttccagtcatatccctatttttaaattcttatacgcacttgattatgtaataagagggtattgcttgggtctactgcataacctctcatgtttccgggaacactagaagactagcattctaattggttaaggaaaataatactttaagtctacccataatttaagaagtctagcaccggtcaaatttacattttgtttcagtttctcatcctaacatgaaaaaaaataatcaaaagttatttctaatataaacatcaaaacagtaaaggagaggcttctttaccaaactcatttgtataagatgcagaagaagcccaagctccatgtatcagtactcaatttggaaaggtcaaggaagagctatcaagtaaagcctaagtcaccaacaaaaacatgaccaactcgacagcctaatacacatatatatagtgatatataactgtacatggccactgaagtttaacttgttaaattcagcaggccagctatgtcttaaatacatgagctccaacttgagttggatttttgaaggaaacctgtgtaaaatgctacttgcctacagcccaaaatatggtagtgagaatatcaattttctcccaatccagtctttaagacaaggcagaggaaggcattagctctgtttaactgacacatcattactctttgccatccaaactgataaggtttgggggaagagaagaggcattagctcagttcagatataatcattagtttctttctctttaagctggtaacgtatttttccaggatgctttcacatataagaatattttagcagtcaacaaaggtcaactcttaattcattactttaagacatgaactcccttcaagctgtacatttgataatcagggcacaaacaccctgaaaagaaattatgaatgcctaatcacagcagccctgggtctcacagtcttctgtaatttagggaggtggctagagaaatggaagttacagaaagataaagctgaaagaggatatgagaaaatggtcagaaaacttcctccaatcctacatgttaaggttttataaagggaaaagtcagaaaagaaatgacaataatcatttaaagaaatgccaaaaaagtttccttcattagacttttgaaaattttccaaatcacaaaatgtcattttcagggatttaggtatttgatataagcccctatcttatttcactagcagtctcgagatggtcagattgatggtgatctgaaccaaactcagagccaggactaaagtctaagcatttctgcccaaaaccataatgatttccttctgcatcctccataagaaagcaaattccttgatataaatcctgtctttggttttgctatttattccagcacctggtacaataatatttgttgaactaacacaagaattatctctattttgaagatgcccacatttccagagcatccctttttacaattgctagagatttttcttaagggtggaaattatttcaagcaatgaatttaaatacagcttcaagattcacctttggatgctatctagtataatcaatccacctaaaatcaagccatccttcctcttgacttaaggtacagaatcacctccaaattcattcatttaaaacaaattccaataataattataattgtatgttgacaatgaatgacaatttaattaccaatagaagatttcataagcatagaccagggtttctcaaattggggtgataaccctggggatttgtgaatatattctaatggatccccaagttctacataagttatataaaacacatctttgacaaagacaacgtgaaattggaaaacatatttacatttcaaatatctttgttaagtcagtgttcctcaaaacacatttttttaggatctcagaaaattttgttcctttagaaggtgtttcatcatgaagcattacttgggtttgagaaacaatggcacagaccatgtttccaagaaggttcaagaccatgatgtatataaccctcagtcagccagacaatgttgttaagcatatggagtggggctgggaggcatggaaacaagccctgaggaaatatggatatgaattaaaacgggctataagtgaagccagttcacttatatggttcttgttgctcctgctgtgatgcatgaatgtgcaccagaaaaaaagtttcgaatgttatgttaaacaatattttgtcagctggaaaacattaaggaggctaagcttcttttagctttacgaaaggtgggaggaaagaaggtatataaactacagcataaagtaggcaaggaaggtcaaggttttgacttcacttctccactaccctcttggcaaaaaggttccaaacttaaaaagtatctacgatatgcattatccatggtcatctgttcttgggcagaaatgtagtaaaattgtggaaggagccgaagtattagatttatgccctcaatctctgaactttaaaatactcaagcttatgagatttagcaatcactaatttgccaaccttcgcaaatagccaaacacaatggctatgctctatccctttcatctctttccatggctccaaaagaggtaaaaaacaaatgaaattaaaataaaccaactggactatccagatggctgcaatattaatcctatcttggcttaaagagaaaaagcaaacccacttccttaagtttattctatcaacttcaaatccttgtgggttcccttcctaaaactactacttatgattcacacaaaacagcacttattattttctaaagttatttcaaatgtgctcacattagctcctcaacgataaaatcatctcaggaatgaaattatataggatgatatcattcctacccaggttatcagtgtaacctagcatagagctgggtccacaatattaattctacagttctgctggttaactcacatatgtgtatttatgcatgtatgtatgtat

SEQ ID NO: 108 - DNA, 61027 bp, Homo sapiens
atacatacatacatgcataaatacacatatgtgagttaaccagcagaactgtagaattaatattgtggacccagctctatgctaggttacactgataacctgggtaggaatgatatcatcctatataatttcattcctgagatgattttatcgttgaggagctaatgtgagcacatttgaaataactttagaaaataataagtgctgttttgtgtgaatcataagtagtagttttaggaagggaacccacaaggatttgaagttgatagaataaacttaaggaagtgggtttgctttttctctttaagccaagataggattaatattgcagccatctggatagtccagttggtttattttaatttcatttgttttttacctcttttggagccatggaaagagatgaaagggatagagcatagccattgtgtttggctatttgcgaaggttggcaaattagtgattgctaaatctcataagcttgagtattttaaagttcagagattgagggcataaatctaatacttcggctccttccacaattttactacatttctgcccaagaacagatgaccatggataatgcatatcgtagatactttttaagtttggaacctttttgccaagagggtagtggagaagtgaagtcaaaaccttgaccttccttgcctactttatgctgtagtttatataccttctttcctcccacctttcgtaaagctaaaagaagcttagcctccttaatgttttccagctgacaaaatattgtttaacataacattcgaaactttttttctggtgcacattcatgcatcacagcaggagcaacaagaaccatataagtgaactggcttcacttatagcccgttttaattcatatccatatttcctcagggcttgtttccatgcctcccagccccactccatatgcttaacaacattgtctggctgactgagggttatatacatcatggtcttgaaccttcttggaaacatggtctgtgccattgtttctcaaacccaagtaatgcttcatgatgaaacaccttctaaaggaacaaaattttctgagatcctaaaaaaatgtgttttgaggaacactgacttaacaaagatatttgaaatgtaaatatgttttccaatttcacgttgtctttgtcaaagatgtgttttatataacttatgtagaacttggggatccattagaatatattcacaaatccccagggttatcaccccaatttgagaaaccctggtctatgcttatgaaatcttctattggtaattaaattgtcattcattgtcaacatacaattataattattattggaatttgttttaaatgaatgaatttggaggtgattctgtaccttaagtcaagaggaaggatggcttgattttaggtggattgattatactagatagcatccaaaggtgaatcttgaagctgtatttaaattcattgcttgaaataatttccacccttaagaaaaatctctagcaattgtaaaaagggatgctctggaaatgtgggcatcttcaaaatagagataattcttgtgttagttcaacaaatattattgtaccaggtgctggaataaatagcaaaaccaaagacaggatttatatcaaggaatttgctttcttatggaggatgcagaaggaaatcattatggttttgggcagaaatgcttagactttagtcctggctctgagtttggttcagatcaccatcaatctgaccatctcgagactgctagtgaaataagataggggcttatatcaaatacctaaatccctgaaaatgacattttgtgatttggaaaattttcaaaagtctaatgaaggaaacttttttggcatttctttaaatgattattgtcatttcttttctgacttttccctttataaaaccttaacatgtaggattggaggaagttttctgaccattttctcatatcctctttcagctttatctttctgtaacttccatttctctagccacctccctaaattacagaagactgtgagacccagggctgctgtgattaggcattcataatttcttttcagggtgtttgtgccctgattatcaaatgtacagcttgaagggagttcatgtcttaaagtaatgaattaagagttgacctttgttgactgctaaaatattcttatatgtgaaagcatcctggaaaaatacgttaccagcttaaagagaaagaaactaatgattatatctgaactgagctaatgcctcttctcttcccccaaaccttatcagtttggatggcaaagagtaatgatgtgtcagttaaacagagctaatgccttcctctgccttgtcttaaagactggattgggagaaaattgatattctcactaccatattttgggctgtaggcaagtagcattttacacaggtttccttcaaaaatccaactcaagttggagctcatgtatttaagacatagctggcctgctgaatttaacaagttaaacttcagtggccatgtacagttatatatcactatatatatgtgtattaggctgtcgagttggtcatgtttttgttggtgacttaggctttacttgatagctcttccttgacctttccaaattgagtactgatacatggagcttgggcttcttctgcatcttatacaaatgagtttggtaaagaagcctctcctttactgttttgatgtttatattagaaataacttttgattattttttttcatgttaggatgagaaactgaaacaaaatgtaaatttgaccggtgctagacttcttaaattatgggtagacttaaagtattattttccttaaccaattagaatgctagtcttctagtgttcccggaaacatgagaggttatgcagtagacccaagcaataccctcttattacataatcaagtgcgtataagaatttaaaaatagggatatgactggaacatcactgtactttaccaggtcccattataaaattatctatgttactttacccatagctttgaaaactagtggcatagtatattttatagtatgctgttagtgtgattggcattgaacagtgatgggatataatcactctacaatctatatgttattaaagttttccagccttatagatctcccttgactgaaaattagctactaacttacgacttattttttacagcagattgactaggtctttccaggaaatctgttgatgtacaaaaacaaagtttaattgctaatgtttttttaaaaaataactttttgatattacggatacctggttatttgggccttgtatattttaacatcaaaattacctattataaatccatataaacagaaaagaaagagagtaagtctttagatcagatctgcaaacaatgatggtacgtactgtagaaaaatctggaacatagacttaccagttcttaggttccattttgcttgctttttaaaaactgtgtcttataagtcttcagcaactggttgggagatttttagaaaaaataaccttttaatgttagaacagtgtagagatttacagaatgattctgaagatagagtttctgtgtacttcacacccagtttttcccagtgttaacattttacattagtttggtacatttgtcacaacaaaccaatattgatacattattattaactagagtccatattttattcagatttccttagtttttccttaatgttctttttgtgttccaggatcccattgaagataccacgctgcatgtgtccttagtagtcatgtctccttaggctcctcttggtaatgacagtttctcagactctttgtttttgatgaacttcacagttttgaggactaatggtccagtattctatagaatgtctctctattggaatttgtctgatgttcttctcatgactagattgggtttatgagtgtttaggaggaagaccacaaaggtagagtgccattcttatcacttatcaagagtacatactatcaacatgacttatcactgtttatgttatccttaatcacctgtctgaggtactatttgtcaggtttctccagcgtaaaattagtctttatttctccatttccctactatactgttcacataggaagtcactatgtgcagccagcacttaaggaatgggaaattaccttccacctcattgagggcagagtatttacataaattatttggaattcttttgcacaggatgtcttttctccacaatgtattgtgtttattcagtcatttatatcagtatgatctcagggatattttatactctgggttataatacagtattactttattctgttgttcaaattgttccagctttggccattgggaggtctttcatttggctttgatataaccccatgaatgtgggttttttgtttgagcactttcttatttttggaactacaacatgcttcagactcatttgcatatctcctgcctggacctaaaatgatgtatttctgcaaggagccttgatactttttattggagagtaatattagaaatcaagaagtgaatgctaggtgcgctcattactactggagtgtcattccttcaagaccttttcagttgacaagagcaaggagatatatatttgcattctaacgtgtgtatatgcacatagctataaatatatataaccatctgtatctatattaaactaaatgtgtttatacctacgtctccaactctaatcattgccacatggatcattatagtctcacctccttgcttatctgttacctcccatttctacagtgagaaacctggcttggttgggaaatttttctgttaatattacggtagtgagtgtttgacatttgcttctatggttaagtttagggagagtttagctgtagggtattcttgaaactagaaatgacccttctgccctaaatgtttctgccagttttgaaacgtaaaataggttgcagaaacaaactttatcttaagaaccagaatttacttcaatccacattttgacattgattttcagattaaattattctgatatcgccaggtaagctgttccttgggtatgcatttcttctttccgtttttttctaagagctaaaggaccctgagaacactggaggtgggaaaggaagggaaaggcatgttcacacgtgggataggaaaggttcatttactgacctccagctagccttccaaagtgcctatttaagacccaaggagtagatgtcttccttggcaattgtaacccaaatataatttttaacctttcaattttagtcaagaaagttggtgtgctgttacaaaaagtgccctgattaacagcattgtcatgtgcattgcatattaatcagcaatttaaaataacatgaaattatgttgagtataattttaatattttatattagatattagtttgagacagtgtttctcaagtctgtataataagtttgatagtagggaggttttctctcaagaaaagaattattcagtgtgcacctacataatcactgcttagattctacaattaatattttgctatatttgattaaacgttttctgtaaaagaaaaatattattatgtactatttaggtttatgggaataattgttaagttaaagtgtatgaacaaacctggaatgaaatctgtttgcctacatctataatacaactataaaacatagcagatgtacaaattagtagttaatagataactaaaatgcaaatatggcactactattatagtattatagtttcttttgagtggcgtgtctgtaatatcacatgctgtgttgatgcacttcaccaaactgctgttttcaaactgctttaaatcctgccattatagcacatagcaatgctatttcactttcatttggcacaaaacacatttatatattgtttgcttctcttcttttctgtaatccccaggcaacaaaactagaacatttgccactaatctggcaacgtggtcctatattatgaagtagtcatatagctgatctaaactatccttacagtgaaatgagagtattgtgaaagttttgtagaaagctccccatatgtcctgagaatctatgcacagaccccacagttaaaagacctttgaattgtgggaagacatgggtttaagtatcacttggttaccttctatttgtgtaacattgaggtagtttcatcttctgggttcccagtttccttagagaatgaaaatgttgaattatgtgatttttttttttttttgagacggagttttgctctttcgcccaggctggagtgaagtagcacgatctcgactcactgcaacctccttcccccatgatcaagcaattctcctgcctcagcctcccaagtagctgggattacaggcacccgccccccaccccccgcccccagctaatgtttgtatttttagtacagatggagttttgccgtgttggccaggctggtctcgaacttctgacctcaggtgatccactcgccttggcctcccaaagtgctaggattacaggcatgagccactgcgcctggcctatgtgattattaatatcacgtctagctgtgacaattctgtctgatgctggagtatttgaaccagatggctggctgtgccactcagttattctctccataagactttgatattttgttggtctgcaagatgacggattctcaaaattcttgtcagtgaatattgaaccctagtgaaatgtatggttctgtatcagttccaaaatgtaaccactttctctagccttagattcccagttccaaaatgtaaccattttctctagccttagattcccgttaagggaaagggaatgctctttgagtatgtcatcaccatagtaacaggcaaaactagagggctttgatgctaaagcaagatactccataaatatgcttaagaagacttggggagactggaatagttgttcccttttagatgccagtgtataaatgaatttgagctaggatccgtttatttaaaatttctttaggtgtatttgcttgcatatggagtgcacatttactctcattaatggagttttaggaagcagtagagtaaatgcataaacatgtatgaaccgccatgtttaactggaagcctgcatttggaagtcaagtatctaatcttagattaaattaggatggggaaggatgttggcaagagattttgaagcttgttctgcttatattgagaacatcatagaacagtttggcctttttaaagctagagaatagtgttgaataagtgatgttccatatattcctgtttgacattgacataaaggtttcctcatgatacagtaatccctgatcagggatctggaagcctgtattcatttaaggtactcaggtttaacatactgggtgcttttcacaccatactatacagtaccatgcaaagtgctttcaagactgcaaatttggcttagatcccctttagtgagctcctatgctatagtaaaggtagatagccaattattaaaaacagtcaagacaattgcacctctaagcagtagtagcagttgccacaccaccttgaatcttgaagtattttcagcaacaggatgaccattagccacaaatttagtgtcagcccttaaggtcggtattggtttgacccatattttcatgtagttctttttcttcacttgtctaatcttcccgtgtactgccagggcttgtcattagaggactttagggagaccaagcaggctagaaagtagagacaggagatacctatgtctaatgcttcagtttatacttcctaggtttttttcattggggtttttgtaactcttttggtatcctaccggtgctttggtagcctactgaaccctgtctttcttcttaaggacattctgagcatgtgagacctgaggactgcaaacagctataagaggctccaaattaatcatatctttccctttgagaatctggccaagctccagctaatctacttggatgggttgccagctatctggagaaaaaggtagtttggggaatttattgttgtagtgcttctgtctttggattgaacttcccacaactctcctttttaaagcagaacacagctgggcatggtggctcctgcttgtaattccagggctttgggaggttgaggtggggggatcacttgaggccaggagttgaagacccatgtctctacaataaaataaaattagttgggcatggtggtacgtgcctgtagtcctacctactctggaggctgaggcagcaggattgcttgagcccaggagttcaaggctgcagtgagccatcattagccactgcactccagcctaggtggcagagcgggacccagtctcttaaaaagaaagaaaagcagaacgtgagccagttttcatcaattcctatactttttcttttgcatgtacacatacattttaactttacataatgagttcggcctgtttcatttatccctcagagctgggctccagtgaggtctgtaagggcaagcatacttgatccccaatgaagaatgagagatgcaaagcactaaattatttcttttctcaccacacagcaagatagatttaatgaacttaacaccttttgattagtggccttttaaattattcccactttcctttggcagatgggtattaagttctcaggatttgtttacaaataagactaacttcatctgtattagctcagttttggtaggcctaattccattatcactgccatttccttgttttaagaaatcaaaatttcttagcttgaaaaacaattgaaattgttaaaaagtggaataggagagccccgggggcctgtataaggaatttactgaatccctggttttctgtaccttgtttttccttctgcatagatttgcttaactgtttttgtggcgtgtattttttttttttcgcagtttcgctcttgttgcccaggctggagtgcaatggcgcaatctcagctcactgcaacctctgtctcctgggttcaagttattctcctgcctcagcctctcgagtagctgagattacaggcatgcgcgaccacgccaggctaattttgtatttttagtagagacggggtttctccatgttggtcaggctggtctcaaactcctgacctcaggtgattcacccgcctcgacctcccaaactgctgggattacaggcgtgagccaccacgcctggccagctgttgttataactggagttctatgtgcttgtgaccattcttggtttctccgaatatcctagaactttggtggcgccctattatacaggttgttgaagaaatgttaccatgtggattgagtaggaaacaattctctttatcttggcaatattatggcatggcactacttaaagtacaaattaaaagagggggatgctacagaactagctgacaggcactttgatagaggtggatttctcagttcttaaaatagctctttataaaggaagccagaggcattgtggaggagaattcttacataactcatagggttagaccacatccgaccttttctgtgtggcttcatggctctcttggttgagaaagcattagtttctccttccattagtttcaacctcttgatttcttgacccccctactatattttgtgctgagaacacaagggtattaacaacccacattgtagaggatcgctcagtaataaagactggagaataaaatgcagcatgggaatattggcaattactcagttctaaatttctcttggaaatgagggaaagcatacagaatagagctggaatgaataggataattttttttttttttgctaagttggtagccagaatataacagctccgcacaactgtaaatgtccactcttcaatccacatgaagaaaagggtaaaaatatggttgaactcaaccactagttgcccattagaacagactttcccagtgtactgcatttcaatactttttcttttatctcttttcagatcttcctcagaagaataggcttgttgttttacagtgttagtgatccattccctttgacgatccctaggtggagatggggcatgaggatcctccaggggaaaagctcactaccactgggcaacaaccctaggtcaggaggttctgtcaagatactttcctggtcccagataggaagataaagtctcaaaaacaaccaccacacgtcaaggtgcgtaagctgtccctaaaagcataataagtagtcttaattttgattttgttttccagtatacattgcacttagtgtttcactgaggtcgtattcatcattattctgcatatgatttggtaaaaacagcttcctaactaacctgggaagcaactgggtgtgagattaactggttaaagtgatgatgtaaagagggtagcgggttgcatgtgttcgggtgtttggagtgggactatagcacgtggcagaggcttacagctaagttgttcttttaggagaacatggacaactgtcacatcagtgacattgatcacatgggcaaatcattctgttccatgtggtccccaaagtctctcttaaagccttacagaagaactttgccaatcatttacatacttcaggatggcttgggatgccatggtgtataatacaacaagtgagaggtgtgtctttttatgctatggttgctgattgatggaagccgcataaatacaaatggaaacctgactaaaaatggcacaaagttatctgtcatcaggcaggagctaaagaaccaggaccctacattctctaggtcagtgttgggagaggctgattagcgagtgagaattggcagataaaggtgaccattcggtgcaataaatcctgaacgtataggctttgcccagcattcttcgtaaatagtgggtagctataaatttcatgaaatattttcatgggtaagaactcttgaaatgttataattgactagaaatctctgtagatttagaaatagagagttactaacaaattgttagaaagtctaggaactagaaagctaagttgagagttatctaggaagatctatctattgtactcataatctttagataaattctcctagggccagtagtctatgtgaattttctttttcttcttcttcttcttctttttttttgtattttagctgcaatgttaaacaacctatgtgaattttcttattgtgagaatatttgccttccagagtgactcacctttatctcaaagagcaatattgtgagttttgaaaatgctgctctaaggctgtgttttgttagtcctgagccaggagacttaaagcaaacttgaggggtcttaaaacatcgaagtgagccttaaacattgggaagaccttatgtttttccctctcatatctattatttttgtgatctcagttattaatcatttaaagggactctttcctagctgattggcacttaaaacaggatggaagtctttttttttttttttttttttgagatggagttttgctcttgttgcccaggctggagtgcaatggtgcaatctcagctcactgcaacctctgcctcccgggttcaagcgattctcctgcctcagcctcccaagtagctgggattacagtcatgcaccaccacgcccggctaattttgtatttttaatagagacggtgtttctccatgttggtcaggctggtctcaaactcctgacctcaggtgatccgcccacctcaacctcccaaagtgctgggattatgggcgtgagccaccgcgcccggcagttctggtctttaactaaggtataaggctatgactggtagtggtgtctctagtgactcatcaagtgatatttggcaagacattttcccatttatgccagtttcctattctgttgaatgaggaaattttctctctaaagacctaaaagttttgactttataggtttcaaagttctgtggaaacattttctattgcttattaatttgaatcttatgtaactctagcacagtactcaatatttatggcatttacatggtttatctcatgtttttttatagctcttcattgttcctatctgccaaatcattatacttcctacaagcagtgcagagagctgagtcttcagcaggtccaagaaatttgaacacactgaaggaagtcagccttcccacctgaagatcaacatgcctggcactctagcacttgaggatagctgaatgaagtaagttgttgatgttgcagtcctgtgaggatcacttcagaactgttataacagctgttttttgggagctggtgttggatggggtgtgttggtctaatgtgaagtggggctaaatgtgagatggaaagatgaccagtcttccatattactgactgggttcactgaagcaactcaaagacattatggtcttcttaccagttgtatcacagaagaatttagcctttgcttgtgtgttctatgtcttcactgtataggccctctgtcattcttagagccttaaacgttgagaagcttaaaacaccatttctgctttctgctgaaagggtaaccctttctcatctccgtttgtgagagactctgtcgtcagttaagattagtgtaaaaagaaaactaaactctgaagtagccattataaaagtgtgagaatgaagtcagttttctaaagagttggggaaaggtgatgctaaaggaggggattgagcaagtcctatcaaagagccttttatgaaaatacttagtcatctgtgacatcccatttggctcttccagaaatcctagtaaatagttgtaacaggatgttaagaggcatacattgtgtgttttaaatcctctgctactcattaggtatatgacctttgacaacttaaagtctctagacttctctgtttgtgagggttaaatgaaatcatgtatgtaaagtgctcacctattgcagtgcctggcacatgtcaagtaaaaggtaacccaagaagactcataagttcatttcccacaatataagtgaccactagcactatcaggtagcaggcagagttggcatgctttggttctatgtaagaaatccctaaggtaaaagtttataaatagaagagcatctgtgttggtattggtggttgttattattgtagtactataagtagtattcgtagtaacaatagtttattataattactaatgacactttttgattttttttatctttctgtgatgcttttcatgcctcttgtgcccctcactgtatcttgcctcttctactacttacttcctctgaatgtctgcctttgcttatctcttgcactcaagtgtgtatttctttgtctctttctttcttgtctttgctctttgttctctatctaaagtgtgtcttacccatttccatgtttctcttgctaatttctttcgtgtgtgcctttgcctcattttctctttttgttcacaagagtggtctgtgtcttgtcttagacatatctctcatttttcattttgttgctatttctctttgctctcctagatgtggctcttctttcacgctttatttcatgtctcctttttgggtcacatgctgtgtgctttttgtccttttcttgttctgtctacctctcctttctctgcctacctctcttttctctttgtgaactgtgattatttgttaccccttccccttctcgttcgttttaaatttcaccttttttctgagtctggcctcctttctgctgtttctactttttatctcacatttctcatttctgcatttcctttctgcctctcttgggctattctctctctcctcccctgcgtgcctcagcatctcttgctgtttgtgattttctatttcagtattaatctctgttggcttgtatttgttctctgcttcttccctttctactcacctttgagtatttcagcctcttcatgaatctatctccctctctttgatttcatgtaatctctccttaaatatttctttgcatatgtgggcaagtgtacgtgtgtgtgtgtcatgtgtggcagaggggcttcctaacccctgcctgataggtgcagaacgtcggctatcagagcaagcattgtggagcggttccttatgccaggctgccatgtgagatgatccaagaccaaaacaaggccctagactgcagtaaaacccagaactcaagtagggcagaaggtggaaggctcatatggatagaaggcccaaagtataagacagatggtttgagacttgagacccgaggactaagatggaaagcccatgttccaagatagatagaagcctcaggcctgaaaccaacaaaagcctcaagagccaagaaaacagagggtggcctgaattggaccgaaggcctgagttggatggaagtctcaaggcttgagttagaagtcttaagacctgggacaggacacatggaaggcctaagaactgagacttgtgacacaaggccaacgacctaagattagcccagggttgtagctggaagacctacaacccaaggatggaaggcccctgtcacaaagcctacctagatggatagaggacccaagcgaaaaaggtatctcaagactaacggccggaatctggaggcccatgacccagaacccaggaaggatagaagcttgaagacctggggaaatcccaagatgagaaccctaaaccctacctcttttctattgtttacacttcttactcttagatatttccagttctcctgtttatctttaagcctgattcttttgagatgtactttttgatgttgccggttacctttagattgacagtattatgcctgggccagtcttgagccagctttaaatcacagcttttacctatttgttaggctatagtgttttgtaaacttctgtttctattcacatcttctccacttgagagagacaccaaaatccagtcagtatctaatctggcttttgttaacttccctcaggagcagacattcatataggtgatactgtatttcagtcctttcttttgaccccagaagccctagactgagaagataaaatggtcaggttgttggggaaaaaaaagtgccaggctctctagagaaaaatgtgaagagatgctccaggccaatgagaagaattagacaagaaatacacagatgtgccagacttctgagaagcacctgccagcaacagcttccttctttgagcttaggtgagcaggattctggggtttgggatttctagtgatggttatggaaagggtgactgtgcctgggacaaagcgaggtcccaaggggacagcctgaactccctgctcatagtagtggccaaataatttggtggactgtgccaacgctactcctgggtttaatacccatctctaggcttaaagatgagagaacctgggactgttgagcatgtttaatactttccttgatttttttcttcctgtttatgtgggaagttgatttaaatgactgataatgtgtatgaaagcactgtaaaacataagagaaaaaccaattagtgtattggcaatcatgcagttaacatttgaaagtgcagtgtaaattgtgaagcattatgtaaatcaggggtccacagtttttctgtaaggggtcaaatcataaatactttagactgtgggccatatggtttctgttacatatttgttttttaaacaacgtttttataaggtcaaaatcattcttagtttttgagccaattggatttggcctgctgttcatagcttaccaccccctgatgtattatttgttattcagagaaaatttctgaatactactagtttccttttctgtgcctgtccctgtgctaggcactaaaaatgcaatgattattgatatctaggtgacctgaaaaaaaatagtgaatgtgctttgtaaactgtaaagcacttgtattctactgtgataagcgttgtggatacaaagaaaggagcaagcataaaaaagtgctctttcaaaaggatatagtactatgcagacacaaggaattgtttgataaatgaataaattatatgtatatttgaggccaatttgtgtttgctgctctggtaattttgagtaaaaatgcagtattccaggtatcagaaacgaaaacacatggaaactgcttttaaactttaaaatatactgaaaacataagggactaagcttgttgtggtcacctataatgtgccagataccatgctgggtgctagagctaccaaagggggaaaagtattctcatagaacaaaaaatttcagaaaggtgcatattaaagtgctttgtaaactaaagcatgatacaaatgtcaatgggctacatatttatgaatgaatgaatggatgaatgaatattaagtgcctcttacataccagctattttgggtactgtaaaatacaagattaattctcctatgtaataagaggaaagtttatcctctatactattcagatgtaaggaatgatatattgcttaattttaaacaatcaagactttactggtgaggttaagttaaattattactgatacatttttccaggtaaccaggaaagagctagtatgaggaaatgaagtaatagatgtgagatccagaccgaaagtcacttaattcagcttgcgaatgtgctttctaaattataaagcacttgtaaatgaaaaatttgatgctttctgtatgaataaaactttctgtaagctaggtattgtctctacaaaattctcattgtatagttaaaccacagtgagaagggttctataagtagttatacaaaccaagggtttaaatacctgttaaatagatcaattttgattgcctactatgtgaactcactgttaaaggcactgaaaatttatcatatttcatttagccacagccaaaaataaggcaatacctatgttagcattttgtgaactctaaggcaccatataaatgtaactgttgattttctcacttggtgctgggtactaggtttataaaattgtatgatagttattatattgtgcaaataaagtaggaaaatttgaataacaatgattatcttttgaatacgcatacgcaagggattggttgtctgaagaatgccactatagtagttatctattgtgtgccaatctcattgctaggcattggggatgcaaagataaaccatctttattgtgtcttgggtagcagaagaaaatatgtgtaaaatcaatttataatttgtaaactgccacccatatataagctatatctgctgaatgatcattgattactcttatccttagagataacaactgggggcacaaacatttattatcattattgaacctacaacagagatctatgtgtagatttacaaagcctacagttctatacagataggaatgaactattggcttactgaatggtgattactttctgtggggctcggaactacatgccctaggatataaaaatgatgttatcattatagagtgctcacagaaggaaatgaagtaatataggtgtgagatccagaccaaaagtcatttaacaagtttattcagtgatgaaaacatgggacaaatggactaatataaggcagtgtactaagctgagtagagagataaagtcctgtccagaagatacatgcttcctggcctgattgaggagatggaaaatttttgcaaaaaacaaggtgttgtggtcttccatccagtttcttaagtgctgatgataaaagtgaattagacccaccttgacctggcctacagaagtaaaggagtaaaaataaatgcctcaggcgtgctttttgattcatttgataaacaaagcatcttttatgtggaatataccattctgggtcctgaggataagagagatgagggcattagatcactgacagctgaagatagaagaacatctttggtttgattgtttaaataatatttcaatgcctattctctgcaaggtactatgtttcgtaaattaaataggtctggcccagaagacccactcaattgcctttgagattaaaaaaaaaaaaaaaaagaaagaaaaatgcaagtttctttcaaaataaagagacatttttcctagtttcaggaatcccccaaatcacttcctcattggcttagtttaaagccaggagactgataaaagggctcagggtttgttctttaattcattaactaaacattctgcttttattacagttaaatggttcaagatgtaacaactagttttaaaggtatttgctcattggtctggcttagagacaggaagacatatgagcaataaaaaaaagattcttttgcatttaccaatttagtaaaaatttattaaaactgaataaagtgctgttcttaagtgcttgaaagacgtaaaccaaagtgcactttatctcatttatcttatggtggaaacacaggaacaaattctctaagagactgtgtttctttagttgagaagaaacttcattgagtagctgtgatatgttcgatactaaggaaaaactaaacagatcacctttgacatgcgttgtagagtgggaataagagagggctttttattttttcgttcatacgagtattgatgaagatgatactaaatgctaaatgaaatatatctgctccaaaaggcatttattctgacttggagatgcaacaaaaacacaaaaatggaatgaagtgatactcttcatcaaacagaagtgactgttatctcaaccattttgttaaatcctaaacagaaaacaaaaaaaatcatgacgaaaagacacttgcttattaattggcttggaaagtagaatataggagaaaggttactgtttattttttttcatgtattcattcattctacaaatatattcgggtgccaataggtacttggtataaggtttttggccccagagacatgggaaaaaaatgcatgccttcccagagaatgcctaatactttccttttggcttgttttcttgttaggggcatggcttagtccctaaataacattgtgtggtttaattcctactccgtatctcttctaccactctggccactacgataagcaggtagctgggttttgtagtgagcttgctccttaagttacaggaactctccttataatagacacttcattttcctagtccatccctcatgaaaaatgactgaccactgctgggcagcaggagggatgatgaccaactaattcccaaaccccagtctcattggtaccagccttggggaaccacctacacttgagccacaattggttttgaagtgcatttacaaggtttgtctattttcagttctttactttttacatgctgacacatacatacactgcctaaatagatctctttcagaaacaatcctcagataacgcatagcaaaatggagatggagacatgatttctcatgcaacagcttctctaattataccttagaaatgttctcctttttatcatcaaatctgctcaagaagggctttttatagtagaataatatcagtggatgaaaacagcttaacattttaccatgcttaagttttaagaataaaataaaaattggaaataattggccaaaattgaaaggaaaaatttttttaaaatttctctaaatgtaggcctggctgggctttgaccttttccgtttttaaatcactcacagagggtgggacaggaggaagagtgaaggaaaaggtcaaacctgttttaagggcaacctgcctttgttctgaattggtcttaagaacattaccagctccaggtttaaattgttcagtttcatgcagttccaatagctgatcattgttgagatgaggacaaaatcctttgtcctcactagtttgctttacatttttgaaaagtattatttttgtccaagtgcttatcaactaaaccttgtgttaggtaagaatggaatttattaagtgaatcagtgtgacccttcttgtcataagattatcttaaagctgaagccaaaatatgcttcaaaagaagaggactttattgttcattgtagttcatacattcaaagcatctgaactgtagtttctatagcaagccaattacatccataagtggagaaggaaatagataaatgtcaaagtatgattggtggagggagcaaggttgaagataatctggggttgaaattttctagttttcattctgtacatttttagttagacatcagatttgaaatattaatgtttacctttcaatgtgtggtatcagctggactcagtaacacccctttcttcagctggggatggggaatggattattggaaaatggaaagaagaaagtaactaaaagccttcctttcacagtttctggcatcactaccactactgattaaacaagaataagagaacattttatcatcatctgctttattcacataaatgaagttgtgatgaataaatctgcttttatgcagacacaaggaattaagtggcttcgtcattgtccttctacctcaaagataatttattccaaaagctaagataaatggaagactcttgaacttgtgaactgatgtgaaatgcagaatctcttttgagtctttgctgtttggaagattgaaaaatattgttcagcatgggtgaccaccagaaagtaatcttaagccatctagatgtcacaattgaaacaaactggggagttggttgctattgtaaaataaaatatactgttttgaaaactttgtattttgatgtgacaatttctaactcactgtccctaaccacactaattaccgtaagttcttcatttcttttttctttttctttttaaattaataaattaatttattttttggagatggagtctcgctttgttgcccaggctggagtgcagtggtgccatcttggctcactgtaacctctgcctcctgggttcaagcgattctcctgcctcagcctcaccagtagctgggattacagtcatgagccaccatgcctggctaatggttgtatttttagtagagacggggttttgccatgttggccaggctggtcacgaactcctgacttaaagtgaaacacctgcctcggcctcccaaagttctgggattacaggcgggagccaccgtgcctggcctcatttctttttttaaactaccttaatcacccagtgtgggtaaatggtttgaagtctcatttcttacagcatcagttgctttggtcaaggatactgagaagcacaaacccagtaaaaaatgtgagaagcaaaaaacttgaggatcaaaagtgggagaggagaagggtataaactgtaaggctgtgggaattaagcattcatgaaagaggcccagaccctgagtaggtgaagggatcttcagtgtttctagaattctgaatgatcaaatacccaaacattagattggtgactttataggcaaatgaaccagcacagtattttttttttttttgagacagagtctcgctctgtctccaggctggagtgcggtggtgtgatcggctcactgcaacctctgccacccaggttcaagcaattgtgcctcagcctcccgaatagctgggattaaaggcgtgtagtacgacagcaggctaatttttgtatttaatttagtagagagagggtttcaccattttggccaggctagtctcttaactcctgacctcaaatgatccacccgcctcggcctcccaaagtgctgggattacgggcataagtcgccgtgcccagcccccagcacagtattctataggcaagagttcctactgctttgttggaaattaaactggaaactggtttttttttttttctccagaaagtcttaagctgttatgggcccagatggttattcagtatatgaacttttttttttttttttttagacagtgtcttgctcagccacccaggctggagtgcagtggtgtgatctcggctcactgcagccactgtctcccaggttcaagtgattctcccgtcccagcctccagaacagctggcattacaggcacccgccatcatgcccggctaacttttgtattttagtagagactgggtttcaccatgttggccaggctagtcttgaactcctgacctcaggtgatccaccagccttggcctcccaaggtgctaggattacaggtgtgagccgccgcacccgtcccagtacatggacctttaaaaccgatgcctgaagaactcttacctatgtgttaacagttgaattttgtcattataaatgagtagagtttgaggtgataaagttgacccatatcttgggggttgcttctgaactgggatggtgctacatggacttttctctttactcttatttctttgcaaggctggatgtgtaggacagagggaaagcaggtgaggcggtaaggagacttcctgaagttattcttgagtgtcttctgttcctttgtccatccctcttgattccttcagcagatcctattcccataggggcttacttcagtccccttgtcatatttgctgtgcttactcttgtgtttgtggtgctttggtcctcaaattccttgattctcttgtaaaatttgaagggagaggaaatgaaaaacaccgtatctcctggttagtgaggaaaggtcagacaaggcaattttataggggcagcagaaatatttagaaaatgtcaaagcatttgatagtatttttcagtttttgtattttttatgtggtgtgtatgaagtggtcactgtatgcttgtagttggatttggtgccagcccaacccacatccacaaaaacttgtgcctcctatcaatttactcttttacccttggtcatgagaaaaggtaatgttactgaggccagtagacttaggcaagcatctatcattcaaatttcgaagtggaataatttaaatggggtttaaaatttagccagccattctattcactgtgaatggataggcaggaagtgtgctaatcataggtccaacttctgaaaaaggtggaggtagcaaggaaaaccagttgaaggaccttagtacctttcccatgaattatagcaaatggagcaccaaggcaattacatggtagctgaggagtcattagttctcaaaattcaaaccccactcagctatattgtttccattggcttggtaaaggtgaacttttgaggggttcttattgttagtatttcctgggtttgccacagtcttgctcccagtaccagcattctcagtgacgagcttccttttacccactccagtttctcttctctgtgtactctggatcaaaatagtaactcctttctagagtgctagaacaaaagctggcatcacttgagggcctaaggagaggagagcaaagggagagcagaatgcaaagtagagtgggaaagaaagttggattcgagcagccttgcaggtagctaactacttaggcagaacctgtcactttatgggaactccgtggtaaggaaaaaaattcataagcagactttgcaggcaggatttcaaaaaatcttaggaattctgactcacattaaatagaagaagaatgtcaaaggttgagtggcttgtgagggatgagctttgagtggaccctactttataatattccgtgaagaaatgattagatatatcccaaagacctagaaaaacccttccccttgtagccttttccttgctgttttttttttttgttgttgttgttgttgttactaatgaattattctgaaagtatcccaggaaacgcaatgacaatgagagtggtggaacagatgtgggttctttctggcagtggactatattgtctccccgcctctccactcccagaggacatttggctgaagtaccagagtccaagaaatgtcttgttactaggcagatagtctcatctgcatagtgtggtggttttactccctcacttcagttccactgtattttattttgttttgctgcatgatggtgttagctgtgtaattcccattgggccaattagaattgtgtatctaaatgcacaaaataaagatgaggcatctgaaacccagagaaaataacttgatcaatgtcgcagcgcaaaatagctgaggtgaccctagatccaaattcacttaatttctaaacaaattcttttctcactgtatattatcatagcctcttttataacggatacatgctcatcaggaaagagcttggattatgagtaatttacagttagaatggctcttcctaatcatagctaacctccagtgtactattttatgtctttatgctcacgaggaaataaagtcttagagaatatccaaagagagggattatagtaattatgactattaactggtacctaaatgggagcaatgtgaactacttaaaggaagacacaggaagataattcatctacctccgattcctctaccttggccctatactttctagcccagggagatagtctgaaccaagtgaaaatcagtttttcttctgttactacaggtctgctgaaactataaaagtattaatttgcccccctgtagtttcccattgttacctctctttttatatccattttgtgactattacttttctttttctttttttttgaaatgacgtctcgcccttgttgcccaggctggagtgtgatggcgcaatctcagctcactgcaacctctgcctcctgggttcaaatgattctcctgccttggccccctgagtagctgggaatacaggagcctgccaccacacccagctaatttttttcttgtatttttagtagagatggggtttcaccatgttggccaggctggtctagaattcctgacctcgggtgatccacctgcctcgtccttccaaagtggtgggattacaggtgtgagcccccgcgcccgaccgactattacttttctactataaatcaagacaaaaaggggcttggggtaggcaggggttggagaactggggagcagacagtctcagttaaacctttacttgtatttgctcatggctggagtccagtcgttgtgctcctcccattgtgagctagaatactcacagttgctacttcctgaagaactggaaaacttgtctgccatagtatcccatagcatttggattgtggacataggaggacagctgatgcaacctgaatctgcagggagatagaccatgagacagaaggccggttgttagagtaccttgcatggtaccatcctataatgccaaaccaatcttctcactgtcacctctcatgtttgaataataattggaaagagcaagacttagcagggaataaagttacttttgagctaccaattttactacttaaaaagtggtgaataggtagagatggattccagttgtcctcaccatagtaagctgttgcctccaaaagaaagagaatgaaccaagaagaatatagtggacactgcatagtattggctcaactagattctgagaaaagggactttctgtaaaggctgctacctggtctttgatacagcaactagacatgtattttggggttctaagataaggtttttggctctgagcagcagagagctgagaagcaggacatgaagaattggacttacctgaactatagccaaatggatgtgaccgctaattgtagatggcaggctggcttttgagagaacccagaatgaatagtaaatctcattttcagcagaagagagtctgctatgaggttcacagaaaatagctctagtaacaacagccccattgggcactagattggataccagttcccataggtaaaacaataatattagctattctgcaaacgcaaagcaaaagctaaagaaaatcgctaaccaaccatgacttccctttaaaatacagtctggaaacagaagtccctttattccttccctttgatttcttgcccttttcctgcattgctagataaggaatgcaatggccagaaggaagggtggataatctaaattaagtagcgaatattagagaatgtttacataatggtgttgggcggggggacatttagaatagccccttcagtagcaagattatgctaagtaaagtacttgtctcatcttaagctatttttgttgagacagggactgtgcacagctccctctctaatgccaatccttgcttaattttccctccaacgaagtttcttacctgttcctctttagaataagaaatgctggaggaatggtcagcgttgaaggaagtaagcctataagggaaggcacagaagatgacatcaggctttagaataggtaggcacagaaagactggtatcaagcaagaggtcccatatcctagaggttcaaaacagatgttcactggtagggagaaaagtgggcagatttacctgataggctgattaaacagatacaaatgccatttagatgcttctataactcttgcctatattctgattccttctcaccttagtgtttatagcttttgccccatcaactgttttctctgtacatttcctaataaaatctctgaaacaccccaatctcatttttatagagctaaactttatataagtagagctgtctagtgcctgtgtggtgtgatttcatacaagaaggccttctttcccaagcctatattttccctccttggtagctgatgtctgaaattctgttatctggagacgaatctttgattctacattaagtgataaagcagggacaagtttatttttgtacctaacaaaagtacctttctcatagtggaaaatgcctgtcaaattttttggaattatatttaaacttcaggaccctctaggaaagaaaacaagacttccatttcacacttaaggcaagatcagctaataccataatatgggtggatgccacagtttttttccaactcgtggaaaatttcattaattaatcatagcattgattcctgttaagcctagtaagggacaaaaatgctcgttgcccaccaaaatacattctcccattcttgcttgatgtgtggctgcccagctagggtacatttttcagcttcttttgcagttctgtgcagccaaatgattgttatgatcaataaaatgtgagtagaagtgatgtatgccatttccatgcctgggtcctaagacatagggtatgctctcctttccatactttctcccaccagctgcaactcagatgtaatggctacccagtttcagtatacagatgggagtgattccctatgagatgaaagtacaatgacttggaaggaaatcaagtccctgaatgactaagaaacagaattccctctctgatttgaactttttacattgatactgtcatgtaagaaataattaacactctttttgtttaatccattgaattgttgattctctttcctatagtagccaatttttcttctcataactaattcaactggatgcatccccagaatccttcacgtagcatttcaggtggctgctactaataatttagagttggcatgcaagataaaatttatttaccatcctagcactaaagggataaatcgctgacagcagatcctattttgaaagccgattatgaagaagctagagaacaggagtctctgagaagaaggagtaccatacagaagggaatagatattaaaagagactgagacaatacagaccaaccttaccttctttataaccttcccttaggcctgctctatggttcacaatacaggtgggaaagatgtgctcagagaaattagggccaaccagatggctggatggaaaagaatgtcttacatgaaatagtttcccttggtggcaatgctagggagagagaagatcaataatgaaaaaagtcaaaagaactatccagcaccagcttaggaagaaagcataggtcttgcaaacaagtcagaacaatgtctaagaatttgctatgttaagtttttttcttccaacttttattttaggttcaaggggtacttttgcagcaaaagccaatgggtaaatttccatgggtaaattgtgtgtcatgggctttgatgtacaaatgatttcattacactggtagtgagcatagtacctgataggtagattttttgatcctcactctcctcccatcctatgttaatcttttaacatctttggaaaataagaattggcactagcttatgcattccagtagcccatctacataaaaccagtgagggggcctcatgatatcaagatagtggacttaaaagaaatgggatacgtactgttcatcttgtttagtccctttgtgtttgtttttcagtgtcctaaagtggatattaagcaagctgagagtaatttgagtaccgctttattctgtggtagagttacctagaaaacatatgggttgagggcatgtaatcatgtcccccatatctgtgaaaatggacagtaagaagtggtaaacattgttaggggcagggttccactaggaaatttggataaagagaaatgtaaatttcatattttctactcataggccattttaccattagcagtaatatctaaatactgaaaacagtaattataggaaatcttgggaactaaaagtcaacttaatgatgattataattttcctagacttaacacccattcttttggtatactgacagtccctaatgaggatacaagccattggtctaaaataggcattgcttgtcacaaccaaattcctcatttatgtcaatgtctgctttaactaagttcctttggcttcatatctatatagcctttccaaccagtgaaagtgtcaacattcccacagtcagctgtttcctctataacttcatttacctttgatttgaatttcatttccagcattgtgactttagtttctttcttgagctttcatttttattggccaattccctctttcattatatgtttttgttaaatgtcacttgggtttatcactggcagacaaagaggcaacacaaacacatggtttgttctctgcacatgtactgaatagctgataagtgaccagtcaccaaagactgtgaaagaagtgatgtgattcataattgatcatgatgcacatctgttagttatatagtaatttacatactgaaaacctagcagtgaaatttgtactttatttaatatcacagtcaatataccatggtaactgaaatttaaactgtgttgttggggtacttgtattatttaactaaaccatggtgcaaagtgaggaatatctgagtctttactttgaatattgaccactttagtatgtttgtgaatatatatgtgaaattgttttttttaaacagtgagatgtcaattgtaggctctcatgtttgctgttttaaagtagatgttcgatagagtataatcacatgtagatttcaatagatggccctatctacaatgcactaactgtcatatactacacgtggagtaaacaaaaaagtctattttgctatttcagggatgtcaaggccagtgtcttcaaggggaattctgtagctttgtacataaagaaacccagttacaccaaaacactcattgtctaccagaccttctgggattaattctattcaagatagcaagaaaaattactaagccaaacaaaattttgaattgccaatcagaaatacagtcacaaattggataaatattgtcatggtggtcttttaaaccttactttcagttttttttttttttgtgtgagtttagatcaataacaggacttagaggcttttaccttcaaagagaaagtgacctcatgttcccaatgactagggcctcttgagaggaagtatgcctaataattaaaagcaaatactctagggcatcatggcccaatatggtagctactagccatatatgactattgagtacttaaaatgtggctagtacaaattgagatgtattataaatgtaaaatacatactgaatttatgaattgatttttataattaccacatgttaaaataatattatttggatacagtagtttaaattacatatattattaaactttcaaaaataaaacaaataggagttggaaagctatggcttaccacctgtttttgtttgtcccacaagctaacaatgggttttccatctctaaatgcttaaatttttaaaggaatattttattacatgtgaaaattatatgaaatttaaatttcagtttccatagtacttattgggaaagtaccatgtccattcattttcatattgtctatggctgcttttgtgctataatggcactgctgagtagttgtgacagatagcatatggaatgcaaagtctataccagttattctcacctcagggcaattttacctcctatgggacatctagaaatgtctggaaaatgtttttattgtcacaactgagaataagatgttattggcacctagggagtagaagtcagggatgcagttaaataccctacagtgaaaaggaaagcactccacaacaaagaattatctggcccaaaatgtgaatactgttgaggttgagaaaccctggcctaatctacttattgtctggccctttgaggaaaaaaaatttctaacctcttgtctaaaaacaagtcattttggttgggcgctgtgggtcatgcctgtagtcccagcattttgggaggctgaggcaggtggattgcctgagcttagagagtttgagaccagcctgggcaaaatggagaaaccccatctctatcaaaaatacaaaaaattagctggacatggtggcacacgtatgtggttctaactacttgggagactgaggtggcaggatgacctgagcctgggaggcagaggttacagtgagctgagattgtgccactgcactccaacatgggtgacagagggaagaccccatctcaaaataaataaatgaaataaaaactgttttaaaactaggacttgtcaacagagagtcaaactctataaaatatttgaagagatttattctgagccaagtaaatatgagtgaccaatagctcatgacacagctccaagagacctgagaacatgtacccaaagtagtcaggctacagcttggttttatacattttagggaaacataagacatcaatcaatgcatgtaagatgtacattggttgggtctgaaaatgtgggacaactctaagtgggggcttccaggtcataggaagactcagaggttttctgattaaagtcttgaaatcaatagaagggagtatctgcattaacataaggggcttctgagactaaggctcttatgcagatgaagcctccaggtaggaggcttcagagagaatagattgtaaatgtttcttatcagacttaaaaaggtaccagactcttagttaattctctcctggataagcgaaaagatctggaaagggaagggcattctctacagaatgtaggtttccccacaagagacagctttgcagggccatttaaaaatatgttgaataaatatattttggggcctgctatctgttgtgttcatatcttattgctacaaagagtctactttgtcaatcttaaggtctctgttttaatgttaatgttggtcatttgtgtctaaattccaaagggaggaggatataatgaggcatgcctgaccacccacttccatcatggcctgaattagtctttcaggttaactttagaatgcccttggctgagaggaggggtccattcagttggttggggggcttagaatttcatttttggtttacagaccttatatattcttatttattttacttagttatatttgactattcttatttccttgaaagagtcaagaattgccaagatgaaacacctttggggtatctggacaggttttacctctgtcaacccttgcaagaaaattagaattgacttaccttggggatggagaataggtgacacttgtgaatgaagaaaatattgtagtgaaggccttgtgattgggaaaatcagagggcttggtgagggtacaaatgttggctgttgctgaaaaggcttctgtgatggagagtgaagcaactggggtgcagtggggtggtggcagtggtgccagtggtgccaatggtggtagtagctgctgagtgtcaggcctctgagcccaagcctgcacatatacatccagatggcctgaagcaactgaagaatcacaaaagaagtgaaaatggccgattcctgccttaactgatgacattaccttgtgaaattccttctcctggctcagaagctcccccactgagcaccttgtgaccactacccctgcctgccagagaacaactccctttgattgtaattttccactacctacccaaatcctataaaactgccccatccctatctccctttgctgactttcttttcagactcagcccgcctgcacccaggtgattaaaaagctttattgctcacacaaagcctgtttggtggtctcttcccacggatgcacgtgacatttggtgccataactcagatcaggggacttcccttgggagatcaatcccctgtcctcctgttctttgctccgtgagaaagatccacctatgacctctggtcctcagaccaaccagcccaaggaacatctcaccaattttaaatctggtaagcagcctctttttgctctcttctccaacttctttcactatccctcaacctctttctcctttcaatttctgtgctacccttcaatctctcccttcccttaatttcagtgcctttccttttctggtagagacagaggagacatgttttatgtgtgaacccaaaactctgacgatggtcatggtctcgggaagacagtcttccctcagtgtttaatcactgcggggatgcctgcctgattattcacccacatttcagaggtgtctgatcaccatggggatgcctgccttgatccttcaccttggtggcaagcaccacctccccgggaggcaagtaccccccaccccttctctccgtgtctctaccctctcttttctcagggcttgcctccttcactataggcaaacttccaccctccattcctccatcttcacccttagactgtgttctcaataacttaaaacctcttcaactcacacctgacctaaaacctaaacatcttattttcttctgcaataccacttgaccccaatacaaacttgacaatggttccaaatagccagaaaacagcactttcgatttctccatcctacaagatctagataattcttgtcgtaaaatgggcaaatggtctgaggtgcctgatatccaggaattcttttgcacatcagtccctatcgggggacctgccctgataatcacgtaggttcttttctatttccctaagcattgactggcttgagaaataaaaggacagagtacaaaagagataaattttaaagctgggcatctgggggagacatcacacatcggtaggatctgtgatgccccacaagccacaaaaaccagcaagtttttattagggattttcagaaggggagggagtgtgcgaataggtgtgggtgacagacatcaagtacttaacagggtaatagaatatcacaaggcaagtggaggcagggtgagatcacaggaccacaggaccaaggtgaaattaaaattgctaacgaagtttagggcaccactgtcattgataatatcttatcaggagacagggttttgagatcaaccggtctgaccaaaatttattaggtgggaatttcctttttctaataagcctgggagcgctatgggagactggagtttatttcacccctgcagtctcaaccataagagacaggtacgccccaggggggccagttcagagacctacccctaggtgcgcattctctttctcagggatatcccatgctgagaaaaagaattcagcgatatttctcccatttgcttttgaaagaagagaagtatggctctgttctgcccagctcaccggcagtcagagtttaaggttatctgtcttattccctgaacaattgctgttatcctgttcatttttcagggtgcccacatttcatattgctcaaacacacatgctgtacaatttgtgtagttaatgcaattattacagggtcctgagacaatatacatcctcctcaactgacaagattgagattaaattaaagacaggcataggaaatcacaagggtattgattggggaagtgataagtgtccatgaaatctttacaatttatgtttagagattgcaataaagacaggcataagaaattacaaaagtattaatttggggaactaataaatgtccataaaatcttcacaatccacattcttctgccatggcttcagccggtccctccatttggggtccctgacttcctgcaacaagtcttttcctaatctctgctcccaatgtgactcatcccaaatctttcttctttctctcctgtctcttccttcagtctccaccccaagctctgagtcctttgaatcctccttttctacagacccatctgacctctcccctcctccccaggctgctcctcaccaggctgagccaggtcccaatttttcctcagcctctgctctcccaccctataatccttctatcacctcccctcctcacacctggtccagcttacagttgcgttctgtggctagccctcccccatctacccaacagtttcctcttacagaggtggctgaagctgaaggcatagtcaaggttaatgctcctttttctttagctgacctctcccaaatcagttagtgtttaggctctttttcatcatatataaaaacccagcccagttcatggcccatttggcaacaacccttagacactttaccaccctagctagacccagaagggtcagaaggccgtctcattctcaatatgcattttatcacccagtcagctcctgacattagaaaaagctccaaaaattagactccagccctcaaaccccacaacaggaattaatcaacctcacctgcaaggtgtacaataatagagaagagttgcaattacttgcctccactgtgagagaaaccccagccacatctccagcacacaagaacttcatagcacctaagccacagcagtcaggcattccttccagacctcctcccccaggatcttgcttcacacgctggaaatctggccactgggccaaggaatgctgcagcctgggattcctcgtaagccatgtcccatctatgcaggaccccactggaaataggattgtccaactcacctggcagctactcctacagcccctaaagctctggtccaaggctctctgactgacactttcccagatctgcttggcttagcagctggagactgacgctgcctgatcacctcagaagcctcctggaccatcacagacactttaggtaactcttacagtggaaggtaagtccatccccttcttaatcaatatggaggctacccactccacattaccttcctttcaagggcctgtttcccttgcccccataacggttgtgggtattgacggccaagcttcaaaaccccttaaaactctcccactctggtgccaacttggacaacattcttttatgcactctttttcagttattcccacctgcccagttctcttattaggccaagacattttaaccaaattatctacttccctggctattcctggactacagccacacctcattgccgccttttccccagttcaaagcctccttcgcatcctccccttgtatctccccaccttaatccacaagtataggacacctttactccctccttggggaccgatcatgcaccccttagcatcccattaaaacacaatcacccttaccccgctcaatgccaatatcccatcccacaacatgctttaaaaaggttaaagcctgttatcactcgcctgctgcagcatgagcttctgaagcctataaactctccttacaattctcccattttacctgtccaaaaaccggacaagtcttacaggttagttcaggatctgcaccttatcaaccaaattgtttgcctatccaccccatggtgccaaacccatatactctcttattcttaatacctcccttcacaacccctccacaacccattattatgttctggatctcaaatatgctttctttactattcctttgcacccttcctccaaggccctctttacttttacctggactgaccctgacacccatcagtctcagcaacttacctgggctgtactgctgcaaggcttcagggacagctcctattacttcagtcaggccctttctcatgatttactctctttccatccatctacatctcaccttattaaatattttgatgaccttctactttatagcccctcctacaaatcttcccaacaggacaccctcctgctgctccaacaatctattctcaaaaggacattgcacatctgcctccaaagcccaaatttcttcctcatccgttatatatcttgacataattcttcataaaaacacacatgctctccctgctgatcgtgtctggctaatctcccaaaccccaacccccttgacaaagcaacaactcctttctttcctgagcatggttcagtacttttgcctttaaatacctagctttactgtcctgactaaaccattatataaactcacaaaagaaaacctagctgaccccatagatcctaaatcctttccccactcctttttccatttcttaaaacagccctggaagctgctcccacactagctctccctaactcatctgaaccctttttcattacacacagctgaagtgcagggctgtgcggtcagaattcttacacaagagccaggaccatgacctgtagcctttctgtccaagcaacttgatcttactgttttaggctggctcccacattattcctgataccacacctgacccccatgactgtatctttctgatctacctgacattcactccatttacccatatttcattctttcctgttcctcaccctgatcacacttggtttattgatggcagttccatcaggcctaattgtcactcattagcaaaggcaggctatgctatagtatcttccacatctatccttgatgttaccactctgtccacctccactacctgtcagcaagccaaactcattgccttaactcaggctctcactcttgcaaagggactacacatcaatatttatactgactctaaatatgccttccatatcctgcaccaccatgctgttatgtaggctaaaagaggtttcctcgctatgcaagtgtcctccatcattaatgcctctttaataaaaactcttctcaaggccactttacttccaaaggaagctggagtcattcactccaagggccatcaaaaggcatcagatcccatcactcaggacagtgcttatgctgataaggtagctaaagaagcagctagtgtcccaacttctgtccctcatggccagtttttctccttctcatctgtcactcccacctactctcccactgaaacttccacctatcaatctctttccacacaaggcaaatggttcttggaacaaggaaaatatctccttccagcctcacaggcctattctattctgttgtcattttgtaaccccttccatgtaagttgcaagctgctatcctgcctcttaaaacctctcatttcctttcctttgtaaaaatctatcctaaaaaaatcacttctctgtcccatctgctatactactactactcaggaattcctcaggccccctcccttccctacacatcaagctcgagaatttgccctgcccaggactggcaaattgactttactcacatgccccgagtcaggaaactaaaatacctcttggtctgggtagacactttcattggatgggtagaggactttcccacagggtctgagaaggccaccatagtcatttcttcccttctttcagacataattcctaggcttggccttcccacctctatacagtctgataatggaccggcctttattagtcaaatcacccaagcagtttctcaggctcttggtattcagtggaaccttcataccccttaccattctcaatcttcaggagaggtagaatggactaatggtcttttaaagacacatctcaccaagctcagcctccaacttaaaaaagattggacagtacttttacctcttgcctttctcagaattagagcctgtccttgagatgctagagggtacagtccatttaaacttttatatagacacactttcttgcttggccccaacctcgtctcagacaccagtcctctaggaatctatctgctggtcctccagcaggcaagacaggaaatttgccaagctgctaatcttttcttgcctactccatattcccagccatataaagacaccctagatggacgatcagttcttgttaagaatctgacccctcaaactctataaccttgatagaccggaccctacttagtcatctataataccccaactgccatccgcctgtaagaccctccctattaggctcaccattccagaataaagctgtgtccattggacagccagcctaatctctcctcttcctcctagaagttgcaagtactcaaccctacttcccttaaactcactcacatttctgaagaacagtagtaacccttatgagcctaaaacatcctttcattctattaagtttattaccctacttattgcaacaaggctttatgcagtcacccccactacttggactgcaaccccaaaacttgtcatccctactatcttctgtctagtcatactcctattcaccattctcaactactcgtaaatgccctgcccttgtttacactgccagtttacacttttcctccaaaccatcataactcatatctcctggttttacctcaaaccaccttccttaagtctctcttgaagtggatagaagatcttcagtgacaaggtacactccaatactttcaccctaataaagtcctattctttacctttatattcactcttattctcattcctgttcttatgcgaccctctacctctccccagctatctccaccacactatcaatctcattcactctctcctagctgtttctaatccttctttaaaaaatgattgctggctttgcatttctctttcctccaaaatcactgaggccttgacttactgctcaaaaaaaggggactgtgtgtatttttaaatgaaaagtgttgtttttacctaaatcaatctggcttggtatatgacaacataaaaaaactcaaggatagagcccaaaaactcatcaaccaagaaaataatcacgctgaacccccttaggcactctgattggatgtcctgagtcctcccaattcttagtcctttaatacctgtttttctccttctgttattgggaccttgtgtcttctgtttagtttctcaattcatacaaaactgtatccaggccatcaccaatcattctatgtgacaaatattccttctaacaaatccacaatatcaccccttaccacaaaatcttccttcagctttatctctcccactctaggttcccacgccacccctaatcccactcaaagcaaccctaagaaacatcacccagtaactctccataccaccccccaaaaaatttttcaccgccccaacacttcaacactattttgttttatttttcttattaatataaaaagacaggaatgtcaggcctctgagcccaagcctgcatgtatacatccagatggcctgaagcaactgaagaatcacaaaataagtgaaaatggctggttcctgccttagctgatgacatttgtgaaattcattctcctggctcagaagctcccccactgagcaccttgtgtcctccacccctgcccgccagagaacaaccccctttgacagtaattttccactacctacccaaatcctataaaactgccccacccctatctccctttgctgactctcttttcagactcagcctgcccgcacccaggttattaaaaagctttattgctcacacaaagcctgtttggtggtctcttcacatggacgtgtgtgacactgaggatgctgcattttgctttcatgatcccaaagaccctttaaaaagaaagagtcaggaaatggggtggggggtataaagagaaaatataacatagaaaacttaaatagagcatgtaacaattgtgtgtatctctgtgattcttatactcaaaggatcatcacagaatcttggaattttgtaggaatggcaaatattctgatgacctgctagtgtgttagccagtaggggtaatattgaaacaaagtaatttttgcttttttgtagtttggctgaggaaaaggcttaaaacacattagtgtggccatcctcactgctacattcccatcagcaccatgacagtttacaaatgccatggcaatgtcaggaagttaccctatatggtctaaaatgggaaggcatgaacaatccaccccttgtttagtatatcatcaagaaaaaaacacaaaaatgggcaaccagcagcccttggggttactctgtctatggagtagccattctgttactcctttactttcctaataaacttggttttgctttgcactgcggactcgccctgaattctttcttgcacaagatccaagaaccctctcctgggggcctggatcaggatccttttcctataacatctttctgattatcacagaagggactatagtgcagaaatacctgacccaaaggttaattttgggtaagtgttgggggtcctataacatctttttggcaaccactgaagtgactataatgcagaaacccccaatccaaaggctaactttgggtaagtggtggggcctgataacatctttctggtgaaactcgaagggatgatactgaggagacccccagcacaaaggaaatagactgcagcattactaattggacaactttgggtaagtggtggggtactcaggcaaaggatgggattggttatagctcaacttaggggagttagagtctctcgtaagagagggttaaagcttcctctcaataaaaggcaaggatgcttgactgacactgggttagaggcccaacttaggaggattagagtcccttttaagatttagggggttagaggtccctctcagtaaagtccctctccttaaagtccctttcggctaagaacaggtttggcattataggatgttaaccgctattctctttggattgatctgccttgcactctttgctgatggctatggttgacagaattaggcatgtagaggattgtagaacatggggagcttttccctcctaaaaagggaaatgagagctgatgggactgctggaaaaaatccgttcatgactgacaagcagctgcatgaacttttcagtgttgctgcaatgggtggggctttctctggcactcggagtgccgggccttccccaccctgcctcaggcaatgctttcctctctctctctctataaaactggttgaatggatggcaaaaatcactgttcatttcctctgtaaagttttgattagtgaaaaaatggatttatgaggctagtcttaagttgtagcaaatctgttgtgtgtctttctgtattgttctgtcataaagaggggtatcttaggatagaacatgagcttaggacacctgtaaacctgctgttcaagatggcccagtaaatttatcaggtacaaactttgctgcaggtccctgaaaaaactggatgaggtttccttcttgttttgtatgtccttgggagcttgaccttgtaaccatgtggctgtgctttttcttttcacaatggtggcctgtgttcagggtttgattcctgccttaggggataagtcctttatcttcttctgtgtatttatttattaattttttgagacagggtctccctctgtcacccagcctggagtgcagtggcacaatcttggctcactgcaacctctacctcctgggttcaagctatcctcctgcctcagcctcctgagtagctgggattacaggcatcctccaccatgcccagctaatttttgtatttttagtggagatggggttttaccacattgaccaggctgctctcaaactcctgacctcacgtgatccgcctgccttggccacccaaagtgctgggattacaagtgtgagccactgcacccagcctgtctgtgtatttatatgtgttgtgtgtgtgatataaaaaagctttaattggttcaaaaataataagtgcttaaatcagatatttcatcagaaaactaaaatgtataatgccttttagttcatttgacttaagtaatctttggaaaatagaaaatagttttaaagattactgataaaataaaaatatcttcaaaaatgtaaacatttggtctaaattagtcaggtcagatattaagtttgctaactactttaaggtcataaactgcttccttgacttttgaaaattattcaatgtacctaccttggagacattagattctagataaggtctggggacatgtggagagccaggcaccctagctgtactggaaagagtcagaccttatctgcacttctgcttgatgtgtcctaggctaggctccacactagtacataaataaaatctctttgggcctggattgggacctctttcctgtaacaattctagaactttgggaggccaaggcaggaggattgcttggggccaggagttcaagaccagtttgagcaacatagtgagaccctgtgtctatgaaaataaaaaaaaattaaaaactagctgtgtgtagtggcacacacctgtagtcctaactactcgggaggccgaaatggaaggatcccttgagccctggagttcaaggttatagtgagctatgattgtgccactgcactctagcccaggtgagagataagagcctgtctcaaaaataaaaaaattgcagataatttgtatggagtgagaagtaggacttagaccttttgaacactgtcccagttaccatgttgccatccttcttttcccttccctctaatttttctatataatgtctaaaaataaaataagaagcctagaaaatctacactcaaagttctcagttttggagtgatcaaaaatgattataagtgtaaatattgaaaaaggaggacttgggatctatcaaaggagttcactgaactgtcaaagtatggaataaaaacagtataggaaatgagacaaaaaagaacaaagaaaataaaacaaagatacagaagaacttgaagattgctttggggaggataggagcaaaagtgaagttaagcattattaaacatatgtaaagataggcctgatgttgttaccatggttggggtttcctgtaatatatttgaagtaatgtcatccttccatcttcctaataaatcttacttgttcactgatcacatcagtgatttctcttaatttcttgactccaaagtagatatatttgtcagtttatgcagattatacctgcatttgtgggattgtttgattaatatatgtcttcatccctcttcagactggaagcttcctgaagacagaggccaaggtctattttaaccacctttgtgtttctattacctggcacattcaggctctcaacaaatacatgttgcctgaatgaatgaataacccagcaattaagcccaatgtgatatctaggttactggtcctggtttagttagccactgttcacaacccacatgttctagctccatacctttccatctctatactaaagaatccacttctctcttatttcatctctacagtagagatgctcaaagggaattttttttttttagagaagtctccctcttgtcccccaggtttgagtgcaatggctcgatctcagctcagtgcaacctccacctcccgggttcaaacaattctcctgcctctgcctcccaagtagctgggattaagttgcctgccaccacttccggctaatttttgtatcttttagtagagacaatgtttagtagagtcaccatgttggccaggcttgtcttgaactcctgacctcaggtgatcctcccacctcggcctcccaaagtgctgggattatgggtgtgagccactgcacccggccttttttttttttggctcaaagggaatttcttcagactttctgttttgggttcatcactatttaattccccaatccactatagtcagcctaccactcccacaactccaccgatagtgttttgataaaaatcaccaatgatctatctaagggactcattatgctcatctaaactggcagctggctaacctgtttctgttgttataattcctcttctctcttttaaaaaactcctgcctctctcccttagttgctgtaacatatcactctattggtttacctttaacctctctggctattatttttgaacctacttgggcttttgcttgaagggtttactgctgtctttccagattaaagtgttttaattacagaagctttatctttaccataatagaattaaaacatttgcttatactatgataagaatgataaatattagcaatgagaaagaatttattgatgtgtagataaatgaggcaatgtaactataacactacctagataaagatgattccatgttttcctgatttagttgaaactgattatctggctgagtttagatagttttctgcccagaagccagaacgttgactaggtaacttataagatactccttctatccctggcattctaccatttataccacattttatgtgtatttaaaaatatccagccatagccagtcactcttctcacatggtggacagtggttccacttttaattgcttatttacaaagagattgacatctgtattaagctctatctcaaagatgttttcatgttccttctccacattgcttgtgtgagtctaaaaaaaaaaaaagaacagcaaagagatagccctgaacaatgctatatccacatgggacctggacttagggaatgacataaaaatagaattaggggttgtgatttccactagctactttgctgtcatagactgcatatcatctttatatgaaattgccttccatctaggtgttatagactgaattgtgtcctctcaaaattcatatgttgtaggtctgactccaaatgtgactgtatttggagatagaacctttaaggaggtaattaaggttaaatgaggtcataagggtggagccctaatccagtaggactggtgtccttataagaaggtgaagaggcatcaaacctctctctcctcacatactcagaggaaggacatttgaagacacagtgagaaagcggccattggcaagcaaggaagagagacttcaccagaaatcaaacttgctggcactttcatcttagacttctagcctccagaactgtgagaaaataaattgttatttaagccacttggtctgatattttgttatggcagctgaggcaaactcataaagtaggtgaaggtgtttttacagagaagttgtaaaagatacactttcctatccattatacattagtctattccatgcctcctcttctggttgtgtctataacctccttaattccctataaaggatatatgtacatagcactagaatcacaggagcattgtatagtttctttcttttttatttttttgagagaagttctggctctactgtccaggctggagtgcagtggcatgatcttggctcattgtaatctccaccttatgggtttaagccatcctcccacctcagcctccagagtagctgggactacaggtccacacaaccacaccaggctaatttttgtgtttttgtagagacaaggtttcaccatgtttcccaggctggtctcgaactcttggactcaagcgatccacccaccttggcctcccaaagtgctgggattacaagcatgaggcactgcacatggtcattgtacattttcttaatgctgctgtaacaaattaccacaaacttgagggctgaaaataacacaattctagatgtcagaagtctaaaatgcatctcattgagttaaaatcaccatgttggcagggctgcatttctggagattctagggaagaatccgttttcttgcctttttcagcttctagaggctactcacatttcttggctcatggcccccttcttctatcttcaaagccatcaactgctggtagtctttccctcattgtatcagtctgacactgaatctcctgtctgccttttccatttataaggaccctgtgattacattgggcccacccatacaaaccaggagaatctcccatctcaaggtcagctgattagtaaccttaattccctcttgccatgtgatatagtatagttataagttttggagattacagtgtagacatctttatggggcattattctgtttatcattgatgtctattcacattaatgcaggtaagaatatgtataggtattataaaattgataatttccatattcttcctctttcccacatttaaatactgaatactaattttccttcttttgaagcttgggcccattactacattagcactattactggtgactttaggttcatctgggcacagtgagtgcaataggaggagggatgtagagtacccatcatgccatgcactatgaatttgcggatacaggctaatcaaaaatttttgccttgggcttttttttttgagagcaggagagatttggtatcaatgtattaaaaaagcacttggattatctgtgaattctatatgaataatatagaatatattaacatatattaatatgaatgtaatatatataattatatatagaatatatataattctatagcatctgtgaatgctatagctgggttcaccctgccccttagaaacaaagaacccagaatcaaatttctaggtctcaacttcaagtgcctctcttagataataaagtgttaagtataatatgttctcagttatttcaaatgctgccagtgctttttggcttcagctaatctgtggcttgacttggttaagctactcaattaagagtaaatatccacccttacctcagtccttcaaaccttaattctttcataatgggataaaaacactcaatgataaagtttaacccaaaggtagacaattagaaaagcttatcagctgtgggtaaaagcacattgttttcccttttcccttcccttcccttcccttcccttaccttcccttcccttcccttccctcccctcccccctttccttcccttcccttttttctttcttttcttttttcttttcttttttttttgagacagagtctcgctctgtcacccaggctggattgcagtggtgtgatcttggctcactgcaaactccacctcccgggttccagcaattctcctgcctacctcctgagtagcacggattataggtgcgtgccactatgtctggctaatttttgtatttttagtagagacggggcttcaccatgttgatcaggctggtctccaactcctgatctcgtgatctgcccacctcggcctctcaacgtgttgggattacaggcatgagccaccatgcccagcatgttttctagcaagataacaaagaagggtgcatttggattcttgaatcttattccaagatcaactgagaatttagccataagtattttggaaagttattccacctccttcaaattgggttctctaccttatatattacataacaaatgaacacactttgatacttttcccaacaaagcctttggatagaaaccaagaagcttggtttgctattttcatgcttatggcatttgctcacctaacttttagttatgacctcaaaagaaaaggccctcctctcttcctcacactactttgctcattatatgtgaaattcaactgtccctttgaggccaactactaatttttcctttctgcttcccaagaaaattagagaaatttcagaattcaaatatgacaacttttacaagtcataggccaaccatcaagttgtcatctgtgatatggaaaggggaaggggatggatctaggttcatcaagccatggatttggcactgcttgacacaataagccttccagatgtctttagtgaattcataattaaaatagtcaaaaggatcaatacctttgaagaaacaatccaagctccaaggggcagaagtaggctgagtagtcactttaaattcaatcaatacatttaacaaatattcattgaatacatattaaatggtagtgttaggcactggctaataaaccaacagacattgtaccttatcaaatggaacttatgatctattgagggagacaggcaataaccaaaaaaaaaaaaaaacatataattatacattgtgataagaaaattaaagggaaagaaataggatgcaatgactaataatgaaaaacagcatatttactttagaaagagtgattagagaagaaatctgtgaaaaggtagtatttaaagccagatgtgaagggtaaaaagaagccagccagccgggcacggtggctcacacctgtaatcccagcactttgggaggccgagatgggcggatcatgaggtcaggagatcgagaccatcctggctaactaacacagtgaaaccccgtctctactaaaaatataaaaaattagccaagcgtggtggcgtgcacctgtagttccagctattcgggaggctgaggcaggagaatggtgtgaacccaggaggtggagcttgcagtgagcagagatcgtgccactgcactccagcccgggccacagcgagaccccgtctcaaaaaataaataaataaataaataaataaataaataaataaataaaagaagccagacattgaagccatccaagtttgcactttccatgtaatgtaagtaaagaaccaattgaggtagatagaggtcaggaaactgcagctaatgggccaaatctgacatgctgcatccttttttatagcctccaagctaagaatgatcttttacatttttattgatttttttttcgagttggagtcttgttctgttgcccaggatggagtgcactggcgcgatctcggctcactgcaacctctacctcctgggttcaagtgattctcctgccacagcctgctgagtagctgggattacagtgtgcaccatcatgctcagctaatttttgtatttttagtagagacagggtttcaccatgttggccacgctggtcttgaattcctgatctcgtgatccacccacctcagcctcccaaagtgctgggattacaggtgtgagccaccacacccagctgatcttttacatttttaaatggttggaagaaaaaaattatagaatatttcatgacaaacaaaaaatatattaaattcaaatttcaatgtccattaataaagttttattggaatacagcaaagctaatgcatttatatattgtctatagctgcttcgtgcttcaacagaagagttgtagttgcaacagagaccatgtggcccaaaagcctaaaataatgagtatcaggccctttataagaaaagattgccaactccttggctggagtatagaaaataaggagaatggcatgagatgtgtttgaaaagatagaaaaaaaagacagcaaaaagacccaagatcatgcaggatattacaagcaaaagaaaaattttgaattttattatttttaaagtttgatgtatgattagaaaccactgaaggatagaaagcaaaggagtgttatgatccaatttatgtttcagaaaggttattatgacatttggctttgggtcagaatgtagaagatagtgaaagaccattattcccactgtaacaactagaaaaaaaactagataactacaacacaaatggacatcagggatttctgggttccacataggatgtagaaaactggcaaaggcagccgggcgtggtggctcatgcctgtaatcccagcattttgggaggccaaggtgggtggatcacctgaggtcaggagtttgagatcagcctgaccaacacggtgaaactctgactctactaaaaatacaaaaattagccaggtgtggtgtcatgcaactgtaatcccagctacttgggaggctgaggcaggagaatcatttgaacctgggaggcagagattgcagcgagccaagatcgcatcactgtcctccagcctgggcgacagagcaatactccatctcaaaaaacaaaaacaaaaacaaaaacaaaaaacctggcaaacgcagtgtcctccacataacaataagaaaaataccgataaactaaaaaatcataacttgaggccaggcatggtggctcacacctgtaatcctagcactttgggtggccaaggtgggcagatcacctgaggtctaggagttcaagaccagcctggccagcatggtgaaatcctatctctactaaaaatacaaaaattagttgggtgtggtggcatgtgcctgtagtcccagttactcaggaggctgaggtaggagaattgcttgaacctgggaggctgcagttgtggtgagccaagatcatgccattgcactccagcctaggtgacagagtgagactctgtctcaaaaaaatcaaaacaaaccttgaatttattgaagagctgagggtgcagggcaactaactagcctgaactctaaggaaagatggactttttcaagaaaagacagaacatgaacactggctcacctgtgtcaatgggaagataaggcctccatataagcaagtatgaggaattcgattaaaagttaaacatctaaaggccaagtgtgggctagcatgagtgcatagagcccttggaaaccacagactccaggggaattcatactcttacaggcacatgccaccacattcggctaatttttgtatttttcataaagatggggtttgaccatgttggccaggctggtcttgaactcctgacctcaagtgatctgcctgcctcggtcacccaaagtgctgggattataggaatgagccctgtgcctggctatttcatttcttaataaccatctaaagatttctacccttctaagatgagtcctttgactccccttttgcctttctcattttttttggttaattatccttatgttttattagcacctgtaagactcatgaggaaaagctgcaacagcatatttgataaggcttcttgaaccattgtttgattctgtaggagtaatggcacccaggatacccatgtagaagggtccctttgaaccgtagcatttaccatggtctgggtaatgggcatattcagtgggcgaatatcatggtaaagccagtccaacatgacttgcatatgaagcatatcagctgcttcatgtagggtgcgccacttggcattttatagggagagttgggcagtccccttctcagggtaaacagaccttatagtggcttttattcattctaccagactggctgatactcctcgagaagagcaaccttacgacacataatcatcagattcaccaaggttgaaatgaagaaaaaaatgttaagggcagccagagagaaaggtcaggttacttacaaaaggaagtccatcagactaacagtggatctttctgtacataccctacaagccagaagagagcgggggccaatatccaacattcttaaagcaaataattttcaacccagaatttcatatccagctaaaactaagcttcataagcgaaggagaaataaaattctctacagacaagcaaatgctgagggattttgtcaccaccaggcctgccttacaagagctcctgaaaaaagcactaaatatggaaaggaaaaatgggtaccagtcactgtaaaaacataccaaaatataaagaccaacaacactatgaagaaactgcatcaactaatgtgcaaaataactagctggcatcatgatgacaggatcaaattcacatataacaatattaaccttaaatgtaaacaggctaagtgccccaattaaaagacatagactaacaaattggataaagagtcaaaagccatcagtgtgctgtattcaggagacccatctcatgtgcaaagacacacataggctcaaaataaagggatggaggaatatttaccaagaaaatagaaaacaaaacaaaacaaaaaacaaacaaaaaaagaaaaccatgggttgcaatcctagcctctgataaaacagaatttaaatcaacaaatatcaaaagagacaaagaaggacatacataatggtaaagggatcaattcaacgagaagagctaattatcccaaatatatatgcacccaatacaggagcacccagattcataaaacaagttcttacagacccacaaagagacttagactcccacatgataatagtgggagattttaacaccccactgtcaatattaaacagatcaatgagacagaaaattaacaaggatattcaggacttgaactcagctttggaccaagcagaactaatagacctctacagaactctccaacaaaaatcaacagaatatatgttcttctcagcaccacatggcacttattctaaagttgaccacatagttggaagtaaaacactcctcagcaaacgcaaaagaacagatatcataacagtctctcagaccacagtgcaatcaaattagaactcaggattcagaaactcgttcaaatccacacaactacatggaaactgaacaaccttctcttgaatgactactaggtaaataatgaagttaaggaagaaataaataagttctttgaaaatgagaaaaaagagacaatgtacctgaatctctgggacacagctaaagcagtgttaagaggaaaatttatagcatgaaatgctcacatcagaaagcaggaaagatttaaaatcaatactctaacatcacaattaaaagaactagagaagcaagagcaaacaaattcaaaagctagcagaaggcaagaaataactaagatcagagtagaactgaaggagatagggacataaaaaacctttcaaaaaattaatgaattcaggagctagttttttggaaattttaacaaaatacatagaccactagtaagacaaataagaaaagagagaagaatcaaataggcacaataaaaaataataaaggggatatcaccactgatcccacagaaataccaactaccatcagagaatactataaacacctctatgcaaataaattagaaaatctagaagaaatagataaattcctggacacatgcaccctctcaagactgaagcaagaagacatcaaatccctgaataaacaaataacaagttctaaaattgaggcagtaattaatagcctaccaaccaaaaatagcccaggaccagatggattcgcagccaaattctaccagaggtacaaagaggagctggtaccattccttctgaaatcattccaaacaacagaaaaagagggactcctccctaactcattttatgagaccagcatcactgtgataccaaaacctggcagaaacacaatgtaaaaaaaatttcaggccaatatccctgatgaacattaatgcaaaaatcctcaataaaataatgggaaaccaaatccagcagctcaccaaaaagattatccaccacgatcaagttggtgtcatccgtgggatgcaagactggttcaacatacacaaatcaataaacgtaatccatcacataaacagaacaaatgacaaaaaccacatgattatctcaacagatacagaaaaggccttcgataaaattcaacacccttcatgctaaaaacactcaataaactaggtattgatggaacataccttaaataaataagagctatttatgacagactcacagccaatatcatactgtgtgtgcaaaagctggaagcattccctttgataactggcacaagacaaggaagacctctctcaccactcctatttaccataatattggaagttctggccagggcaatcaggcaagagaaagaaataaagggtatgcaaacaggaagagaggaagtcaaattgtctctgcttgcagatgacatgattgtgtatttagaaaaccccatcgtctcagcccaaaatcttcttaagctgcaagtctcaggatacaaaatcaatgtgcaaaaatcacaagcattcctatacagcaataatagacaaacagagagccaaatcatgagtgaactcccattcacaactgctacaaagagaataaaatacctagaatacaactcacaagggacgtgaaggacctcttcaaggagaactacaaaccactactgaagaaaataagagaggacacaaacaaatggaaaaacattccatgctcatgaataggaagaatcaatatcgtgaaaatggctatagtgcccaaaataatttatagattcaatgctattcttataaagctaccattgactttcttcacagaattagaaaaaactactttaaaatttcatatggaaccaaaaggaaggagcaattgaaatattggttttctaaattgggggagaaatagatatgaagggcttgcttatatccttcacaagtgtgtgctcacagtacataagtaggactagatttttttttttttttgagagggagtctcgctctgtcactgaggctggagtgcagtggtgctatctcagctcactgcaagctccacctcccgggttcatgccattctcctgcctcagcctcccgagtagctgggactacaggtgcccgccaccacgcctggctaatttttttttttttgtatttttagtagagacgaggtttcaccgtgttagccaggatggtctcaatctcctgacctcgtgatccacccgcctcggcctcccaaagtgctgggattacaggcgtgagccaacgcgcctggcctagattttttttttaatctgtctttctggttgatctggggaggatgctggtaaaactgcaattcttaccaaaggaggagtatactggtataactactataatttttgttcttctccaaattgcctcaaatttttttctctcccttacctgatgtggtggtcctaggaccagggctccaattataactcctactaatagcaggaatgctttttaagcaaaaaactttacctttaaacctctatgttagaattcctaaaaggcttctaggggtggattgtgcttccacatttggcaaaatggaggctaatagtgaatgtatatagctatattgcctggtggtaaaaatagcccactagttctgtacctatgtaaccttaccttattggaatgggagtagactgaggaggaggcacttgctagactagtattgctgcctgcaatccagcacagtggtgtttctaacatcccttccaaaagtgagtttgagtaaataaatgggttaaaaattgagagaaattaaacattacataaatacttcaaaagagacagcaagagatgacactgcctcttagcccagttattccagatgcctgaaagtgtgaagttatatgtttgctgagacaacaactgcttttggaacctgacaagattaaaaggaagcctgtaaacctgagtggcctcaccctgggacacattaatgcaagatgatggattggaccaattattaatgactgaatgggattcaatatcttttgagttgcatgcccttttgatgtaaaggatccaggttcaaataccaggggtggactgtgatattttaaaatatatatttggtcttcatcccagtttcctggcatataactcctaaaacccttggaatcgccaaagtgctgtctttttatatggtaatgttgactgacaccttcagggtagggctggtcaccagaaagacaaaggcatgattagagggttgggctttcaaccccatcccccaaactctggagagggaagagaggctgaaggtcaagttgattaccaatggccaatggtttaatcaaccatgcctctgtaatgaagcctatgtaaaaacccaagaggacatggttcaaagagcttctggatagctgaacatatggaggttcctggagagtggcacacccagggagggcatggaagctctatacctctttccctatacctcatcctacacatctcttcatctatatcctttgtagtatcctttataataaaccagcaaatataaaaacaattaaaaaatgaaaaaagtcaatgtgcctaagaccatccagataataagtgacaaaatatagtttcaaatccaagtctgacacctaacccaatgctgtgtgaaacttacataacctcttacaaccatcaatctccaggatcctctgctgctcatatcaaaagcagaagctttcagttatttcaataagattgtgtttgtgaagtcctgaagggaggagccttcatgtttagcaacacccagggggatggtcaggctataagattgtaatatgtgactttaataacaaggttgaataactttttattcaatatctttttttttttttgagacagaatctcactgtgtcacccaggctggagtgcagtggcacgatcttggctcactgcaacctctgcttcacaggttcaagcgattcttaagcctcagcctcctgagtagctgggattacaggcacccaccaccacacctggctaatttttgtatttttggtagaaatggggtttcatcatgttggccaggctggtcttgaactcctgacctgaagtgatccacctgccttggcctcccaaaatgctgggtttacaggtgtgggccaccatgcctggcttttattcaatatcttaaaatatatttagaaaattatattgtacttctgcactctgctaaagttctgaccaaagccagagaaatacgatattaaaaatgacaaatgagtttattgaagaagaatcacaaagttagaattttacgaatgtcatattgtggactcagactgagcttatgtttgccacaaattttatagttataaactcctcaagggctagagtaaggagtgttcagtttctcaaactccactctacttagtacttcttagtgtggggatatatatgaaagaggaaggagaggctgaaatcagattctttttctgtgagtgatttgggctttgaatacctcagaaaaacttctaacctgcagtggctagtcaactgttccctggctaacactcaagagtatagagcttcatggagattggcagagcttgacccttcatgacttggatgtgacctctgataaatatctggagttaaaagccttataaaggaattgtgtttttatatagtactggacactgatagatgagacagagtgagtttgctcctgtgagtctaatttgcagatgggataaagggtatttgtggaaatgagataaagcatgtatcatctttgattgtttaactgttaggctgcttttgatttttccatagatctataatgaacacctttgcattctagccttttctttccttagaactttgattattatgtcaagtggtataaatgttttcatggttctttagatgcattgccaaatcatttcttaaatggagagaaataatttacatgtttaatgcctctcagtactggtttaaattttgaaaataaatgcttaatggaataaaaaatgtatagttgtaggtgctactttgtaaatgagaatcaggctgcagaaatatctttttcatgaaatgcagagtgaaagtggcttccttgttctattctccatgattaactgagaaatctaggaggggctacacaaaatggtggaaactggaaagtaaaagagttggtgggggggggtcagaggaagagtgagagcaatgttcttaaccttaatatttaaaagctatctacaacagagatgtcctataaaaggtactcaactattatttttttctctcttgcccttaccgctttatagcctagaacatgaaggcttgccaagtcacagaggttaagttacagagagaaagggatgggaaccactttggcttctttggtccccaaatatctgttcccatcaatctattatttttgagaaagatacatgatgaggactaaattctgattttttcatcttgtccaaattcctatctaaggggtctgggaagtcatgccctacaaatcataaattgtcatcggatgggttttatttaaccttatatatatcgtgacttactttccaatctgactctggcataacattacaagacaaggaagaaaattaaaatattttactccaaaacatgcttctttgccatatcttgaaatggccttgcaaagctgttctttgtggggaaaaatttgcatctgtaaagaatctctattaacatagctagatcttattcttccaggccttcccaatcctaaagagattaactaaaagtctagcaccttttaaagatctgaataggaaacatttgtcatctattgtctctaagggcagccactattagacttcaaaagaaccttggtctccacaatcttttatcttaacctgaacatttcctttctataatcccaggtccttagataaactcaaccaattgtcaaccagaaaatgtttaaatttatctatagcctggaatccccaccatggctttgaattgtcccacctttctggaccaaaccaatgtatttcttaaatgtatttgattgatgtctcatgccttcttaaaatgtataaaataagttgtaccccaaccaccttgggcacatgttctcaggacctcctgagggctgtgtcatgggccatggtcactcatatttggctcagaataaatctcttcaaatattttacagagtttgactctttttgtcgacaatggctatgcacgattgccactcaggtactgatttctgtattaatgtggcatgctagggcttggtagataaaagttcaggagtctagaaagtttagagaaaggagacatattcttctctagaacttgatgaaggaggaggagggaacaggaaggaataccattaagctctaagaatcatcaaccaaccagcagaaaatatttctgagtaccttttaatgaaatataagagttttctatttccccaaattccaaagaacaaacccactatatctctgaagcttacagtaatcttaacccttctgtttctggagagcatatcacaaatgggcatatcacctaggtcttcaaacacccaaggggacagttaggctataaagataaaacatatgactttagtaataatacaaataagaaacaggatactttatgcagatgttccaaagctttggcctgtttgtgagtttagattcatgagcatatacctaggacacaaatgtatatccattgtaattgattgagaataagctgacattaacaatttaaagagacactgcaagtagtataatcatgtacatacatatataaaatatggctatttatgctggaaaggatgaggccaattgaggattctgatattagctttataaagagatgtgtcccaattagaagaggtggagagagttgtgaaatttagaattctgattttaatgataaaggaaacatgtgtgatagaaaagaccaggaattggggggaaaaactttcagtgaaactactgtttttgttgttgttgtttttttaactgtaaacaagccaccaaacttcctaaacaaaagtgaactttgagtgaaattataacatttagccatgcagaaaacagggcatttttccatttctaaaggaataatactaaaaacttagatggctccccaatacttggcaaacagtgatggttaatattaagtgtcaacttgattggattgaaggatgcacatattgctcctgggtgtgtctgtgagtgtgttgccaaaggagactaacatctgagtcagtggactgggaggggcagacccaccctcaatttgggtgggcaccatacaataaactgccagcctggctagaataaagcaggcagaagaaggtggaagaagccaacttgctcagtcttctggccttcatctttcttccctgctggatgcttcctgccttgaacattagactccaagttcttcagcttttgaactcttggatttacaccagaggtttgccaagggctctcaggcttttggccacagactgaaggccgcatttgttggattccctacttttgaggttttgagacttggactggcttccttgctcctcagcttgcagacagcctattgtgggacttcaccttaccatcatgcaagtcgatactcctcaataagctccccttcatatatacatctattctattagttctgtccctctggagaaccctaatacacaaactaacagtaggttgttgagtagaatgtaaaacttctgacttttacagaatattgttttcacttagaagctgctttatcagaaataaaatagctctctcaccctataaactctgaaattttcaacaaaaaatgcacagaatgacaagagcagcaataataaaatcctaaacaagacaacactcaaaaatatctctgtgaaaagattggaataaaataaaatatcaaaacaaaaaaaccccacaaagcagccacagaatatcacaaccagtctatagtgatgacagttatcactatgacagttatcattgccttcctatgtttctttccatctgataccaagggtaacatttcaagcacaggtaacaaacaggtaactcaaattccttttgtactgttttccttctttttggatgtcccctggctttcttaagtaaatttaaggtcacacgcatgaacacagagaaacatttctttatgctgcaaatggtgaccttcacattatcagtgtcactattactgtggctggtctcaccttctcccactatgggcacctatggaatgattaaagacactagagaaagtcaaaatggaaatagggactagatggaacttccggcagtcaaagaagaaggatttatgtgttagtgttaacactataagtgatagtgttaaggagggcaagtcaagttggaacaaagcttagtaaaccagctctaccctataacctggtcattgccctttccccacatcaagaagtactttaataacctttggaaaatggaccttgagtacaacgttcttatgatactaggttatgcaatttaatagcaccagataacctggggagattcaacagttggttctagaatactttagttgtctcagttgcttactataatcttcaattttcttctgttattgttgacatttatttcatttctttaaaaatcttataaaagattacatcattgaagtctcatcatgcccaactctccagtgctattaccctcagcttcaa

SEQ ID NO: 109 - DNA, 77441 bp, Mus musculus
cagcatcaatacagccttgtgtgcttagacacaccgcatagagttttagcactatgccttggggtggaggttgccagcaaaaggaatgtaaatgtggaaattgtgatattagatgaacaatgtagaggatgtgtgcttaaagtttgagagctgaaaccaggtgacaaattgttcacctctctgtgcgtgtctgaaatgaccaaaaggcaattaaaatatttgcaaatttgctaatatagaatacatgaaaattgaggatttacttccaaagtaaagattctttccaagtagctgctatttgcctaccctgaagccaggacactagccctggggagctaaggtgaatgagacctagacagatataatcctctccactcctccttctttccttatttatttctgaaacaaggtctcactgtacaactcactctgtagactaggctggccctcaaactcacagagatctggttgcctctgcctcctgagggctggtgggattaaaaactgggcttcgagccctcagtcctgcctctacctcatcagtactgggactgcagatgtgtactgccacattcagatttccttttgggattttgaaagaaagaaaataaatgtgagcagtaataaaagccaattgaggattatagtcagcaaccaaagccactaaaatattctagaaccaagtcaaacttcttcagggtatctggtgctttcattaatgtgagcaatctaccattataagaacactgtacccaaggcccattttctcaaaacttatcaaggtatctacactaatgatcttgatgtgggagagaagcagtagtccataaggtacaactgtttactaagctttgtcccaactttattctcatcagttaagactatcaactctagggttaacattaagacaaaagtcctcctttgacagccaaaaattatctacttcaattttgactttcccctgtgtctttatcactccatagggatgtactgaagatgatgaaaccagtcacagtgacagagacatagacaataatgtgaaagtcatcactggcaacattaaagcaagcccctccatgtatatgtatgtattctcaattgttcttgggttatgggaaatccagggaggagaaatacaataggagttggttatccattaactgtgcttagtcttatccttggtatcagttgagaagcaacgtaggaagatgatgaagtctgtaatgacatagtgttgtagtgatctggtctgtagttccacacatcagttgcaatatgctgctgttcctttatgggatagattgtttttgtctactctgttttgtgtgtaccttttctcacagatgattttggtatgaaattatgtaggattttgtttttgtgggcctggctctcatttttgtaggaagtcagagagttcaaagagtaaaagagaccctaagtctatttgtattcatgtgactgctcttgagtacaagcaatgtcctagagaagaactttcatgctctgtcctttcagtactgtcatttgtcatgtgctagtggaggcttacattttttcttcttttttttcctttttccttttattggatattttctttatttacatttcaaatgttatatcccctttccacatctcccccccgaaaccctttatcccatcctccctcccctgcttctatgaggatgttcctccacccacccacccacccactcccaccttcccaccctcaattcccctacactggggcatctatcaagctttcataggaccaagcgcccctcctcccattgatgcatgacaaggccatcctctgcaatgtatgcagctggagccatgtgtactctttgttgatgacttagtccctgggagctcttggggttggttcatattgttcttcctgtggggttgcaaaccccttcaacttcttcagtcctttctttagctcctccattggggaccctgtgcttagtccaatagttggcttcaagcatccatctctgtatttgtcaggctctggcagggggaggctcacatttgatgtcttttttcctttaaaatggaaaaatagtcaggtaagatagtgcacacctttcattctagcacttgggaggcagaagcaggagttctaggccaacttgctccacatagtagcttccatttgcctctgcctcccagactgctggtgggataaaggctggccttgagctctccatcaccgtctctacctcaccacattgccacttccagatttctttttgagagctacgtagagcatgatttacatagtggcttctaggctggttaggactatatagtaagagcctgtctcaaagaaggtgggggtagatagcctgtcttagttcaaatataaatgggtcatattttcatgtgtgtgcatgaatgattttcatgtctctctaagttgttggatttagcctattgacaattgattacactatatattctagggagatgttcactgatcagaacccacaagctgaccaagacctggaagaaactgaatcaggtatctttcttgccctttggattgttattgaagtcacacatttcatccttgcagcctgacatacatacagggaatttaaaggcactggaagccaggtctagggtacacacctttaagcctagcactccagcactcagagaggcaactgacaagtatctgtgacttcaaggccaacatggtctacataacaagttctaggcaagctagggctaaatagtgagaccctaccaaataaataactaaccaaataataaataagacaatggagggataatcaggatgtagctcactagttatagtacttgccttgcatgaatgaggtccttggttagagtccttagtactacaaaagccgagtatgatgcaatcccagtatccaggagacagaaggcaccctatcccattccgaggatggtctaggcaatcaaagaacatcaagggtaaggaagagacacaaatggtcactgttcccacagattacactgtactttggccacaagggaggactctagctcaaggactgtccctggtgtcctttcccactcagacatccccagataagcagcccctcctctcccctttgttaacaaaccaagtccaaggctcttgaatctggccaaggaggagccccagcaggctggttcagctgagatccctggggagtagataaggttttcacctgtaggaaccagattgtgagtaatagttatcaagaaaaaaaagaaatgagaccttgaaggaactgggaggatctgaagcagtacaagtttatagggtcctaatgttcagatcgcactaaactgtactgctgcccctggagccagaatccctgaagctacaatcacagtgaaggagtagaagctagggaagagctgagcagccaatccacagccagtcctacttctgagatcctacctcttaggctctgactttccagaacaattgagctctgagaatatagaatagacccacggtctcgaacactctccaggacttggcagaacggagggggaaaaacaagaacaacaacaacaacaaaaaacagtgtctcctataaagaactaaaaccatgtggctcagtagttaaaagctcatattgctcttacagaggaggacccaagcttgatccccagcacctgtgtcaagctgctcacaatcacctataatttcatctccaggagacccaattcctatcacccctgtaggcactagcacttgtataaattaaataaaagacacacaactgtttttaaaaagatttatttattattatatctaagtatactatagctgtcttcagatgcaccagaaaagggcgtcagatctcattacgggtggttgcaagccaccatgtggttgctgggatttgaactcaggacctttggaagagcagtcagtgctcttaactactgagccatctctctagcccaacatacaacttttatcatttacagtaaaccttaaacagctcaagagctgggcagatatagcactcatgtgacacagagacatataatttttaaaataataataaaataccatgaacattttcctggaaagaagtgaggtaaatagttattggctaagcttggcattaagtagaactgacgtttagtaatcaaatcagtgcaatttctttataagttttcttaaaactttcacatttcacacaaaggaaaaggattttgtagtttctgtagtgccttctgtctttcacagcgtcaaaactatagtttacaaagcaaaccaatgacaacatccataggtaaagaaggaaacagacatttaactgtttagcattgcttgtattggcaagtactcttacacgtatgcaccctcacaggtttgacagcatgcaacttaaccagctgcatctccagccccatactgccttttcacgtaggcatctaatatagctgaaacactgatgtttgccctttaatataagcaatcagctggatggcggtagcacacacctttaatgccagtgctcaggagatagaggcaggcagatctctctgagttcaaagtctgcctggtctacaaaggaggttccaggacggccagggccattacacagaaaaacctcccaaacaacaaaacacagagagagaatcgataagacttggtagaccttggaaggccccttttctaaagatgttcacgagggaggcattactgaaaaatagagaataattgaaaacctttcttccacagatggtgccatgaacccaactgattaagcaggcaggcagaaacgtgtcaccatcagctaccattgtgccctcatgcataaatgaagtcctgatggaaaacagacaaacaaacaaacaaacaaacatctctacacactaagccgaaaacaaatctataccaaactgctaaaataaatggaaaatacttaatttgagcctggctgttttgaaaattggaaatccttcttcaaaatgaaaatcaccgcaaaacaatctaaagtcatctacaggccaactagggtgtttgttgcttgccaaacttccaataaattctgcttgaaacctttgcgtttctgtgtcactgtttctcactaccccttccttgtcatgctaattatgctaattacctcgttttttcctttcctttcctttttggtttggtttggttttggtttggttggttagttggtttttagagacaaggcttctctgtgtagccctggctgtcctggaactcactttgtagaccaggctggcctcgaactcagaaattcacctgcctctgcctcccgagtgctgggattaaagacatgcaccatcatgactagcttttttcctttttttttttcttttcttcttcttccccccccccgagacagggtttctctatatagtcctggctgtcctggaactcactctgtagaccaggctggcctcgaactcagaaatccacctgcctctgccttccaagtgctgggattaaaggcgtgcgccaccatgcccggcgaccagcttttttccctttcttaaaatgtagtctgggatgctgctggctcatgcctttaatcccagcactccagaggcaaaagaggcaaaaacctgtgggtctttaaattaaaagccagctgctcatagtgagttccagttcaggactacatagtgagatcctgtctcaaaataaactttaattagtttagttgagtagattaatttcttatattttctgttgcttttgttaagtgtgctgagaacacaaacactataacaatataaaaaacaaaactattaaagatctggtcattagctccggtgggtaattttttatttgcaagtttttttatagtaaaggtttttttttattttcaatgctatcccaaaagtccgccatacccaccccccccaatccactacccacccactcccccgttttggccctggggttcccctgtactggggcatatacagtttgcaagtccaatgggcctctctttgcagtgatggccgactaggccatcttttgatacatatgcagctagagtcaagagctccggggtagtggttagttcataatgttgttccatctatagggttgcagttccctttagctccttgggtaatttctctagctcctccattgggggccgtgtgacccatccaatagctaactgtgatcatccacttctgtgtttgctaggccccgtttttttttttaattaggtattttcctcatttacatttccaatgctatccaaaaagtcccccatacccttccccccactcccactttttggccctggcgttcccctgtactggggcatataaagtttgcatgtccaatgggcctctctttccagtgatggccgactaggccatcttttgatacatatgcagctagagtcacgagctctggggggtactggttagttcatattgttgttccacctatagggttgcagatccctttagctccttgggtactttctttagctcctccattggaggccctgtgatccatccaatagctgactgtgagcatccacttatatgtttgctaggcccaggcgaagtctcactagagacagctatatcagggtccttctagcaaaatcttgctagtgtatgcaatggtgtcagcgtttggaggctgattatgggatggatccctggatatggcagtctctagatgttccatccttttgtatcagctccaaactttgtctctgtaactccttccagtaaaggttttttttaaagatttatttattatatctaagtacactgtagctgtcttcagacacaccagaagagggcatcagatctcattacagatggttgtgagccactatgaggttcctgggaattgaactcaggacctctggaagagcagtcagtgctcttaaccactgagccatctctccagcccctataataaagttttaattttaaaaaagaagatactttaagaagttagaaaaaaatgaagagtgcattgcaatcactcttgccttaccaattagaagtatttttccagatcacgtcaccaattataaaaatagaaatcattgtgcttgctgttttacaataaatattcaaacatctaaactttaaaaatgaataagtctggtgaggggaaattgctggagtgaggtacctcggtgagtggctgaaccagtgagggatcttcattatttgtaaattccaaattttaaaaattttatttatttttattccatgtgcattgatgcttttttgcctgcatccatatctgtgtgatggtataggatcccttagagctgaagttacagacagctgtgatctgtatgtggttgttggtaattgaaactgggttctctggacctctggaagagcagccagtgctcttaacctctaagccatctctctagcccccaaattctgaatttttaaatatccatatagtaaatctctgatttcgttgcaaacaaacaaacagtggtttataggaaagggcttttattccttatcagcaattaaacagtcaagggttggtttggggtggggtgggggctgggggcttaagctgttctaaaccaagtgatggttcagcacatttactttttgaactctgacatgaggagctcttgccttacatggtacagttaaatctccttactacaagccgggcgtggtggcatggtggcgcatgcctttaatcccagcactcgggaggcagaggcaggcagatttctgagttcgaggccagcctggtctacaaagtgagttccaggacagccagggatacacagagaaaccctgtctcgaaaaacccaccaaaacaaaaaaatcttcttactataaatgggtagagtatgcccggcccctttcttcctgaatcagaaaacagctggaaccaagtaaacaccagtttttctacttccttccttttctcactttgtaatcttctattgttccatctatctgggggactgttactcagccgatgccgtgatgcggaagaaacttgaagtactacaattgatattataaaggattttctactagacttgcttaggagacattaatgcacacaaagtagaatttagcaaggaactgctgcctccaaacgtatgagctgtggagtcatgactagcttcacctagatttcaaaggattcctccatgagttttgagagccaagcagagaaccagaggaaggctgatataaagtctctaccagcacagtgcttagcgacttttgcccagagaatagacccccaatgagagcaatgcccaaaagagctatgaaaacactgctctcagttatgacgccagagctatagagccaccagtatgcaaaaacagcttgggagaggtgccagcaactggttccgactgacaagaagtgctgtgtcagcgtgcctagcgaggcaagcttagagccctgtgaacccaaatggcgctccgtgtgtctagaggcagaacttggagccaaagtttgctcttgagccttaagatgaagtattaccatgttggggtgctgctcctcaggggacttatattcagtccccagatgtctcaaaattccctgtaactctagctccaagcgatccaatactctcttctggcatactccagcaacccaccccctgtactgataaatacaagtaaaaatcttaaaactatatttataaagagagaggggagagagagcaatggcatctagaccctgggatccatcccctcttaggggaatatgttggtgtacatacctttaatcccagcagtcaaaatacagaggcaggtgaatctctgatttagatgccagcctggtctacctgatgaattccaggccaatcaggctacatagtgatagactgtctcaaacaacacaacacaacacaacacaacacaacaccaacaaaaccttcccctattgggaggagctgatgttaccccacccctccctggggggtctatagttggtgagaaagggagagaagatctgagtgtgtaactacttgtagggagtccattctcctacaaataatcccctcacccaggactctgaaagcaactgtaatgaaacactttggagcacgtgcgcacacagaacgaactcttgccctgccatgtctggggcttatttggcgtaatttatccctttcttctttcctatttctgacttttggaataagtatgtctacctaatgtctgtctcaaagttgtggttttagactttttaaagatattttttgcttgttattattagtgtgtgtgcatgcacacatcatgagtagggtgatcagatggtgcacggcttttgtcctaccactcaggaggtagagtcaggaggatctttgtgagttcgaggtcagcctgactccagaattccaggatagccagaactacaccgaaaaaccttgcctcaaaaccaaaaccaaccgaacaaaaacaacaagaaagataaggcctttttggatgtatttggtaatgcctccatgactcgattactgtccctgtccttgtaagaacagctaaaagtacactcctggttgtgtcttttgctcttccatttcttctgtcttgtgagagaagcacctctgtggaaacagggatcatctgcatggcatgaaatctgctatcactttctaccttctagcacgtgaaaagtcagtgggctatttttgaattatcgttctggacattttgtcctggcagtaataaagagtacaatacagcagatatctgaatttctttcttaaaaaaaaaaaaactatttttttcctgagtacactgtagctgtcttcagacacaccagaagaaggcattagatcccattacagatggttgtgtggttgctgggaattgaattcaggtcctctggaagagcagtcaatgctcttaaccgctgagccatctgtccacccccatccccctttttaaaaatatttatttatctttattttatgtgcttgggtgttttggctgccatacctaggtaccatatctgtgcagtgtccacagaagccagaagaaggtgtcaatgtcccctaagaactggaattatagatggttgtaagccaccatgtaggtgctgggaattggactcaggacctctagaagagcagtcagtactctttgttttgttttgttttttcgagacagggtttctctgtgtagccctggctgtcctggaactcactttgtagaccaggctggcctcgaactcagaaatctgcctgcctctgcctcccaagtgctgggattaaaggcgtgtgccaccacgctcagcaaaactagagttttctttaaaaaggatctaacacagtatcattaactgtagtgcctgtgctatgtatacattagatctgtaaaacttatttatcttgcatatcagctatttgtatctttttaattagtgtatactatttgtacaaagtaaagatttcattaactatttccataatgcatataacataattgcatattcacccctctattactcttttttatccctcctacttttcctcatagtttggtaaaaaccagtccagcaactaataaataagttggtgactatctggatctgtttggttgtacactcaatcagcctatcactcagcattttgtataatggcagacactatcttcaaacacttacctacctcgcatttcctgacacttaacacatggaaaaacagcaaattctagactttagctaaacattgcaacacttcagaagtttctagctaaccaacaatagtcagatgataaacagctcaattgattttagcattatttgagttgagaagtaatgtctttaaaaggaacctgccaggtgtggtggggggaggaagatggctctttctgagttccaggctagttgaggctgtatcgtgagactctacctcaaaaataaatagctagcagataaaaacatgcctttaaaaatactaaagataaaaaagaaagagacagaaaggaaggaagagatacagacagagacagagacagagacagagacagagacagagacagagacagaaagaaaaagtgccaggcagtgatggcacaggccttcaatcccagcacttgggaggcagaggcaggcaaatctctgtgagttcgaggccagcctggtctacagggagagttccagaatagtgagggctgttacatagaaaaaaatgtgtctccaataagtaggtaagtaagtaagtaagtaagtaaataaataaataaataaaaataagcaaacagataaagatatatgttctttgttcccgaattttatattgtctgcttagcacagatacgatacttcttaattatatttttgactgtctaaaaaataaaatttcttttaaaatctttctttccaagtaaagctactacttgaatattgtaagaggttattacttcatgacttttacatcatatacatagaagatgaggtcacgaatttatcaccatgcttggttgttattctccttttctttatttctttacttattatttagaaaaacagtcataatctggccatcttttccaggctggcttcaaactcctaattcttctgtctcaaagtcctcagttctgggattacagatattcatcacaatattcatatataacacaaacacacactcagctgaaggtagaattcttatttctattttatttggttttcattttgttttgtttcattttgccattttgtgatttgtgtttttgagacagggtctttttgtcgtggtcctggatgaactggaactcatattttagaccagattggatttaaattcagagttctgcctgcttctgcctccaaatgctgggatcaaaggcatgttctaccatgcgcctaccatattttaattttattcgcttgcatgtgtgcgtgtgcctgtatgtgtgtgcgcacgcacatatctgtacgcatgcgcaaaatgtgtgtgtgtgtgtgtgtgtgtgtgtgtgtgtgtgtgtgtctgtgcgcacgcgtgtgtgcatgtgtgtgtgttcatgcgtgcgcacgtgtacccgtgcgtccacactccgccagcacgtgtgctagcttgcaagttttcagtttgagtacagacaccaggccatagcccaatggcagcagtgacagggaggaccgtggcagcatgtaacaatcagaagacaacttccggattttcactctgtcctaaaaaggtaaaacgcttaagctcacttttgtagaaaagatgcggtgatttatgcctacacctgactttattacttatgtctatacatgtttgctttttactgtgaatttaatagaaaggagaaagttgaggctctgtctgggcaatagtcttttgtttcacacatgctacagggttacctagacaccaagtgttttcttgctcagtaaagataatttactttgttttcaaaaagcctccaagtagggatgtttaagcgtctgtttttctcctaaggcctactatggtgttccagtgtagtataatttgtggtataaattgtaaatgattgccatttctctggaggttatttcttatcaagaattccagcaggaggaagtgtgcagactcttctttcccactgtcatgggagtctctgggacctattagtcttttttctttctcttcatttctttctttctttccttccttccttttttccttgctttttttcccccccagagacagggtttctctgtatagccctggttgtccttgaactctctctctctgtagatcaggacggttttgaactcagtgatcctcctgcctctgcctcttgggtgctaggattataggtgtacatcactatggtccatttgtcttcttaaaggtagtgttgtgggccagtcactgtccactagccctccactcaaccttcctttcacttccgttacacttcaggatcagtccaggaacaatagagacagatactcctcctcccaccccacccaccagccggggcacctgaccactgaaggacacaaaaaacgagttcaaccagacccacacctttaaattccagcacttgggagacggaaacatttccctcccacctacagtggaaagacctattccaagagacagagactcgagaaattttacttgtcttgttcgtaaacaagcatggaatgacctatctaacttgtcatctgacaaaacaccgaagcaaattgcattaagccagactttcaaaaatactttagacatttagtcttgcatttagttacaattaatttatttagtcttgcatgacccaggtgagccttgacacgtcgaatacatggtgaaaatttgtgtcaactttgtgtgtgtgtgtgtgttttggtttagtttggtttttgaaacagggtcttatgtagcccaggctagcctcaaactcctgatcctcttatctggatcaaaattctacaatttgtaattttcacacttacaaagaaagaagaaaacttttaaatgtatttattgtgtgtgcttgtgtttgtgatgtacgcgcactcatgtgtgtgagctagtgcatgcatgaagaggctgttaccgtgtctgcctgtttgccttgttaatcctccagtctctgctagcctcagtgctggacttatagggatgcatgggcccacacttagcttattatataaaagtgttaggactcaaactgtggtgttcaggcttcctccggaaagcactttgaatcattgagccatctttccagtcctcagaattttcttaagtgaagttgtgtgatatttaggtttaatatccattatttaagtcacttatgatagttgatgttttgttttgttttttgtttttttgtttttgttttgagacaggttctcactctgtatcccagactggcctctaactgatgatgtaagcgcatgctgatgttgaagtcatagtaatcaccctgccctccctctctctctctcctgaacatgggcattacaggcacgagacaacacacctaggttcaacttttttaatttaaaaaaaaaaatgcagccgggcagtggtggcgcatgcctttaatcccagcacttgggaggcagaggcaggtggatttctgagttcgaggccagcctggtctacagagtgagttccaggacagccagggctatacagagaaaccctgtctcgaaaaaccaaaaaaaaaaaaaaaaaaaaaaaaaaaagaaaagaaaagaaagaaaagaaaaaagaaaggaagaaaaagaaactgtggcatgaaagttagaaagatgttttagtttttagtttgctttctattactgtgataaaacattctaaccaaaaatacattgggtaggaaaggatttatctggcttgtacttccacatcacagtagaaattagggcaggaaccacaaaggacagcttcctggcttgctccccatggcttgctcactttgctttttcatacctcccaggaccacctgtccatgggtggctccacccacatggtttaagtggactgcccccccccccagtcgatcgttaaccgagaaaatgtcccacagatttactcacaggccaagctgagcacagggtaccattttttttatttggctaattaactttctgattggagttgaggctcacttgctaggagaaagttcatgccttgtcaaaagcctctagctggggagaccataggctctaatggagaagctttaccactattgcctccctagctggccaccttatgactatcaaattgtcttctaaccatgtatgtttatacctgtagatttgtgctactgtcagctttggtaagactagtttctgttcgtgcagacttttagctctgagtcataagaatatgtgattggctgggcgtgcctttaatcccagcactcgggaggcagaggcaggcagatttctgagttcgaggccagcctggtctacagagtgagttccaggacagccagagctacacagagaaaccctatctcaaaaaaacaaacaaacaaacaaacaaacaaaaaagaatatgtgattgtgtgattgttgaagatcagccctaatgggatctgcatctcctcccttgcaaggttcaagaaacaccacagcaaagagggcagaaaggtaaagctggaagaagggatggggtattgtggaacatacagcagcagtcatactcataaactcacagcacctatgattaccctacccaaggcctgtgtatacaaggggacccccacattccttaggatgtgtaggaagttaacagttgctacaagaggctcacaaggcctcatccctccccgaggaggcagttaacagtgtctagacgtaagggaccaagatgcctcattcctccctgcagaaggggtattagtagttattgtttgctgagggagttgggagggggggatactttcttcggtaagaatctgccatgttcctgtaaataacccttcatccatgctatagaagaaaccagaaatcagaagtgtgtgagcagagtaaggggatcagtaaaagtgagagggagaaaaaaagagagtaatgggagtgaataggaacaaaatcttacgtgtatgtgatgttataatggcactcatattgtatagaatataccctaataaaatgtaaagggttttagctgctactgtggctcattcatgtaatcctagcacttgagaggatggttatgagtttgaggccaggctgagctacatagtgagtttcaagcagcccttaaaggatttttgctggaaattgcaccttatgcctataatcccagaactatagcaactgagggaggcagactccaaattcaaggtaagcccaggctaaagatgaggccctattaaaacagatgaacaaacaaacaaaaaaatctaggttttgtgttctggagaggcaaaatgaaaaccaataccttatcctgctctgtgtaaaatgtgacgtttggtttcccccaaggtccattggacaagagctgttctttttcaggattattttggctgttcatgggtcttcacgcatctatatgtattttatagttatttttgctacttccaaaatacaaaaagaaaacaaacaaaaacccattgggagtgcgatagatattgattgactctacagatcactttgaacagaagtagtattttaacaatattaaatgttctagtcagagcaattatctcagattattttttgttatagcaacattcctcaacctagattaagtcatgaatagtaaagataaatttaggtcacaattctggaaacagagacattcaagactgtgctggccaggattttctcagtttctggttggaagcagtgttaactcataggagagttgtggtagggaaacatctattttgtccagtataatatatgcacaagagctatcaggtagatgctaggatcattttatagcaacctcttcttaaaatccaagaactcagctaggctcttgagaaattaattaaaccctcttaaagatgccaccacatttcagcaccaagacaacatacaagttgctaggagtaaaccatatatttaaactataacaccaagtttgctgtagtggcttgcacctttaatcccaggactcaaaggcagaggcagacagatcttaaataaattggtagccagcctggtctacatagtaatttccaagccagccagggctgtatcaaacaaaaactcaggtcttcaaacttgggggcaagtgtttgtaattgctcagccatctcagtggccctcaattcacttttatatactcattttgtatcctataactttacagctgaattacctgagttgtatggtgtgtgtgtatgtgtgtgtgtgtgtgtgtgtatgtgtgtgtagactttcgtaagtcccccacataaataatcatggcatttgtgagcagagtactccagtcagttacaattcagatattaaaaaaaaaaaaagtaataaagtaaaacagggtctttagcccagggtaacgttgaattgtgatcctctagcttctacgtcctgagtatcagggtcataggcttgtaccactattgggattgcacatagggctttatgcattctagagaaaagcattctacagactgtggtacagtcccagccctggattccttttcttccccaactgttctgcacaggaccatcaattctattaggattggaatctaagagagcaaacattcttggttccttcatcttattaaagggaaagcactcaatttttcaccattgaccatgttagctgtgggctttttcaatgtggcccttatgtactcagacaatttcctcctattcctggtttaccgagagtttttaatcatgagtacactgagtttttccaagtgttttttttttaatttatttatttgttatatgtaagtacactgtagctgtcttcagatgcaccagaagaaggcatcagatctcattatggatggttgtgagccaccatgtggttgctgggatttgaactcacgaccttcagaagagcagttggtgctcttaaccgctgagccatctccccagccccgtgggtttttttgtttgtttgtttgtttgtttgtttgtttttgttttaatgctatcaagatgatcgtcattgtattgtggtgatatcgtgttcattgatttttgtatgttgaatcattcttgcattccatgagtaaatcccacctggatattttaattccatcaaactcgggttatggatattgtaatgatgatgatcatcagggatgtgggctataaatttttaactttcttttgtgtctctttctggctttgatatcaggatcactctggcatcatgaattgagttagatagcatcccttctgcttcggctcttgagagattttaagcattgactgattgtaaggtctccttttgcaaacgtgatttgagtttgttattggtgtagcttagtttcatcagcttcttaaaaaaaattttttttcaagaaaaacagcattttaaaattttgtatttacgctcgagcctttgtcatttctgttttctgccaaggttttcctgcaggtggtggtgactcagagattccttccttaggaatgcgcatctgtaactccccccaccccccaatacacacacctttgtgcggctttagcttcattcattccattaggttttaggtattatcttgtatctttatcccatttccagttgtctcctgatacattctgcttgtctggcattgtttgtctctttattggtagagggagattctccccacgcattccaggcagcctttgagcttctgatcctcctcagccttccagatttgggggattgcagagatgcaccgccaatgacaagcaaaatccctaactaaatcccttcccctcacaccccatttgttcttctggagtgtgctctgaagtgttagcttccaaatctttatgaatgctcacttcttaatgctattgattttgagcatcggttgtgttgatggtgttggtctcctattcatgcatgttgtctccgatcaatgacttctctgcccgtgaaacgagactattcaagtccgattgcattaaaggtaggcttattggggaactgctctcggggagttcactggcttcaaggattgaggagttgccatggggagaggggagaggagaaaagggaagaaggggtgcgctcgtgcagagaggagaagggtggggcgcaaaatgtctagataacattggaaagaacgtcttgtggaagggcagctaagcccctgaactggaaagttcaaggttgggaacaaggtatatcaggcagggactgaacgctgctagtagaacctggaagccaggtctgcattgatatgtaaaataagcacttctgtcccttgtccgggggtcaaaaccagtctaccgttttgttttgttttagcacttttaccatgttaatcataattagatgtaccatctaatccttgcagatgtctaccacgcctgaatttggttctgatctgtattttctagctgagatttttttgttttagtaagctttacatacagtgtttgatgtggttgaaaatgagggctataccatgtgtccactgtttgatacagccagagggatcccaggttggagaatgttccaagtgtctttatttttcctaatttgttgctttggttgctctagagacttcttgaattagttctgagttgtatgacacgttattgtatttctctgatattacaggaggccttgatggtggcagggtgttcattagctgtatctatgccactcaactgtggtcatcacagcgattcttcttgggtcttgtacagttttccttcccgtcggttaagcagaagcgtggtgggctagaattgggcttttttttccctcccttcaggtcggtttgagtcttatgaaagctaaggtggggcaatgttcgagctcaggagttgcatgtcagcctggggattaagggactcagttacttgaatttctaatgagtcacgtttgtctgaggctgaagctaggagagcagactgctatgggggtgtttcagaatgcttccttttctctttctgttccaatccctatggagatcattttcactaaaaaacatgctctagggctcctatgaagaaaagtcacaaaagtgtattgctcgctggatatagcctggattatcttattattaaatttattcaaacaaaccttccaagaaagcgtcagtttgttttcctgtgttcacactgtctgtggacaggagctgttttctcactcatcagcaagtcgctgctctctctaagagactttgtaatttggggaatgttatttccctgatagagtcgaagaaattgttcattttattcaattttttttgtgatgctaaaaatgatggctttggcctggtgtggtggtttttttaatggtgtttttgttttttaataacacactgggtcccgtttgtgccaaccaaccatatatgcatggagatggggtcatccattgcaggttgatggatctatcagagggccacaccattaactcccaatggctcctcagcggtagatcgagtacctcccctagtattggaatcacagctgctgtgagctcctgagcaccggtcctgtcactgctgcttaacccccagcccagatggcccctgtcttaagtgattttctctgaggtttgcatgtaactgtgtgatatagatgctccatttagaactgagcacccttcacactctacagatactattctctccattttgaccacatcaaagccctggtcactacacaaagaagtgtctctggggaggtctgagagctaccctaatccatgggtctagaagtattcatttaaaagatcatttatttgttcgtttctttatttacttaatgtatatgtgttctctgtcttcatggacaatgaaagaggaaattagatcccattgtagatggttgtgggccaccatgtgctttgagccaccatgtggttgctaggaattgcattcaggtgctctggaagagcaagcagccagtgctctcaaccactgagccagcctctcccgttggaggtctgtatttagagaggagttagacgatgtgtctgataagcaaaataataatggatggtccaccactatcaccccaagggtctttgagtgtccaagttgtgggttcttggtcagatttacagcacccattttttttaactgtctttttaatgtttcttttatgtcagtatttacaagtataaatttcctattacaactattactccatgctacaacttctggtctgctgctactttgagatgcttttatccatcttcatattttataatttcccttctttcattctttggatgtttaggcaaattgtatttcgatgcatttgtgaattttccctatatctttttgcttttatttctagtataattctatgtggttaagttctttttttatttttaaatttgtttttgagaatttatgagagctatattcatattgttttccctagaggtatgtgtataaagatcatttatttacttgtttatttactcaatctatatgtgttctctgtcttcatggacaatgaaagagagaatcagatgccattatagagggttgcgggctaccatgtgctatgagctagcatatggttgctgtatacatgtatatatgtatacatgtgtgtgatgtgttacaacttgctgtgtttcaattcaaccttttaatatttatcgaggacctctgacaagaagctgtgggactgttggaatgagtttccctaagagtgaaaaaagaaacatatgtaaacaaaatagaacggagctaacagcccaaaaatgtatccatgctaatccagtctgatttgaaatgcctttaattggagttacatataaactatagtatagatcactgcagaggactgcatccatctaaagtcatccaaggtactacaaatatttgtatttgtaaaaatatgaccaaccaagctcctttttatggctttaagtctgtagcacaaacctgggcttatactgccacctagtgaccaaatagcaaaacaccaaacactgaacttgtttttctggagtctagctgaatagaggctggctgaaaaatggagcagtctaggtagaattctatcattgcagaggatactgggccagcaccaggtttagcacatcccgaggaaacacttggtttttgccctaggatacagtcttccctgaagaccgagcctacaatgagaagcttgctttcctactgttatgcctttgtattgttctgtgttatacagtcagattacagtatcactcaagtcttttctttggttgactatcttctgtctggtcttctggatttccaggagacaattttgttttgttttatttttttgtttttcgagacagggtttctctgtttagccctggctgtcctggaactcactctgtagaccaggctggcctcgaactcagaaatctgcctgcctctgcctcccaagtgctgggattaaaggcgtgcgccaccacgcctggctccaggagacaattttttttttttttttttgcttattcactttacatcctgctcactgcccccaactccaggtccccccctcccatgatccttcttccttctccctcccattcttctctgagctggtgagggcccctgggtatcctcccaccctgacacatcaagtttctgtgaggatatgtgcatcctctcctactgaggcccaccaggcaactcagctaggagaacaaatcccatggacaggcaacagcttttgtgatagcccccgttccagtgttccagtagttcaggatccacatgaaggccaagctgcacatctacattatgagcaggaaggctctatttttcttatgtacaaatcttaaattcctatttgtttaccaggtcatttttggttgtcactgtgacaggttgaattttataatcttgccacttgggaaatagattgtcctttctttctcagagttttgaccccactgctcccctcctccaagaatgaacaagtttatttgtgtcacttgctacagcaccttcagccagtttctgcctgttacataattatcaccaggtctgttcccaagcaaactctcactcaacggagctagataaagatggcttccagcagcataacgaaggctcagttctgagacctatagaatgtccttgcaaggacaccctgtgtgggcttgtcccataccaaagatttctcacacgcccattgctcatttacttgaagtgtgtttgcatattggaatttgaggtgtaaatttttataaaatccgcattctttgttgtgtgtggccatgggggtctgttttctagacttgacagaatttccttaaagatgtgatacaaaggggctgaagagatggctcagtggctaagagcactggctgatcttatgaaggacttaggttctgtttccagcacccacatggcagctcacagctgtctgtaactccagccccaggggatctgactcaagcatctggcctccacattactagccatgcaggtggtacacatgctggtaattaccaaaacacataaaaaagaaacttcaaaaagaagggagacaaagctatctctccagatgggctctatgttcgttgaaacacacttttaatacccagaaggcagttttctgtttgtttgtttgtttgtttgtttttgttttgtttttttttgttttgtttttttttttttgagatgagacttctctgtatagccctgactgtcctggaactcactctgtagaccaggctggcctcgaactcagaaatccacttgtctctgcctcccaagtgctgggattaaagtccaccactgcccggcaagcaggcagttttcaatgttgtcctgtccttcaccttactgcctttgtgaacctagaagctggttacaatcagattaaggacttcaaccttttccaccccccctttctcctgaatatgacttgagtaatgggcacatagatgactttgtagttcccccagaatgcgtagaaacaaaatttcaaagctatcttcccctatcgtcacctcaaagcatcccttttgctggctttgactatgttgtcataacctagataacaacactataattaatttttaaatgtctgcctgaggaagttcatgtaagtggatcaatcattaatgccctgagttgatcttctgggaggcaacaatcagaacacagactcacagttatgtccacattttccactctactccaagtaaactccatcagcaatatgagctgctgaccttcaaatccacctccatgtacttctgtttttaaagatttatttatttattatatctaagtacactgtagctgtcttcagatcacaccagaagagggcatccgatctcattacaagtggttgtgagtcaccatgttgttgttgggatttgaactcaggaccttcagaagagcagtcagtgctttgaactgctgagccatctctccaacccctccatgtacttttgattcgtgcagctttgtaggaagttccaaaatcagcacatgtgtacacagtgccttttaaacctcttaaattctctgcagatctctctatttcttttcaagtcgttggctactttagtttattcagcagggactacctacacctacttagcagcccgctgttcccctgcagtatactttctctttccagagttttgatcactgctatccaaatgcgctcagctatttgatttctgactccagatagcgttcagataagtgtagaaagtaatgagcgtgatatccctagatctttctccttcccgaaaaaagaaactgcttcctccaacattgttacattccaccagacagagctagagcaaggaccaggaaaaatttcacaaactttccctgcggaaaagagggccttgaacttcctcttctacttaacctagcaccttgtctctatcgccatcttgtggactttttgctacattacagagctttgaatatggggattctggggccgaacatgtttgttattgaaggcttatactaaactttatatgccccagtagaggggaatgccagggccaagaagcaggagtgggtgggtaggggtggagggcggagggagggtatagggaactttcgggatagcatttgaaatgtatataaagaaaatatctaataaaaataaataaataaataaataaataaataaataaaaaagaaggcttatactgctagcacttgaatggtggaggcaggagcatgagttgaacaagatatcccaagcttcctgagattcccctccctcaaacaaacacctgattctggcaaatttttacttttgttggacatttgagtactccccacatgcacactgcctttcccctactctattgacttgtgttttaacattaacttgtaggtattttatacagggcatgatgttgttatctattgttgactggttagtcgttttgttttgttttgttttgagacagggtttccgaatgcaacagccctggctgtcctggaacttgcattgtagaccaggctggccttgaattctcagagatgcatctgcctctctctgcctctctgcttctgcctttgcctctcaagtgctgggattaaaggtgtgcatcatcaccacttggctttactttatatagttttaatgtaatgatttctcaggtatatttgaatgtactcatttctaaagtgagtatttccctttggttgctgttttatatttttcaacttcaaactcttcattttattactttttttcctgccaaaaattactccaaaaaacaaaataggaaaagcatacaataaaacatttaataaccacatcccccatatgctaagtaaggagagagctacagtcaacagtttacagactgtggatttatctctgacaccaatgattctcagcatcaagaaaactttctctgcaaagcatatacagggcaaatattgagcacaacgtttcacaagttcaatgggcctcctgaagtcgattcatgaccttcattttcaaaagcagtcccctctccccaaggaccagtgaccatggcagaagaagaaacagactttgtgatgtataggcaaagccggaccagagcaaaacaaaaccttcaggacaggacattaactgctgtacttgtgaactgtagctgcctgaataagcttgtgttaatcgccattccaagcataaggaagcactatttagagttgagagcttttgggagagggacagtcacggttttttgactccttggtaggcacaccaccccagtggatggttcacatccaggcattcacgtgcagcacaaattggacactgtgggtaatttttttttaatgaggagattaagttgagagagggtggcaggtggtggatctgcaaggggttagagaaaggaatgggggtgatatagtacacatgccaaattctcaaagaattaataaaaatattatttttaaaatttggtgatagtttctagaaatcagtatgttttctcctgtacatcctagaaatgctatcttctcacagtcaacttttgttaggtaatcaatgttatcagttaacaactacttataatactaatcactagtagcatccatctttaaaatattttattaaatattttggagtattactttctatcttctaaaggtaaaaaaagaatgcattccagtaacaacatatgcatactggtcattttcgttcatttgaagaaatatgaatgaattgggcattgatatttaaaagcaaagtatctcactgttaaagctttaaattcctagaaagctcaataatttaataattttacacacacaattgttttatggttgttttcgagacagattgttgtctctatgtagccctgactgtcctagaacttgttctgtacatcagactggtctcaaagtcagagatcctcctgcctctgcctcccaagtgcaggaattaaagggtctcatgcatcctagcctggcctcaaactcactatatcgccaaagaggataaccctgaacacctgaaacgtctctctctaccacatacacccaagtgctgcaattacagacctgtgccaagcacacggaacagtagacatactaagaacatggagctatttcagtatacttggcaaaggtaggtgattagcttgggtgcagcttcctgtggccttccatgaattttcatgaatgggcttcttgaatttctactgagaattgatggcttctggggagaagccattttccatcatttgtttcagttcaaagaactcaaggaagaacatgaaagagctccattccagcttttcctcggtactttcttttgtatgtgaaagatgctagaattcttttttgtttgtttgttttgttttgttggtttttttggtttgtttttgtttttgtttttcgagacagggtttctctatatagccctggctgtcctggaactcgctttgtagaccaggccggcctcgaactcagaaatctgcctgcctctgcctcctgagtgctgggattaaaggcgtgcgccgccaccacctggtgaaaggctctaattcttttaatatttcagacctggatggtatagagggcttttgccaaaatatcacattcttggggatttttgtattcattttacttgaagaatctgcctttttcactcagagggttttttgtttcctcccttgggctacatcctatttctttgcaaagaagttctcctcattttctacttttataaaatttgtatcacataccagcaaagctttggggactgaaaattgacattggggttaaaatgatggtacagtggctaagagcagtggctgcatttgcagaggacccaggttcgattcccaaacactcgagtaccagctcacagacgcctgtacctccagctgcagggagatctgatgctctcatccggcctctatgggctctgcacacacccacacacataaaataaaaatatttttaaaaaattctttgaaaagaaaattgggttattatgtggcaggaggattttcttttctgttccagtctaattggtgctctataagcttcttgtgtgcttataggtatctaggtgtgtttataggtatcttgtgtgtttataggtatcttgtgtgtttataggtatcttgtgtgtttataggtacctaggcagattgctcagtttgcattgatactgactgttatacattttttgaaatttggatatgtacagtttaaggaaaatttttctctaggacattaagtctcttgtcaattgaaggagaagtatatcaatccattacagtaggtttccctcaaacccagtctttgagaccgtaagagtttaagagagggggcaggaggaggcaagactggggaggaaagggttggggtgcaggcagtctgccacaaaccaaacaaatgagactgtgttggagctgagcctggcagctttggtctctgggtttccagcattccaacactcaccaagggccattcgaccaggcaagctgctacctgctggcctagctttcccagctctcaaaggcaaatgggctcaggttgcagccattcttttctgtgactcccacaaggtccatgctctgttcccctaagctctgccccctcttctctgcgcaggtggtcaagtgtgctaaccacaccctctcagcaggatcccgcgcctcaagagccttaggtcccgccccacactccctcaaaccctcagtgcagcgcttgtgtcaggcgcaatctcgcaagatccggtgaggcgctacgtcgtgctccactcggtcccaaaagtacctgcaagcgctacacacttgcgctcggcgcccttgctctgttctcactttccgagatatccacgcatcttgagtcctgcatccactcccgggaggcggctgcggcaagcgcgtgatggaagaagagcgtgatagccagctagacaggtggccagagcggagcggtgggtgagatgcgggctaaggagagggcagatgcctaaagtgcctgcgggacggtggagaggtgcccgaagtccttgttggggtggtggagaggtggctgaaattcttgcgggatagtggggcgatggctaagtgcttgcaggacagtggggcgatggctaagtgcttgcgggacaggggagaggtggctaagtgcttgcgggacagtgggacagtggcaaagtgctttcaggacagtggagcgatggctacgtgcttgcgggacagcggaagagatggttaaagtgattgccaagcagcagaaagattcctaaaatgcttgccagctatgcggagatgaaggtaaaatgcctgcgtagtcccgaaccgatagttaaaatgcctgccgcataacggaggaataactaaaatgtctgctgggtcctggagccaaaatttaaaatgtctgtcccttacaggtggttagactaccggtcagggacctggaaagatagctaacatacatgccacgttcccggactaatggctcaaatggatgcctgggactgggagactttactaaaatgcctaccaccggggacctgggctatcactaaaatgcctgccaccgggtactgggaggtcactaaaatgtctgccacggggtacttgggctatcactaaaatgcctgccaccgggtatctgggctatcactaaaatgcctgccaccggggacctgggaggtcactaaaatgcctgccaccggggacctggtaggtcactaaaatgcctgccaccggggatctgggaggtcactaaaatgcctgccgtcgaggatctgggctatcactaaaatgcctgccaccggggatctgggaggtcgctaaaatgcctgccaccgcttactgggaggtcactaaaatgtctgccacgggggacttgggctatcactaaaatgcctgccaccggggacctggtaggtcactaaaatgcctgccaccggggatctgggaggtcactaaaatgcctgccgtcgaggatctgggctatcactaaaatgcctgccaccggggatctgggaggtcgctaaaatgcctgccaccgcttactgggaggtcactaaaatgtctgccacgggggacttgggctatcactaaaatgcctgccaccagggatctgggaggtcactaaaatgcctgccaccggggatctgggctatcactaaaatgtctgccactggggatctggaagatcgctaaaatgcctgccaccggggacctgggctatcactaaaatgcctgccaccggggacctgggctatcactaaaatgtctgccactggggatctggaagatcgctaaaatgcctgccaccggggacctgggctatcactaaaatgcctgccaccggggacctgggctatcactaaaatgtctgccactggggatctggaagatcgctaaaatgcctgccaccggggacctgggctatcgctaaaatgcctgccaccggggacctgggctatcactaaaatgcctgccgccgccagggacctggggagatcgctaaaatccctgccttataaccaacccctagaggtcgactaaaatgtctgctgggcagagcagaggtgatgaaaatgtctgggatagcgtagagatggttggctaaaatgttacaggtagatatgcaaagcgttcaataagcctggcgtgggtaataaactgcagtctagagcggaaaagaaagttaagggcgtgacttgtagcagggtctagaatccacacactcacatcagggaaagcctcgtgtccgaaaaactctttggaatagtcttaatattttaatattgctcaagccaaattcagcaatactacctcaccgcacgtgtctttttcaggtaagatttttgctctttttttttttttttggtaacaattttcccgccatgtgattatgctaaaaaccaatgggattctacctccgctttagtggggttttctgattgtacgcgtttggattaaagttgatgaaagaatgtggggggggggcacagattcagaaaagtggaaaaattactggtagcgtgtgaagtaaccaagaacgagtaactaagtctgcgataactttctttgagaagccttggaagttgagacctaaaattttggtactgcgttccgtttatttccgaggtacataatgacccgatctctggtatcgttgaaattcgaaaataatctgagtgctttgaaaacccattaagtttctactatctgggacaaggagtattttcggggtgggggtggcgggcaaggcaaaacaattctcagtggttcgtatctgaaaaatcatattcttatttactataggcacggaaaatccctcccggtagtgtttattcagtgtgttcagacgagcaaacaatggcactaaggaatgaatccagtttagaaaggagggaaattaacaatcagctttggttttgatgcggatttggggtgaattttgttttttgttttttttttaatgccttatttctgagacaaggtctcagtaaataacctcaaactcgcaaagctctgcctgccactgccttcagtgggacagtgccgattttaaaggcttctgccgccatgtttggattaatgttcagttttcaattcggaagagaagaaagatttgcaaagtactgattttgtaatacctatgcaaattcttacctgtgttagtaggcagacaaacactgactccccagaatatactaatatactatattacattggaggaagaaactgaggtttctaatcaatcgaccttgagataaaaagattcccctagaaggtaaggtgttgtttcattgaaatggcagggataaaagattgacaaagactctacatccggctatagacatagaggaaggcaattactagctaagaaatttgaagctaaaaagggcagggaaatgaattctctaaaacttacagaaggaataatttcaatttaatttcaaataataatttcaatttcaactaggtgtctcacactgaacttctgacttctaaaattataaggttatagatctgtgttgctttaagccaccaagtttgttgggggcttaaacaaatacagcactgtagtgctacctgtgtctctgtatcttcgtagaggttaaggtggttatgaagacatccagaaaaggaatcatgagataggctaaggcacagagtatgtcttttatttacagtttctttgtagaacacctttacctaatgtcttaatcagctaattagcatagtaaaatacaactttgggtagttagagaacaaatagtgtgtcatagctcaagaggctagacctctctaaaatggaggttgggttctggtgttatcccttcctgtcttcctggattgtgaatggctgccttctggctgccctgcgtctggtaaagagacagacaggtttaggctccattcttaagacctcatttgatttgaaattacgtcttttatttaaaggttttatgtacatatgcagtcaaattcgaatggtttctttcttgcgcttgtgtgtgtgtgtgtgtgtgtgtgtgtgtgtgtgtgtgttcatttttgagacagcatttctctatgtaacagccctggtgtcttggaactagctctgtagaccaggctggcctcaaactcacagagatcctcctgcttctcccttcttttcttgtgctgttgaatagaaatagcctcagatctggtgaataatgagttgattactcaaaaacaaagttggaagcttgtttacatgtgctgatattggcatgcctgaagcagccagacagctttttctgtgcaatgtaagtagggtcttctactgaaatccatttggaattatatatactctataggtctactttattattattttagattttacgtgtatgagtgttctgcttgtttgcatgtttgtgaatcatgtgtatgcctgttgggcaccaatgtcagaagagggtttgctaggatccctggaactggagttatagatggttatgagccacaatgtgggtgttggaaatcaaaccaggtcctctgtgagaacagaaagtgctcacattaaaaaatagtagttatagctgggcaggtggctcacacttgttagcactttaaaggcagaggcagaaagggattgcagctagttcaagactagcttgggctacacagtcagttcctgaccaacttggctagaaaacacatgtttttgttttgttttgttttgttttgtttttaagtaaacatctgagcttactatttaaacacacacacacatgagggcatagccgcattcaattcatagcaaataataaaacttttatcaataaaaacttatcaggtccttgtataatgaaaatgaaagttgacgaataaacatgaaagcccaagaaattagaataaggctggaagtgaaagtccaaggtaaatggaattataggggaaagtgatggtttgaatgttgatggtaattgaggagactacacatagaaaacatttaaggcaggcattggcataagtgaggatttgattgggaagactaactcactttagacaaatgggtggatggtgtctttatcagagtgctatgttcaaacatacccttaaattgacttttcatcctcaagatttcttatgccaggaattccttttagtgttggattttactaccagtggtaaaaatatgaaagtagggttgttttgttttgttttgtttcgttttgtttcacacacacacacatacacacacacacacacacacacacacacacacacacaattgtttttttgttttgttttgtttttttggtttttcaagacagggtttctctgtgtagtcctggctgtcctggaactcactctgtagatcaggctggacttgaactcagaaatccgcctgcctctgcctcctgagtgctgggattaaaggcatgcgcatgcggcaccacaccctgctcacaattgtttttaaatatgtgtgtctgaggcattggccccctggagatggagtgacagaggcttgtgagctacctgacttaggtgcttgctagcaaactcaggtcctctcagcaagagcaacatgtgctgctaactgctgagctcttcttccacctttgttcttttgagacgcagtctcatgcagtacagctggctttgagtttgctccgtagccaacgctgaccttgcccttcctgcctccaccttccaagtgttgggttttccctatatttaatatttatttattccttggcaatttcatacatgcattcactcgtacttctcccccactccctacacatcccgaagctgtcttcctataaccttaatgaggtctccttttaaaataataataataatataataataataacaaccctgtgagtccagttagcagtgcttgctggaatgttggctaatcttgtcggaatcgtatgcaggtagccacagccgcagtacgcttgtgagggcggcagccagcattttcacagcttgcctccccatctttagctctcatgttctttccagccctgcttccacgatgttccatgggccttgggcagtgtgtgggttgctatagacaccttgtttggagctaagcatgcaattgttgctcagtctcaggccagctctgagtctgcattagctgctcctccttgcagaagaaacttctctggccaaggtcgaggagagtacagtattgatttgttcttgagatagagttttccagggtagccctggctggctcactatatagtatagcccaggctggtctcaaactcacagtgatcgacctgcctctgcttgccaagtgctgggattaaaagcacgtccctctctgcctggctcgacttattttttgacatggggactcactgcctggtgtccccctcctcctatagcctcaaaatggctgagcaagagtcaggtaacttgcttctctgccattcctgaagccctgtgttccatccggaacctgcataaaccaggtgaggggtgtgcttgtagtcacagcactgaggtcaaggcagaagtgtcagaaattcaaggtcatcctatctacaaagagaatttgagaccagcctgggctacaagaccctgtctcaaaacgtacaaacaagcaaacaaacaaaaaacaaattcaggagctggagagacggctcagtagttaagagcactgactgtacttctaaaggtcctgagttcaattcccagcaaccacatggtggcttacaaccgtctgtaatgggatctggtgccctcttctggtatatctgaagacagcaacagtgtactaatataaataaaataaataaacctttaaaaaaacaaaaaacaaattcaggggctccagaagagtagcaaatgttcttggtaaccactgagccatctttccagctctcctgtccttctttctttccttccttcctttctttttcttctcctctcccctcctctcctctcccctcccctcctcccctcccccctcctcctcctcctcctcctcttcttcttcctctctctctctctctctctctctctctctctctctctctcctctttctttctttttttttttgagacagagtctcatgacattgcccaggatagacccaattcttcatcttcttgctctaaatctcccaagtgccgcggttacaggcccttgcctccaacaccagctggttcctaggttctagatagctattccaagtaggtagatgcgagggatatccaattatagtttgcttcatttccctagtgggaatagagaataaggccttgtttatttacttacttttaaaggctctcatgtagcccagcccagccttgaattctgatccatggtccaccacctccaggcttgcaatgcctactggcttttttcagacctgtagtcttttgttgttcggtgtgtatgtatgtatttatttagtgcattggtgttttgcctgaatgtaagtctgtatgagggtgtcagataccctggaactggacttacagacagttgtgagctgccatgtgggtgctgggaattgaaccacaaccacggtccggtccggaagagcagccagcattcttaaccaatgagccatttctccagcccctttgtttgtttgttttttagggaccagtaaattaattttaaacctagaaagccctcccttgtctacagaattcttttagttattctttctattggaactgagcttagggtgagtgcttggttagggtagtgcttggttagggtgagtgtttggttagagtgagtgcttggttagggtgcatgcttggttagggtgagtgcttggttagggtagtgcttggttagggtgagtgtttggttagagtgagtgcttggttagggtgcatgcttggttagggtgagtgcttggttagggtgcatgcttggttagggtgagtgcttggttagggtgcatgcttagttagggtgagtgcttggttagggtgagtgcttggttagggtgagtgcttggttagggtgagtgcttggttagggtgagtgcttggttagggtgagtgcttggttacagtgtgtgcttggttagggtgagtgcttggttagggtgcatgcttggttagggtgagtgcttggttagggtgcatgcttggttagggtgagtgcttggttagggtgcatgcttggttagggtgagtgcttggttagggtgagtgtttggttagggtgagtgcttggttagggtgtatgcttggttagggtgagtgcttgattagggtgagtgctgggttagggtgagtgctcggttagggtgagtgctcggttagggtgtgtgctcggttagggtgagtgcttggttagggtgagtgcttggttagggtgagtacttggttagggtgagtacttggttagggtgagcgcttggttagggtgtgtgcttggttagggtgagtgcttggttagggtgagtgcttggttagggtgagtgcttggttagggtgagtgcttggttagggtgagtgcttggttacagtgtgtgcttggttagggtgagtgcttggttagggtgcatgcttggttagggtgagtgcttggttagggtgcgtgcttggttagggtgagtgcttggttagggtgcatgcttggttagggtgagttcttggttagggtgagtgcttggttagggtgtgtgcttggttagggtgagtgcttggttagggtgagtgcttggttagggtgagtgcttggttagggtgagtgcttggttagggtgagtgcttggttagggtgagtgcttggttagggtgagtgcttggttagggtgagtgcttggttagggtgagtgcttggttagggtgagtgcttggttagggtgagtgcttggttagggtgagtgcttggttagggtgagtgcttggttagggtgagtgcttggttagggtgagtgcttggttagggtgagtgcttggttagggtgagtgcttggttagggtgagtgcttggttagggtgagtgcttggttagggtgagtgcttggttagggtgagtgcttggttagggtgagtgcttggttagggtgagtgcttggttagggtgagtgcttggttagggtgagtgcttggttagggtgagtgcttggttagggtgagtgcttggttagggtgagtgcttggttagggtgagtgcttggttagggtgagtgcttggttagggtgagtgcttggttagggtgagtgcttggttagggtgagtgcttggttagggtgagtgcttggttagggtgagtgcttggttagggtgagtgcttggttagggtgagtgcttggttagggtgagtgcttggttagggtgagtgcttggttagggtgagtgcttggttagggtgagtgcttggttagggtgagtgcttggttagggtgagtgcttggttagggtgagtgcttggttagggtgagtgcttggttagggtgagtgcttggttagggtgagtgcttggttagggtgagtgcttggttagggtgagtgcttggttagggtgcatgcttggttagggtgagtgcttggttagggtgagtgcttgggtttccagcagtatgccagagacttccaagccagccaggactgcaatgtgagaccctgactcaaaaatgaaagaaaaacaaaagcaaaaacaattgtctctgtgtgtgcttagtttaatcttatccactccaccttctctccctgataggagacaaattttggttcgagtaaagcacagaggaactaattaacctgagattacttgcagaatagcccttcctgacccttgaaggcgccatgttattacacgttgctgtctcttctatctacagctctatttcttcctcttctttattcttgtgccagcttcacctcactgtgccattgtgccgggagggcagttttaatggccacttgcctgccctctcctgaccttgcgcaaggacctgggttgaggggagggctttgggtgccgtgggctcctcgtgttcccaggccctgctgggcccaggtgcaacatggtggcttcccgccccggaatgggaggagtggactctgcctctgtcattctccagtcgggggaagtgctggctcaggctctgcaaccacagtgcagatgggagaggggccatgggacagaaaggcaaggaccctcagtgctagcagctgctggctttgtgacccatacccagcccagctcctgcctccctcttggatggcagggacagtctgggaacttctacctgatcctcacatctattctctctttccagaagcctcagaaggagtctccctgcccctgagtttccaaagctcctcacccagggggaataaggatgcccatgcatagcaagaacctgtcacttgcaggttgcctggaagacccgggcagctcacaactcatgccttggaccttaactgcctgtttctagttgaggaacccaggctgaggaaaccaagttatatcaccaagagcatttattctagcaaaccatgaaggggctcatgtgtgcctcttcaatacctatgaaaaatttataataaaaaatcctatttaaagccgggcgtggtggcgcacgcctttaatccccagcactccggaggcagaggcagacggatttctgagttcgaggccctggctgtccctctaccactgagccacatccttacttagcccagatcccgcctttgaagaatcgcagtgtttggcttctaaatgaccagggtgacagtcagacgagggagtccagtgctgctgacccgtgcagcgaccctagccatcagggcaaggatgctggcagccctcctcttgactctttttcgttcgttccttccttccttcttttgtgtgatgcgtattgtatatgaatgtggatggtgtgtgtacacgtttgtgggtgagggttgcacagagcataatggagtcagaggacaacttcaggtgtgcatctggccttccacgttgtttatgagagcatctctctctctctctctctctctctctttcttcctttctattttttaaaacattttgttttacataagtacactgttgctgacttcagacgcaccagaagagggcatcagatcccattacaggtggttgtgagccaccatatggttgctgggatttgaactcaggacctctggaagagcatccagtgctcttaacctgagccatcatctctccagctcagacaggtcttttgttttgtttttgttttttcgagacagggtttctctgtgtagccctggctgtcctggaactcactctgtagaccaggctggcctcgaactcagaaatccgcctgcctctgcctctggagtgctgggattaaaggcgtgcgccaccacgcccggctttaaatagggttttttattagaaatttttcataggtatatagaatgcattctgcttactcttccactttcaatttccctcccgccctggccagcaccccttattccttacaaaatgtctctgtcatatttgctagttttattttgtttagtgtttcatagttcaccccagacatagtttggaactattaaatactcatcagtggatacgtttgagtgccccgtgtcccaatcctttagttgccagtaataaatggtaaggtttcatgggcttcttggagttgggccaatgctattttccaaagatgttaagatttaccataatagattcttgtacctgcctcactcacactcgcttgcagtacctgtctatctttctcttcttgccaatcacattgtagatgaggcttttgtggttttgttggctccttgtattagcataaggtgaactgatttcaggtaaaatgttgttgcttttctggcccattcattggatggaaacgaaggcccggttttgttggagcacttctactggttagcaatggctaggcagagccatgtctaacagtacaaactctctcctgagagaatttatcttttctcctagacgcaattttgtcactttgaattttagaactatcagaggcccctttctctattcaaggacttcttgacagccatgttctttcttttcatttcatcttaccagtactcccacttttgagcctcaatattttgcttctcgtgatcttattagatttgtgttctcataatctttctcctgaacaacttaggctctaagttatgagacctcaaattacccaaggaactggctaggcctgcctggtggtgtaggcctttaatccgagcactcctgagtcagtagcagacagtgctctatggatttagggccagcctaatctacatggacttcaggctagccagatggccagggcaacataaccaatttcattacatagggaattaaaactgaggtatctggtatgataaaagggccactgagttagaaactatcatctgaaaagcaggcttagtggtacaagcctgtaattctaacacaggaggatcaggagctcagagtcattccggctacttagggacttggaggctagcctagttctggctccatgcaaaggaaaaggggaatgtggcagtggttaagataccataatagattcttgtacctgcctcactcacactcgcttgcagtacctgtctatctttctcttcttgccaatcacattgtagatgaggcttttgtggttttgttggctccttgtattagcataaggtgaactgatttaagagcactaactgctcttccaggggatctgaattacattccggctacacacaagatggcgtctgtaacttggtttccttgggatccgacaccctctgctggcctacacgggtataacacccaaacctaatgcatagacaaaactcatgcacattaaataaaatttaaggaaaatatcatatacagcacatgatgttttcaaaacaaagcattttatttaacagcaaactaccccacccactcaaccacccacccacccacccacccacccatccacccacccacacacggactcattgtgacatgttggtaagcaacagttttttttttcaagtcttcaaaacacccaagagtcaacagaagttctgtattccgcatccgttcacaaagtccaggtgttttccatgtgttttttcacagttggtgggaagatgactccagtctttcaacaacagattggtacacagttcatttatgtgatcaaagcagatgatggtaggatgtgcttaattggtagcaatattgatggcagtaactgtgaaaggaaggctttcagttattttttcctttgcaaattccagaaatgtaagcccattcctacccatacaaagggatattactgaatccagccaatttccactaattaaaagctaatattagtaacacttttgatgcccaattgagttttaatgaaaatgaaaaaaatttgtttgaactcccagacctcttcaacctggctccatcttctctgttccttttcttttgcctgaatgtcctgattgggttactaagtaaagtctagatactttgaaagtatgcgtatgctacaatgaataagcttccttacagcaaattgtgacttcagctctaaggcaacttggataaagagatcacattgacttaatctgtttcattcccatttgactcaaggcttagctgatagccatttagatgaaaatacattttcagaaacatttagcgaattaataccaattttgtggaactgcattaaagtcccaacttagattccagatagacaggctggaccctttccttcactcggcctcctgtcccaccctctgtgagtgaaagaaaaatggaaagggtcaaagcacaggcatttttaatctttttcaagttctttcaatttggtctttcgttcctccagttttctgattgttgtcaattttattattcttaaattttatgcaagaatgttaaacattaatgttattttcatccactggcattattttaccatagcaagccaccttgagtatattatagtaaggagaacatttctaaattactgtgagcattagcatgtaaaaaggtaaaaggtttaacgaacacaggcaaaattggtcaatgtatttcaaagcctgctgcagctcaaaaatggcttgtttgccccaggataatgcaaagtagcctaagattgtggaacttagatggctgtcatccctcctgaccagtagtggtcacagtcatagctaaaatggcctagaaaattgagtttcttagcgtggagggcttctgtaactttagggtcaggcttgctacaaagcccagcttcccactcattgcagtggccggagaagacatgaggatgaggactcacattgcatattacttggggactaaggactaagtcgtgccactacccagaaaagagaccccccccccccatccagcacttccctatgtctatgtttcctttttccatgtctcaggagccaagtgaaggcctaagagacatgcaaatccttgtagaacaggcgaaccaataaagcaaatgaatgaataataaccttcctgtattcaacctctgaggcaaactgtgggaaatgaggaaagtgttcttcagtctagaaaacgtttgagctaatatttctgtttaataaagagcatccctctgctttccggggcatctgtaagtcacactgagtgcccttttggaacaaatgtgttgcacttagcatccagtagcatcttctgcaatgtgtggaaccgaggaaatagagaacctcttttattatttccactctaccaagcatgcccatgaggaggggagcaactttttatttaacttgcctcctctacaccttgatgtttttcccagctaaagtgagagctgtagtctcaaggtgtgactgcagtcccctcagaaactactgaggtaaagtacactttgggttgcatcctttaaatgtctttgttcttttcagtacttagaaattttagtacttagaactgcactttcatcacacttaagttaaaagtatgagtgtgatagtatattcttcttgctcacatgacgctgagccaggcaatgaacaaatacgtttagaattatcgattcatcttgattctcctttgaaacacttcaacagtaagaaaaggaaaatgggtaatgaattaaaggacagactttaagtctgtcctggcttcaagctaggccaatgagaaaatgacttttggagcttccttagctaggaagtctccagtttatgttgaaggaatcttggccttggttgggtttcgcaaacagccattatagttaaaatatttactcagaaggctggagagatgactcagtggttaagagtctgactgctcttccgaaggtcctgagttcaaatcccaacaaccacatgggggctcacaaccatctgtaatgtgatgtggtgccctcttctggtgtgtctgaagacagcaacagcgtactcatatacataaaatatataattctttaaaaatattattcactcagtaatcagatatattcttcaggctgggcatgggttaagcacatctgtaatctcagcacttgagaagctgtgacagtcaccaattagaaccagcctgggctttatgagaccatgtctcctatgatcagtgatctacactaggtccacctcacattttagttttaggacctaggttagcatattttatatacaatgtttcattaggtgttgtgttctgcatgcttggtccctccagccagtacatctagttcgagaggttctgggccacactgagtacatgccatcagatgctctggcctcttcccgttttgttccctgatacccatgctctgggattatctcactctggccctataaaactcctttactggcaaggtgtttgtaattcatctctggcagcagcattcaacaaacatttaagaaactggatggaaaaagttcctgtcattaataaaaccttttccacctcctcagtcaagccagctgggaagtatcctagacagcatagtccactcagtgtaacatttagcacactgccttgcacaaatccattttttttttctgttttcatttcctcattgaagtgaattgaagttttggtctagatttcactcctataagtgctacataatgctagaaagcaatctatgtgttcgctcaacacatagcatggtaaaattattattaggtggtgttaggtgataagcattatgattaagtttcagccattatgaaacttagaaagtaatcactgttcactgataaagccaacagttaggtcccggctttatagaactgtagacttcacaaagctccacacagatctgttgtgcatgcctgggataaaagcaaagtcattgcacaccaggcaaatattgcatatatacacatatatatggcagtttacaaattataaattaatctcatgcataatttctttagatacacaggacaatgagaatgctctttgcatcccagtgcctagcaagggcactgttttgtaataaatgactgccattcagtatgtactcatcaagtattgaatgcttcatatattcagtggttcacagttacttatttactttattttcacagtataataaatgtggcagaattttaaaagcctggaaattgataccaagtaagaaaatgaattgttacatttatatggtacctccgagttcataaaatgccaacgtacatattattctcaagtgtggacacactgaaatgtacgtctgtgtatctctccagtacccatgaaagagaatatacacatgggagacaatatttagcctccaggtttgagattgaccttatggtcttcccaggctagcctccaatttctgggctcaagtggtcctgttgcttcagctcagagcacatgctaccacacccagcttgttaactgtactcttcccattatgggctaaaaagtacaatgaaaattttgtagagactatgcctattttataggcagctttatttctatagaaaatttgtcttgtcttatactactgaactgctttatagttaagaaagtacccacaaccataatgtgacctgggcaaatgttcttgtattaacatgcccttatcactcaagttttgactgattaaattaagcattggctcattccttatgaatagtatggaatgcaaacattcttatttcatggcagttactcatgaatatttcatgtacccaaaacaatatcggatacatcagaggtagttagtagtcattcatttgcacacatggaacaattgatagctgtataatgctttatttaatgcattcttttgtaaattctagttctgtggtaatgtccccctttgttattcccagtgctgaacatgggtattcagaaattagaaggtgatcagaatagggtaatcaatcacctgcattagtgacctagtttgtagtttaaaatcagtttccatgtgttttctcttctgctacctggtataatataacttactgagcctcaccaaagcagaagaaacacactggccttaagtatatggactgttattcattcaagccccgttatgttcatatatttgtttttacaaagcatgttattcctagagcaatctttgtgcctatagcacacagaggcgtagacttcagctactatgtaatacatactcagcactgacttggaagttacagtaggcttcatggtttacgtattcatacgtttcctggttacctggtaatatcttgttacctgggggtgaccacagtgaagcatcacagccttagtattcagcacaaaaaatatgcagggaaggaaattaatgttactcagacattccctggcattcatatcagggcttgatcaagtacaggcaatagaccagtgtgcctttttcttaccttttgaaaaggatttgcaactaaggaatatgcaactaagaccatgaacccacaaagcttcaggtacttagtctgatgccttataggaaaagctctacactttcagataataaccatgtataattgccaatgtgctatgagcatgttactttttcatcctgtgtcatttaacttccctcttacagaggaagaggaaggcacgaaaaagattaagcccgttaagtagtccttagagtctctcatcattaattttaaaggtaggtattagacccaggagttcctttggtgaaatgcaccaaattactcggccactactatgagcagggagttcagacctcattttgtccccaaaccattattagaaaaccataccctgctcacctaagcccaaagaaagaaggtgacactggctggtgcttctcagagggttggcacatctgcatattgcttgtctaattcttctcattggtctggaacaactctttatattttctctagatagcctgacattgttttccccctaacaacctgatgctttccttttcttgtcagcctagggcttctgaggtagggaggatggcagtatgcatatctgtatgcatgcttattcctagggaagtttcaatagtcaggctatatacactggctggatttagttccgtctcaagtggagcagatgtgaagagaaatggaagttgtaaaacatcaacaatttaacaaatggctaagacccagtttaaaacagacccttgcacaatactatccagctaaaaacgtattcctttatgggcaatggcaacaatgaaaaattacatctcaagtgaagacagcttaaatagaaatataagaaatggaaagggatgctggggttggggggcaggtctcatcttcgaatttcccttcttggtcttggggatagaaggatagaaatatccttccagagttctgggccataggcctttatctcttaaatattctgtccatataggattgggtccttaggtcttatgcttggacttagctcaggttttgtgtcttatgacatacgtagttccccgctcttggaagtcacaggtgtcctgtagaaacagttcctcttctttgggttgtcagcattctgtccagccagctcaagacgggccatctgtgtattttggtccttttaaatctcaagtcgcaaaacttctgtcttctacttgggcgttcacttcagagccacttgaatcctgaccggacggaatgatgtattttgtcttagattatttctcagggcagtctggtgtgaggaacggctccacgggtgacattctggacctattgggaaggggctatgaagctcctctcacacatgacacacataacacacatgcacacacgcacatgtacatacaaagaaacatccaagaaaggattactttagaatacaagagagacacagacttgtaaagagatgaaatgctcaaagtgaacagaaaggaggaaagtagaagatagaaacacaagcaaacacaaagcaacagaatgatgctgagataagaaatccaccaatagcaaagagacacaaatacaaaagaaaacagagaaagtggcccaagaaaggcagggaagaaatgtaaacaagaattcactaaggatagaagcagcagaaagaaaactgaaatggactgacaaagagaacttgaacaaagaacaagtggggtgagcacaagaaaaagagagggatgcatgcaacatgtgacccaaaggggagtcacgaaaggcaggagtgaaagaaaagctaagagaaatagcaaccagatagataaaacagagagccatagctagtgaagacaaagcagaccacacaggcaccagagaaagtgaaacaaagctcaaagctctgcaagaaagaacatgcaggagaaacatgggaataggtaagacacactgcagacagaaaagacacacaaaggaaagaaggagacatgcaaaggaaggaagaaatagatgtaacaaagaattagacacacaaggaagaagtagatacacaaaacaaggaagacatagacacacaaagcaaggaagacatagacacacaaagcaaggaagaaatagacacacaaagcaaggaagaaatagatgcaacaacgaattagacaacacaaggagacatagacacacaaagcaatgaagaaatatatataccaaagaattagacacaatgcaaggaagaaatagacacacaaaagcaaggaagaaatagatgtaacaaagaattagacacaactgcaaggaagaaatagacacacaaaagcaagaaagaaagacacacaaaagcaaggaagaaatagatgtaacaaagaattagacacaactgcaaggaagaaatagacacaaagcaaggaagacagacacacaaagcaaggaagaaatagatataacaaagaattagacacaatgcaaggaagaaatagacacacaaagcaaggaagaaatagatgtaacaaagaattagacacaactgcaaggaagaaatagacacaaagcaaggaagaaatagatataacaaagaattagacataatgcaaggaagaaatagacacacaaagcaaggaagaaatagacacacaaagcaaggaagaaatagatgtaacaaagaattagacacacagaccaaggaaaaaatagatacataaaacaagaaatagacacacccacaatacacactaatgattgatagtaagcaaagaccaccagaaagagggtaacaagaaacagggaagggcaaagaaaaaaattgccattagtacactgtaccaggctatcaacgttaaacttaaggtttccttaacataggaccataggacacacccgtcaactcttccaaatggcctagtcatgcaactccagggcatatttgccaggctctgtactcaacactttccattcatgatttcatttgaccttcacaaacagacaggtcttagcagaactaaattgccaaagggcatacatctaggggatattacatttaaacacagaatgaacatctcaacattctgttacatggattaaaagcttctgtaagcagcaaacactataagcgactgcatatttaattgtcagcttcactctcctcttctattaaaaaaaagggggggcttggtttttacatccttcacaagtctaatggctgcttcacagatggagataagaaataaactatttaaagcttttcaatgtttaagtctgtaagaatggtagggcaccaagccaaaacaaacaacaacaacaacaaaacctagaagctaaattcctcttgtgatataactggtaagcagataatagtttgagttgctgctgtgaggccatttgataacgtgaaagcctgttcatcttccatcgtgtacatggccctgcctcacattatcacattagatgctctccacccagcaccatcttccagcaaatgcaaatcctcagaagactgcaatgctagtgacttacctcattctattgcttttaagatgctgcagtcaggcatgttgatcctcgggtcatttataaagctgccttccttttgtgtgttcacattgcttgatcacgctgaagacccagttttctgtgctgctttggggaagggtaatatttggtagatggcactacaaagaacaaaagaagctgtatgaatgccaggaaagaagtactagaacatcctggctctttaaattctgcctaatgatagatacttctgtatcaattccagccaggtttccatttgtagttagaggcattcatcatcagtaatgttagtgatggctcagtggttaagagcacctattgctcttccagaggtcctgagttcaatccccagcaaccacatggtggcgcacaaccatctgtaatgagatctggtgctctcttctggtgtgtctgaggacagcaacagtgtactcgtaaatagctaggtaggtaaataagctactcacttgtgtattatatggcatgagtagggtagcagtgcatcttgaagtatgtaaacagctggcaaagctttcctagcttctggagagagaaccaaatagagcagaatggcttcctcgaaggtcagtgccactattgcagcagcttttctcctagaagaaacatttgcactgtttagttacatttcccagatgtgggaaaaagataaaatttatgtatatatctcaagtaaaaggctgactttaatggaaaacaagatcaaagttaaaattattacactgttgcagaaaacttacctactttgatgtagggtggcattctttgagcctttgtcttccttgctgggttcaggaaagcgtctcactgaaatctgggctaggcctgttgcccagtggtggtgagctattcccctggaggatcctcatgccccatctccacctagggatcgtcaaagggaataggtcgccagcactgcaaagcagcaagcccacaattctggggggagatctggaaaagaggtgaaagaaaagccaattcttgaaatcaagaatactgggaaagttgtctcattatgtagtaaccagcagttgtgttaaatcatggggaggggcttggagagtgaacccttcacatttgtagatcttagtgttaacttagagacatgagaattgctccatccaagttctttctggcttttattctgtcacctaccaatgagagatcctttagattataggttgtgttaaagtccttgtacttcaaatactctgggaataaaggggttaaattattttcttcttttaatttgtgctttaaacaataccatgccagaacactggcaaggtgaatagcattgtttggctcagtgcttatggtgcatatgtccctagaaactggtgtagcattggacctctgagtttgaggatattcagagaccagaattatgacaggcctacagaatgtgacaacagccatatctacttactctatcaagtacaaaagactagggtgtcagaaactggccttcattcctctgataacctaccttttaggcatttcagagcagaaatgttacagattggtcataacatggtggggatgatttcaaggcctcatcataaggcaaggatctcattggctaactgactatgccaggggaccaggagatggggagtgctttattgacttgccccctcattctctgatgaactggagatcagatagaaacccccaaatagcaaattctccaaagtacctttttttctccatgtggcctgtaagctttttgttcagagtagcgaggacttgaagagaagttctgctgagatgtaatgtagctgtataggctgctggcagtccttgagtctcacatagggattgtttgtccctgtgaagaaatacaaggctatcattagactacaaaaattgttgaaaattccacatgaaaataatgaggtatttacttaggaggtataacttgacacattagacctttaagggaagatactatctcagtcaaccaagtaacggaaatacctttgggctctctccagcactcttcactcctctaaatccaggcaatccttcttcttgaggcaggagcacaaaacagactccaaattcatccctggaaaacaaatgataattatactaaactctacaaatgataatttgattactagcaatacaatcttcatatgcacatgtcagcgttttcaattggtggtaagaactcagggtgaggatatgttctcatggaacccctagttcttaagagatgtgaaaacagcctttaaaattgaaagcatgtctacatttcaaaggcctttcatttcttttccctttttgtatatttgagtactctatctgcatgtatgcctgtgtgccagaagagggagtcagacgtcattacagatggttgtgagccaccatgtggttgctgggaattgtactcaggacctctggaagactaacagaaccatctctccagctctcgtcttaagtgagctttctcttttcctgttttatttaaaattaacaaaactttcttatgactacacaaatagagccatcttcccctgggatgagccagaggactaagtaaggggcaggcagaagaggttcactggactgggagagagggcacaggttggacagtggctaggttatatggcagtatgcatacaaagacctggtctggttctgccacagggctttgtaaaatcagctggcaaaatccactacttccacttcccaccacttaatgaaggtgtacattctcaaattcacttgttctacagggttctttgtttacaaactcctaagtctgggtcaagccattggacagcttggaagaaagctcattcttctttttttttcaagacagggtttctctgtgtagccctggctgtcctggaactcactctgtagaccaggctggcctcgaactcagagatccgcctgcctctgcctcccaagtgctgggattaaaggctcgagctaccactgcccggctgaaagctcattcttaatgtatacagttcaggcagcctgaagatggtgatggcgagttggtggctttccattacatgattactgacagtgagggctgggtcaggacactaatttggggaactctttgtattccatcaattatggggaccaaagatggcctccagatggttttgtgtgatggcacctcctaatggacatttcaatcacagacaagctcatgttccagatgtcctactacaaataagtgtgtattttacagtgccgtggaggtcatgtaggactaggttgccatgacagaattggccctgattaatgatctgcctgctcacacaacttgatcatttcaatagggaactgtcagtgatagtgggtttactgtgaatagcagcagtaccagcttcctccaggccactaactggagtctgagtcctaatctctatttaggtccataggaggcaggctgaaagctctaggtgcctaggcaagcctgggggggggggtcactttgcatgtactggggtgggtagccaatggtgctaaggtgagaccgaagctttagctaactgtcttagtgcaccaaacacattctttagcatctcaaaaagctttttttccttgcaaatgtttccttttgaagcagttacttgtacaacaatggtcctagtttcctaaaagactcaatagttctagatgtattatcacctagagagccagacaatgctaagcctttggagttgggggaaacctgctgcgaaggaatttacagtggacttaaaagggttaaagtactagagggtcatttgcacgtacaaaaggcaaatgcaaaaaaatgttaagtgttatggacaaggatgttttttcagctagaccattttctacacaggagtcaagtatttgttgttttaactgaaagtatctgttgaaaagtgctggcaggggtccagtgtggcacccacccttaatcccaacactctaaactggaggcagaggcgggcggatctctgcgggcggatctcttgagtttgagttccaggatagccagactacacagagaatccctgtcacaaaacaaaacagagaacaaaacaaaattaattgattaattaatgaaaaagaaaaatgagcaaggagggtacataaagtagtccatagtaaaatttgttcataaaacttatccttctttgcacttttgtaaaaaaaaaaaaaaaaaaaaaaaaaaaaaaaaaaaaaaaaaaaaaaaaagattgtaagctatgaagttctctgtctaagctgttagtgccgtccagtggtctgttctgggcagaaatgcagtaaaaatggttgaaagaaccaaattatcaaatttatattcccaattcctacacaagctcatctcttgctacccttggcgtacagctaagcataatgcatggagtctttcactcttaatattctttccatgcttccaagaggtagatagaaacagatggcattcagataaaccaaccagatggtactaatagtcgtctggaccaacaaggcaaagtaagcacacttccctctttaagaagtcaaatttcaaccccagtagacttcctaaaatacttaaacaattcacacaggcagtacatttcctaaaatgatctcaagtgtgcttatattacattaagtcttaaataacataatcatctcacggaagaaattttgtaaaatatcatcgcttctcattttagtgtaccccagcataatggcgattgggtacacaatgtgttaattctacaatttcgttggcatactatgtgttgtgtatggataagctgagaagagctagtgacttattagtcactttgacttttcagtgggtggcacagaaagaaactcgaatgagaaaaagatagcttagtagctaacaaggtagtacttactgtagtctaaacagccagagtctgatgtaacggaggagcagtagttcaagcaggatcctgcactggatgagttacttgaacatcctcctcagaaaaatagtatcatttctcagtaatgctgggagaactgctgttgtgatgattattttcatcagcaatgtcatatcaaacactcagcagcgggatggcaagatggcacgcggagggtaaaggcacttgctgccaagcctgatgatctcactttgatctccaggacccacaagatagacgaaccagctcccattgttgtctgagcaccatgtgaatgaatgactgcgcgcagcaacatgcatgtacacacacacatacatacactcatacacaatagctcccaaaaaagacctaagtactcggcggctacaaagcacccttcacactagagaaagctcttttcttactaggaaaatctctctttgaagtgtacgtttaaaggaatgattagatcctggcagacatattttaaaatgtaaagtggggaaacaggttctatcatctctaaaataaattcccactttaggaattttcaagctacttcaaattattgccagagtttaatggtggatagaatgaattaattaaatgtgatggcctatataattttcaaaggcgacttgacatgttctcaaatttaatccatccagtcaccttttaaaaataagcaaggactggtgaccaatgtcagacaaaatataatgattagaaggcttaggtcatcttccaaaaagttaatcatactaaaggccacacaaagattgactttttcgttttgttaaacttgtagtaaagaccaagcaaagatacttgtcttaaacattctgcaatagttgcactgatctttccacagactcatcaccctcagtacactgagacactgcttagtcttcagaaacatgacacaaatggctatttttacttcacaaaagctaatgatctcacagtcaatccaccttgcaatccaaatgcctttcttaaggaataaaattatcaataacttttctggcagttggtcctgtacagtagcaatatacaaaatcgggcttaaagtttcttaagcagacagttggctccttcctggaggaagaacggaaagaaaagtgctaagcttccttctcaggaagacaattttcagttcatactgtaaaggaaagccccaagtaaaaggtggcaatccaactccctgagctacttgcctgcaatattttgcacaataaagcattaataaaggtaggcaagaatggttcctggccctagaatgtgccagcagttggaattggaataatttagaagtgcaagttaaagattgaaggctcatccacctagttttggcctgcttttgctattcagtgtataaatacaccaaaatttattaatgacacatagggtgtttggggtaattaacattacccagaataatgtaagaattcgaggtgtctctgttcagtgggagcaaggagaaggcaactgagacactgtagccatatgaagtgagtaaactggtgttgttgactttaagtcaagagaagggctttgcccagtcaatactgttcaaacaaagaggcaaaagggatggcatgatggaattgagaaagggcacaaactcttccttaatgatgggtttgtgagaattagtgattcagaaaagtggtcaatggacaaactagaggccgggcaaaaggaacactataaagtgtgagattgtgactatttaggattgtatatattaaagcaatgcaaaaagggtcgaaatccgggtcattgttgggtgtacatactgctgtactttattatatcattgggaaactagcaggggatttgctcaagttggagtagaaaataaaccatccagaactgccattgtgcctattaagagtcccaaaatcagtttaaggaagagagcaggtcattcgtcagagcccctgtgctcattgacagtaccgggtagtttcgggggctcagcaacctctgcaataatgtaaaggggacaaaatattccagacattcatagttataaatacgcataacttagcaattaattctgggactcagtagccttgatggtatgcaaagagagcacacaggtccttgacatttttgcatagtaatcatccaaatgctgaggttactaatagttactaccactcagcagccccagtcaaaaggtaggcatttcagaacctttgctgccgcacaggtcatatgtgtaagggtacagattaatattgacaagagaagtgctcagaaataattaatatgcctctggtgtcaaaagagtacaaggatgtaaaatccaactccaaaggtaatgatggacaactaactgcattaatgcacttaagtccaaatgaagagcacttcgtacaaccctctttctgctttaaagcggagaagagggtacagtagttcttagagaagtgcttagacatgtgaactttccaaatgaaagtcttgagcttattatcacttcctgctgaaggtgctaaggaagtgagtgggatcctttcaagtgcacagagcaggtggcagtgcatacgcatacatttaatatatgataacagtccaaaagaatgcggccttgttgatcagcatatcctgatatagtgcaaatgaaaggcgaaggagtatggcctttgtttactggcaaagacaaaggaagattcactgtatattaatggtccactagcagggaccttgggagataaacggtatcccttgcaggagtgcaagagatacaatggtccgaaaagtaataaggttgtggataagtgtaattttacacattaactggccaagtatttttattaaaatgaatggatcatgtccctgttatatacattaatgttcaagggacatgttatcaattaaaaaccccatcctttatgcaaatattaagtctttaaagtaatagtcctggaaattaaagagtggaaaggaggggacagccttatccagtgtccaggaagatgaagaagccaaaagattagtgacccttgctgtactgcaaaagggtttgagagtaggatcgtatccaaatggaatgagatgtgtgcagtaaatgcatactaatatgcaaggtacatgtttatggccattacagttttacgctgttcaggtttccttctgtagtgaacagaaaaggcctactacaatcagtcattattattagcaagccacaaaatgggaccttataggtcaacaccacttctgtacttcaaagttaagagtaaaattgatcctactaaaattgccagtatgtacataaatagtttgaggaaggggtttcaagtgcacagcacatacataattccataaagcaaagaggatatgaatgatcagagacagaagtcttaccttgaaggaccattgaccgtattggaatcgtttcaatctatagtctcatgaaagaagctttatattagtgagcctctttgctttgctaagtacaggagtcctgatctaaaaggcacaactgtggacatgagaatatgtacaatagagttaacactgtgcacatttactatgttaaggatcttaaatactgctgcaatacaaataagtcttcaccagatgcagattactacagtgaaatgacatatgcacattcacaatatgaaagactgcatgcagggcatagtggtaggaaccagatatgccaacacttgttaaacgcaggctagatcctgagctcaaggctagcctgggttatatgctaagttccaggccagcctggaagttaaaaacaggacagatcaaaggtcttcttgattaccaacaaaatgacttgacttagtttggtttctttatccaatgcttaggaagagggacaaatgcagctgtgcacacaacaggcacaaatatgtttacattacaggtggcaatgcctgtaagtcccgcccagcccaggctacataagaggctgttctctcaaaccaccacacggtggggctgtagctctatgacagtgctttactagcgtacacaagactcaaggtttgattccccagcacagcagaaagaccagaacagagaagtggtctcattggttggcacccttgattgtcacccattagggtatgagggtatgggatcttggttactaacagaaggggacttgaacaactgcaattttgcacaattgtgtaagaggcattaagtaatcagcaccctctttacataaagcaagggtagtattaggaccttgagaaaagactcaattcctagtcaggattatccacataaaatgttccagtgcagaggtttttggctgaaataagaaagcatgtgagactagtatacaatatcatgagcaaataaatgtatctccatcagttagaaagatgtgacctggggcgatagcacccatgacagcatgccaacagtatatagtattctaccccctttaatggccaatgccttgaaaattgggactgagcactttaactgtctgataacagacctgtgtttgcccctttgctaaatgcacacagggctggactagctaaagtctaatccaatggacaaaatatttctgacagaattattcagtactcaaggtaatacatgagaaaagacgactgaacactgcttagaaacttgggactgtgactactacagcaatgacagaatggttttctttccttaaaggaaaggagacttgagagatgatacctccatggcaagtctctgatataaaactcttgtttgattggtgtatcttgattaacatgaaggacaagagttctttgtttacttgtccatggacaagtaaagtaggactgtatgcaaagtgaaattccatgactctggaagtcagtatggagggggtatggggtatagatgggctcagtcttataggctgagtgatgggcactgcattttagcaatacgattctatgcattaagtgaaattccatgactctggaactcagtatggagggggtatagatgggctatctcagtcttataggctgagttatgggcactgcattttagcaatagaaatctatacattatgtgaaattccatgactctggaagtcagtatggagggggtagagggtatagatagggatatctcagtcttataggctgagtgatgggcactgcattttagcaataggaccgtatgcaaagtgaaattctatgtctctggaagtcagtatggagggggtatggggtatacatagggatatctcagtcttataggctgagtaatggacactgcattttagcaatacgattctatgcattaagtgaaattccatgaccctagaagtcagtatggagggggtatggggtataaatgggctatctcagtcttataggctgagttatgggcactgcattttagcaataggactgcatgcattaagtgaaactccatgactctggaagtcagtatggagtgggtatagatgggctatctcagtcttataggctgagtgatgggcactgcattttagcaataggactgcatgcattaagtgaaattccatgactctggaagtcagtatggagtgggtatagatgggctatctcagtcttataggctgagtgatgggcactgcattttagcaataggactgcatgcattaagtgaaattccatgactctggaagtcagtatggagggggtatggggtatagatgggctatctcagtcttataggctgagtgatgggcactgcattttagcaataggactgcatgcattaagtgaaattccatgactctggaagtcagtatggagggggtatagatgggctatctcagtcttataggctgagtgatgggcactgcattttagcaataggaccgtatgcaaagtgaaattctatgactctggaagtcagtatggagggagtatggggtatacatagggatatctcagtcttatagactgagtgatggacactgcattttagcaataggaccgtatgcaaagtgaaattctatgactctggaagtcagtatggagggagtatggggtatacatagggatatctcagtcttatagactgagtgatggacactgcattttagcaatacgattctatgtattaagtgaaattccatgaccctagaagtcagtatggagggggtatggggtataaatgggctatctcagtcttataggctgagttatgggcactgcattttagcaataggactgcatgcattaagtgaaactccatgactctgtaagtcagtatggagggggtatagatgggctatctcagtcttataggctgagtgatgggcactgcattttagcaatacgattctatgcattaagtgaaattccatgactctagaagtcagtatggagggggtatagatgggctgtctcagtcttataggctgagtgatggacactgcattttagcactgaatcaatgaagattcgaatttctctaagtagaagtgggcttgggataggtctgaaagtatctgggcctggggctaggactgggctggggcagggctggactggattgggttggttgggtggggcaggggcaggggcaggggtaggggctggggctggggctggggcaggggctggggcaggggcaggggctggggctggggcaggggctggggctggggctggggcaggggctggggctgggcctggggctggggcagcaatagcagcagcactatttgctgagtcttgaggagaatctagatgccataaaggcaagaacacacagaaagttgaaatgtaggccttaatattactattataacagtaagtctgatagaggacacagagcattacaattcaaggctcttgctgacaagtaaaaccattagtcaatatagcatcaacaatagcaacaaaagcaaagcctgaactggtatagaacctcaaatactcctgacatccagtcataatgttcactttacattaacagtatctgtgttataagacttaaaaatttgaagagtagctcggtggatgagtttgaaagaaagtacatttaagtgccaagtaatttgagtatcatctgccaaaaaaattattgaaaactttaaggactccaaagtaacaattcactaaaggtaattaaaatgaattcaacaagtaagcaaatcgtaaatacattttgaaaacaatcacttcggttttaaattcaaacactagcaaagcacactatcagacgtgtcgttggcatccaaaatattcattgaaatcaaaatgcaaccccagcaatagtcatggggtagattttggaagaaggtaggattctacctcttcaccagtgatttgtgatccactatgactctggccaaagtcaccacttatacccagtaggcttagagaaccgcttgagatcagtgctggctaaatcagaggccaaggtgtaagtagactagccactgaacaatacaaaggaatggaacgggctgagttttagtttgcaccgccacgtatagagcactgtaagagactatgaacgcaagcggatgagtcaaatgtccttgaaatggccttagatacttttctttcttttaataggtgaggtttcaatgatttacatcgaccaagaacccgcagcctcggtctctcgaatcggatccgacatcatccaacacttcagtgttagaattgcaagcatgcgctctcccgacctgggcaggcacttcgaaaaaatgatgactaaagacacacgtgaagtaccaagcgaaactcacgtccttatgggacagtgactcatcacagtctaattccatcctggccaccaagcaataatgcacatttctaactggaagtcaagcaaacaccaacactttcacacttgtgcccatttctgacgagttacgtcaagtggcaaccaacacttccacttagccttgcctcagcttcgagtggcacaaggtaggaccaaccacaccctaccataatgcaccaagtgtaccctcgggcaaagcccgccaagtagctaaagcccgccaaaaaaaaaatcactgaaagaaaccactagagggcaggtcacatgacttccgccatcttagacacattcaagagcatgtgccacctctccaggctaactcagacatgaagctgacatgtgacacacaaagccctttgcgttataccgcaccaagaacttgagccgccatcttttcctgtacgacctaaatgtcctataatccattgctacacaccagaacaaagattgggctgtcgagcctcgggtggagcccccgagccgccattttatagacttctgagcagcccttaaagccacgggggaccgcgccaggggtccatatgcacacacaccctgcccaatccccacacccacgctgagccctatcccctagtcctctgcggcttccgcgcaacaccgcacactaatacgagcactccttggctttctacttccggctagcacaaccccgcaaatgctaccacaaatcaaggcgaatcccgcaaccccgcacatataaagaaagcctttagctagcgcagcgcaattggttgcttttatccagtccgctgtgctcctcggtgtcctaattcttggcgtaactggctcgagaatagccgtatcacgcagaagccataatggcggacgcgggctctccacgccctgaacacccactcagtttaagagcaaagtcgtttttctaagccataggttcactcacacagcaccaaacgatcagcagcaacagtacacgcaaataagaggcatagatattccaggtagtgcaataactcacaaaaccatatttccatccaccaagcgccccgttgggccgtgaaaaaaaaaatttaaagcaggtatccacagccccgatgggcaaaagaaaaagaaaaaaaaataataacagcaggtatccgaggccccgttgggcatgggaaaaaaagactaaacgcaggtatccgaggtcccgatggaccgagaaaggtttttttgtttttttttttttttttacaaaaagcaggtatccatggccccgatgggctaaggagaagaaaaaaagaataaaagcaggtatccacagcccagatgggcaagtttagaaaaaaaaataataagaaaaaaaaagaatgaaaaggcaggtaagtatccaaaaccccgttgggcatggaatggcggggaggacacacaggtatccgtggccccgatgggcaagaatatataaacaatgaaagaaaggtaagtccaccatacacacacaagtatcaaccaaaaggcacaacaaagaaatattccttaaaaatgaaaaattgactgaaaatattacaaatatcaaaaagtatggaggacatgtcaaaaaaaaaatcttaccagaacatatcaaaacgtcaaaaatctcgtggaattttgatatgttttcttaaataagccataaggcttggtggtaggggaactaaaaatgttcccccaaagctccttagatggagagaaaccacggaagaaccgcacatccacgggaaacgagcaaacatggctggagcaagccgttgcacgcctttaactgatccgcggcgctgaaggcggagagaccagaagaggagtggccacaaagattgcaattctgacatcttattggacctttaggtctaactatattataaaaaaattaaaatgaataaagatggaggtacgtaagctcagtgacatgacgcgtgaatttcattattttgcgcgataatgaaggattatcctattttacagctaaaaacgtttatgtagaacttccacataaacattaaataatgtacattaggtcacacacctgtctatgcaaaatttcaatatatcttctacttggacaaaccatgtatcgctccgcgtcttggacactagaagttcttctgcattagttggcgacctcagatgaggagaggaaagggtagaaatgcctcacaaaatggctccttggttcctaaattatcagagtattagttgtgaccgatttggtgggcttacgctcatagttttgggtcattggcatcttagtctttctctgggaacctggtgactccataccttgggacaaaaacgcactgaagtacgttactcgctagcagtaatgaaaaataattcctaaatgccaaagcaaagcctgagggaataatagctcattggtatcttactcgccccagagacactgctaacttaaaagaactgtcaaattttgttaactgtcaaactatgaatatccacatgaaagagatcagacaccctgggtattagaaaatcaaaggatattgttgtctcgttgattcacgctgacaaataattcacagtctgttctaagttccctttaggcgtcccatgaataataaaggacacaaaattggtttgcttatggacgatcaaagtgccagcaattcactaatcttactattgaggtggttcaggtagggatggaaaaatatctgctacaaaataaactgtttcaacaaaagaaaaacaaattaacaagtaaataaatgatgcacacagactgaataaaccagcaggtggcagcatgaatctttccaaggcatctgaagccaaacttggagtgcaaaaggattcctatctgaattgagaagtaaaggttactttgtctaactttagttgacagagcgatcaggatcagagtaacaagcacaccaaaagcatcaccagtgagaagtcacataggacatattagggaaaaaagacccaaggaagggctcttcacagctaagagcacctggctccacgatggatatggctttgtataaacgagaacttctaaatgagctgtacaaagagaatttagaacttgcgaggtactggtcacagattatgcaagccagtgtatcatttttgtggggatgctagagagaatcatcaaattaaagagttaaatttagtctctgtgttttacttagtcccaattcttgcaaacctcatcattctttctcacaccgtgtacatcaaggtatgtcaggtttcggggacactttttagtcttatcacaagaaagcatgaagggatatgtgctaaaactcagttcctgggctggagagatagctcagtggttaggagtgctgactgctcttccagagggcctgagttcaattctcaacaacttcgtagtggctcacagtcatctgtagtgggatccgatatctaacctcttctgatgtatctgaacagtgaccgacagtgtactcacattaaataaatatttttctaaaaaacacctccattcctgtacacttaactaggtaatttattgcatattctttgtttgtttgtttgttttgtttttcaaggcaggttttctctgtatagccccagatgtcctggaactcactctgtagaccaggctggcctcgaagttagaaatccacctgcctccacctcccaagtgctgggattaaaggtgtgtgccaccactgcctgcctcattgcatattcttaacattaagattaaaaatgcacctggggtaaaatagtaatcttgaggaattctccatgcaaattcaaagaggagaagaaggaagaacaagatgatgatgataatgggtcaagaaacaaggacccactacaaagcagcaagaaacagaaatgggagttaagaaatggtcttccaatgtgcagagagtaagagactttagaacacttggtcctagatgagatgtcttcatcaagccctttctttcaatgctcaggcatctatgaagataaggagtcagaaagactgcagtaaatgactccaagaaaacaccatccagacaaaacagcgcagttttcgttttgtttttaagaaaatgaatatggatttggatgagtggggaagagttggaggaaggaaaaatgatcaaaataaatcatgaaaaatggtttgtttttttaaaggaagggatgttcaatgacactactggctctgtgaacagagagaaagttggagccacaactataggtagatcaggcatccagtctctccaggaaatctatatttttttcaattctaacgtatattgggagaggggttgatctggtataaaatggttgaagaaacactcccaagttcatgaatcaacataatattgtctaagttgcatcaaaaacccatctatggatttagcgctatactcagcaaaattctaatgacattcacataaatagtttttaaaaataggtgacatggtaagtagcttatgcctgtgaatcccagcccttgggagttacaaggatgatcagaaatagccacatagagaattggagaccagattgagctacatgacaaagcttcaaatgaatgaacaggttgcaccacagcgtcaacatgctactgctcataggtaggcttgtaaattagtgggatagaatagaggacctggagacagccatccactactcaacaaaggtacaaacaccacatgtaagagacatacagtcacttggccaagtgatccttagcatagtggtactatctcaccctatacagaaatcaatctaccaaagatcatgtaagaacaatgactcctacagcctcagacattttatcactaagccatcaggagcggggaggaggtggcactactttagaagaattaggaaggacataagtcactagggagtgggctttgaggtttcagaagcccaagccagggccggtggttggctttcttcctactacctgtggaaccagatgtcaaactccagtactatgtcttcttgaatgctgacatgctccctaccatgaagacaatagactttaaccctagaaaatattagaaagcccctttacaatgctatctcttaaagtgtggtcaaccaggtggacgtggtgcatgtctttagtccccagacctaagaagtgatcaattatggtgcttaagactgctcttagattactcttgagatgcttaatattccagatgaccaaagttcaagatttacactcacactagacaaatctttactgcctgtaatttcagtgctaagggatctaaagatcaggctttcatgtgcaacttcacagactttatataagataacaaaaaacaatctccagcacctcataaaacaggcataccaacttataagttatagtaatagaaagtgaagagtccccagctccaagtcccggaaaaatatcaacaaaatcagaagaaaattttcccaacctaaagagatgccaccctttcccctggctggcagcatggaggctgaacgatgcctgaagtcactgtaaaagatgttaaccatcaggttcgtcagagcgctggcagccttcctcaaaaagtccaggaagctgaaagttcgggaatgggtggacacagtcaagttagccaaacataaagagcttgccccatatgatgagaactggttctacccacgagctgcttccacaactccggacctgtacctctgtacacaactgtagtgcaggagttggttccgtgaccaagatctatgaaggatggcagaggaacggtgttaggcccagccacttcagcagaggctctgagagtatggcttgccaggtcctccaagccctgaaagggctgaaaatggtggaaaagggccgagatgggggccgcaagctaacacctcagggacaggaaacacatctggacaggatcgctgaacaggtggcagctgccaacaagaagcattagaaaaaataatactgggttaataaattgcctcattcataaaaaagaaaagaataaagaaagagaagcctataaacatacaagaagcttatagagtaccaattatacccaaaaaaaaaaaaaaaaaaaaaaaaaaaaccaaacaaaacaaaaaacaaaaccctcctggcatgtaataatcaaatgtaaatacaaataataatgttttggagaagatgtaatgatccattccattaatacgagcacttgggaagcagagccatggtggatgggtctcagaggagtgtgaacttaatgtgggcctctgctgtagcagcaagtgttcttagctgctaagccatctctgtggcttcttttattccaaggactgtttaagctgacctggaattcactatgtagaccaaactagccttgaacttatggtgaacttcctgcctacaaagtgttgtgcttacaagcatgtgctaccggtcacagatataagtgataagtataagtgttttattatatataaataagtaaataaatacatagattctatatctgttcttccacttgccacatcagtttttcccctctcagctcatactccggattacatactccggtgttatagtcttggcacaggagcaggcaatgcaagttgatggtcacaattatgcaacctgaggaatcctcagaaccgcagagttctctctagttatatattgttgtgattcttgatttatattacagaaaacttaagaatgcttattgaataagatgaaggaaagatatgagtgggtattgggaggggcatggactgaagtccagcagtagtagctatatacctgatttgtttttttttaagtttctgttatttaaaggaagtattttataaccaaggttgagagagcaaagaaaacatttgttcatcttcccactctacccttgccttttccatttttgtgtgtatatgcattttgtccatagatgtggatacacatgtatataggttcatatgtatatgtgtgtgaatatataggcctaagtttaatgtcttcaatcatttttctaccttgtttactgaggcaagatcttagccaaaccgagagctcactgatatggcacgtcttgttaggcaacttgctctggggatccctgtttgagcctttcatagctgcaattataggagggcttcacatgggttcacgccttggggacttgaactctggtcctcatgcttttatggcaaatacttaacctctgagccatctctttagatccccattacatcattgaaaagtattgagtttttaaggtttatttctgactttagttatgtatatggtctgtgtgtgccctcaaagaccagaagagagcagcaaagcccctggagcggaagttataggtggttgtcaactgcctgatagtgctgagaatcaaacttggattttctgaaagagtagcaaatgtttgtaagcatcgaggtatgtctctagtcccaggtttgtttgtttgttttatttaaatgacgttactgagggtactggtgaggttgcaatatgaataaaagagatgtgattaagataaacccatggaatgtgagcagtggaggtgcacacctttaatcccagcacttgggagttagaggcagatggatctctgagtttgagaccagcatagtctaccgaggcagttccagtatagccaaggccacagagaaaccctgccttgaaaacaaacacaaacaaacagaaagagtagataataatacatttggggggctggagagatggctcaacagttaagaggattcgctgcttttccagacgatccaggttcagttttctttaaagaataggccactggcagtttgacctcacgagctaataatgttttatataacatggagtaacttagagtagcataacctgatgacaaaggtggtcaagtggtaagagccatagaagggttcaacgaccctgcccctatcgctggagtattgagatttaaactaaaaataggagagacatttcaatagagaacaaggagtacccataataagtaattttcgcttttttcccctgccgccaccaatttgcgcggaggcagaagctcaggtgcgttcaagattcggcgtcacccataatccaccgccatggccgaggaaggcatagctgctggaggtgtaatggacgtcaacactgctctacaagaggtgctcaagaccgccctcatccaggatggcctagcacgtggcatactcgaagctgccaaagccttagttagacaagcgccaagcccatctctgtgtgctcgcatccaactgtgatgagcccatgtatgtcaagctggtggaggcactttgtgctgagcaccaaatcaacctgataaaggttgatgacaacaagaaactaggggaatgggtaggcctctgtagaatcgatcgagaggggaaaccacggaaggtggtcggttgctgttgcgtagtggttaaggactatggcaaagaatcttaggccaaggatgatatcgaggaatactccaaattcaataaataaataaattgtagctcattatgaaaaaaaagtaattttcttcgaggtgtagcctgactaattattgtgtcttgtggtactgcaagatagcccagagaaaccctcatcttgactggccatggtagcacatgcctataatcccagcagaagaattgctttgagcttgagaccatactatgtcttgagagagttcttgtttttttaaagggtggctcatgtttgaagcataagctgattacttttgccttgcatcatggataactgccctcatatggaagaaggtctgtcctgggaggttttgctcttggagttcaacatgactaaggatgaatgaaataatttaggaagacactccttctgttattaatatgcctatgcacagtcaagcaggagtttgaaatgaacggaaagacagactcaaaatgaaggcagagactcaagtctttaatcctgtggttggttaccttgtgaagccaagtaggccatcaatacctttagcaaaagcactttctgaaaacctgttctaacaggacataaatttctaacaacagtgcaacttaaattgtaagaaaacacaggactgtttcaaagactgatagcatgttgtttcctatgtttcatatacagcctcatggtttgctttggctttgctctccacccctctttcacgtggtctcatgtaattcaggctgatctggaacttactgtgttgctgaagatgagctgaactcctgatgctccttcctaactctctcaaattctggaattttaggcaagcaccactttgctcagcttttctttgattttcatttagaatattaaagaatagttttatttaatcccaccattcagtaggcagagtcaggaggatttctgattcccagtctggtctacagagcaagcttcaggacagccagggctacacagagaaactctatcttgagataccaataaagaaagaaagaaaaacatttttcttggggctggcaatatggctcagtggtagagcaatggcttagcatgtaattagaaaatcatggattcagtccttagtaacacacacacacacacacacacacacacacacacacacacacacacacgggctgagtcttgactgcaagatggctcagctgataaggagcttacctcaaagcctggcagacaccctgagctccatccttggaaactatgtggtggacacatccatatattctctctctctctctctctctctctctctctctctctctctctctctctctcccttcttctaccccgccttggtctttctcaaacacaaaaataaataaatgtaaaatattgtaagaagttataggtcatttatataaagaaaattaaaggaaattaaggaaatacttttagatgagaatagagtataaggtttttatcctaaaactaaaagattgttcccatatggacaaaaaggggtgatgagggaaaaaaccagaaagttttagtctattgccaaaggcctgagtatgtcacaagaagtttgtagaagataaagtgaggcccggggaaggaaggagaattgggaatttacagtcattctctgctacgtaataagtcgaggccagcctggaataacgggggccctgtctcaaaaacagaagagcaacaacgatatgcatgcctgaaaagccaaatctttaaaaattagctagagtcacactttcctaggtacttctttcaacagttttgccacagacattagaatgaagttggaaatgcagacagttgggctcccagataccctgaatcaacttttatatttgacttttgttttttttaagtttataaaaacttttttttttttagaatttttatgtgtgtgagtgttttgcctgcatataggtctgtgtaccacactcgagcatggtgtcagaggaggtgagaagcctcatgcagctgctaggcattgaaccccagtcctttgtgagaatattaagtactcttacacaccaagccaactctccagccctgcttttggggtgttcaacaacaaagataagtagaaaccaaatacgcacccagagaaaaatcacatatatacaaaaagccagaaatttgagaggcaatgtgtgtgtgtgtgtgtgtgtgtgtgtgtgtgtgtagtggcgaggaataacataggaggaattggagaagggaatgggggagaatatgtaattatatttagattaattttattttttagtatagaatagagtttattcagggcatggggaggggagttaagagggtagcagaggcagggaaaggcagagagagagaaagagagagtagagaactagaggctggccatgagcacatggagagagggggaagggaatctagattaaaaatttaaatggggggggcaataaagtggttatagtcacaggagcatatcaaattgattgtcttggccatgggtgtgtgtgtgtgtgtgtgtgtgtgtgtgtaataattttcacaaacttgccatctcagagaaactctaggaggaagaaaggattccaaacaggcaaattctggctacagctgaggagagctcgcacaggaaagaactgcctgtaatggaatgaaaagaagccagggctttgctgtcttgggaaagagggaaaccagtgtaagggaaaatgtgctaccttctggagagaggacagccctcggctccatgacagctgtcccaggttgccttagcaaagccttcctcaagcagatattcactgaggccccttcggcaactttccaacatggttttacttaaatacacacacacacatgcatttacttcgtgtgtgtgtgtgtgtgtgtgtgtgtgtgtgtgtgtgtgtatacatgtttgcctgtgtagagagatctgtgtagagagaagtatgtgccggggactgaacctgcatcctttgctagagcattaagcactgttaaccactgagcactcgcttctgcccctgtgcctcgtggtgcaataggtaaaatgagaacttttttctttcttttttaaatggaagtgtagttctctgcctttattgataacccaagatccttttctaatttgtgtggtaaccagtattggtgtgaacatccaaaagccaaaggagttattgtcagcttcggccctgtgaggtgtccaataggaataggacaaggtataattctgtctttatcaaaaactaggggacatacccaggcctgtggtttactttgccacctagcctctgtgacatgtagattgcagttatagcagctacagcaatgctggcagctaaaaacacagaaggggctccgaaagagatctcgggagcaaaacacaagctggtcttctatagaaacaaaaaagaaaaaggaatttcggtgggggtagggggggggtggggggtggggggtggggggtgagggggtggcaagagaacaaattaaagacgggcaagaaacgcgggagcacgtgaaagatgctaacagaggcagccgggagaggaaccgcaagcgctcagtcatctgcggaagcgaccgcggacagtcccggtcacgttgctggagcagccatttagggacagcctgacagcgcggcgccgcgcggcacagggactgttcggctgtgacgcatgctctccgcccgcccgacccccccccccccccacggcaccaccaggcttctgtaacttataaaatggcggcgtccacatgtatacgtccttcccgggattagccaggcagctagaggatgacttaataaggagagtggagaaactggccaattaatgaacatgccctggtgagtgccgggtctcgcgctgtcagagagatggccgccgtagcggtcaccacgccgacccgccgcagcggtcaccactccgaccgcatggtctgccgagcgggacgagtagtcggcggctggcactccggatttctcccctattccgcccacaatagatgagtgatcagtgcccacatcaccggacctccacggatgaacctgtcaggctggggaggctcattcctaggagagatcgtgttttgaggtttccttttgttttcctttgtctaattggggtttgacggatagtgagtgtctccaaaatggagtgtttattctagctccccagaggcctcgaaaaacggcctcagttctttctcatcaacacttagtagttgataaaactagcttattggtaacattaattatggtataataacgctttttgccctatgccctttttatgtactccaaatgaggaccagagtatgttactaaatttgtggtctgggagcatctgttataatagggccttatagggtgatctgtgttcttttgttagatgcttacttggtcaaaaagacatttcagtaccttagctaggcattgctgaataaagtatgaattgttgcaaccatttggaagcattgatgtagctatatttagaaaaataaaaatatatatggagtaccaagttccaatatctggaactcagtagtctgactttcacggctcaatccttcagaaagagaagcatcagtatataaataaggatacctaaaagaggatgtctatgcagctcttttcttgtggcaagtgataagaaacaacctgtgtatccattaataggaggatgttttaaaagtctgtatattttggctctttggtgtaaaagatgatatgatagcttgttacattaaaaacaagttgtaggataatatgatctcatttttttcatatatgtatgagggtgacaaaggaatgtttgctatttttaaaacatttcggcagctttatatattatgacctatttaacacaaatgcaaacacagagaataaaatgaaaccctaatattagagttgacgttttgccatatttctccacagttgcggctcactcttttgtcatcccgtagattaagcatcatttttagtttagtaattgtgcttatttccccctttccccccagtattggttgtggaacctaggacactgtggtgctagacagtcacactaccactgaactatatctagatctgttcccactttaagatttgcttctaattgtgtgtgtaggaatgtgcacatgagtacagttatggaagccagaagaagccatagaatcctgtggaactcgagttacaggcggtcgtaagcccactttttgagccccttaatgaagtcttctgtagttgaggctgtccacgaccctcactacccatttctagctgccaagctttgggattacaagcttgtaccaccatgcccagcttgtctctcttactttatgtgtaataacccaggctggtcttgatttttctgcctctgcctcccaaatagctaggattataagctcagcttctccacttaatttttttgtgacatgaggatctaacatggctggtatcttgcatgggagttctcaatattttgtaactcaagtcccaggtggtccaaatcctcttctgacctccttgggtaccagacacgtgatgcacaaacacaaaatgaaataaatctcatttaaaattttaataaataaaaacaaaactaaaagtaataatttctatttgcataggatcttactaagaccagaatagtccatattagcaattaatctttattaattatagatacagggcaactgttgccactgcataaacaaaggaagctttgaacagggcattacgcgggcggctacactataagtcactttaaatggttctgcatgcaggcaaaggaagtcacatatttgaatcttgggaatgctatattctttgggacactgatggtacttttgaagagtaaacaatatagcgcccgagactcaaatttagaatgttatttccacttgtgtaaaaaacgttactgtgccgatggatctttctgcacagcagtggttcaggactttgattcagctactgaaagtcagtcagccaattatgagaaaagaccatatgtgtggtcccaacgagagggttatcaggacatcagtgatgaatctgacctttctgagatgtaacaataccatcacttaagttctatggagatttgaaggcaagaaacccagcaggttaggctccagtatgtgactggacatgtgactcccccaatatgacctttgtaaggctcaggagaaaaatatcctgctgctccacccttcgggtaacaccaagggctctgagactgtgttcatatcaatttctttcttgtgtttttgagacagggtcttgctatgtggattaggctggcctggaattcccaatctttctgcttcagacttgatccatcaaacttatggctattaattgactttcagccattgaactgacactgaaaaacaggcaaatatttcagtttaataattccaacattcagtacgtatttaagtctgatactaatacatgctggattttttaattttaaactgtgttgtctttattgttttgttttacttttctttctattgtcatataacacactgaccaaaggcaaagtagaggaagaaaggatttatttggcttgtacttccagatcattaatccaccactgaaggaagtcagagcagaaactcaagcagggacttgaagaagaaaccatggaggaatacggcttgctggctcacctgtgcgtactagcttgcttatacatcccggaaccactcacccagggaatgatggcacccatcaggccagtgtgatttgatcagtctctcagatgactgtagactgtgtcaatttgacagttaaagggcatgtgctttgtattctctctctctctctctctctctctctctctctctctctctgtctgtctccccccctcatttctcaggtttttttgaaagtcaagtatgatgtagccagtaaaaggaactacagtacataggcctgtagggctgtggtagtaagatacgtggtgatttgacatgttctgaatgtccctggttattctgtcttttactgcttgtgtgctcctgggttgtgaagtacaattgcccaccctcctaattatctctccccctccatgtaagtgagatgtgatgacgagagag

SEQ ID NO: 110 - DNA, 77441 bp, Mus musculus
ctctctcgtcatcacatctcacttacatggagggggagagataattaggagggtgggcaattgtacttcacaacccaggagcacacaagcagtaaaagacagaataaccagggacattcagaacatgtcaaatcaccacgtatcttactaccacagccctacaggcctatgtactgtagttccttttactggctacatcatacttgactttcaaaaaaacctgagaaatgagggggggagacagacagagagagagagagagagagagagagagagagagagagagaatacaaagcacatgccctttaactgtcaaattgacacagtctacagtcatctgagagactgatcaaatcacactggcctgatgggtgccatcattccctgggtgagtggttccgggatgtataagcaagctagtacgcacaggtgagccagcaagccgtattcctccatggtttcttcttcaagtccctgcttgagtttctgctctgacttccttcagtggtggattaatgatctggaagtacaagccaaataaatcctttcttcctctactttgcctttggtcagtgtgttatatgacaatagaaagaaaagtaaaacaaaacaataaagacaacacagtttaaaattaaaaaatccagcatgtattagtatcagacttaaatacgtactgaatgttggaattattaaactgaaatatttgcctgtttttcagtgtcagttcaatggctgaaagtcaattaatagccataagtttgatggatcaagtctgaagcagaaagattgggaattccaggccagcctaatccacatagcaagaccctgtctcaaaaacacaagaaagaaattgatatgaacacagtctcagagcccttggtgttacccgaagggtggagcagcaggatatttttctcctgagccttacaaaggtcatattgggggagtcacatgtccagtcacatactggagcctaacctgctgggtttcttgccttcaaatctccatagaacttaagtgatggtattgttacatctcagaaaggtcagattcatcactgatgtcctgataaccctctcgttgggaccacacatatggtcttttctcataattggctgactgactttcagtagctgaatcaaagtcctgaaccactgctgtgcagaaagatccatcggcacagtaacgttttttacacaagtggaaataacattctaaatttgagtctcgggcgctatattgtttactcttcaaaagtaccatcagtgtcccaaagaatatagcattcccaagattcaaatatgtgacttcctttgcctgcatgcagaaccatttaaagtgacttatagtgtagccgcccgcgtaatgccctgttcaaagcttcctttgtttatgcagtggcaacagttgccctgtatctataattaataaagattaattgctaatatggactattctggtcttagtaagatcctatgcaaatagaaattattacttttagttttgtttttatttattaaaattttaaatgagatttatttcattttgtgtttgtgcatcacgtgtctggtacccaaggaggtcagaagaggatttggaccacctgggacttgagttacaaaatattgagaactcccatgcaagataccagccatgttagatcctcatgtcacaaaaaaattaagtggagaagctgagcttataatcctagctatttgggaggcagaggcagaaaaatcaagaccagcctgggttattacacataaagtaagagagacaagctgggcatggtggtacaagcttgtaatcccaaagcttggcagctagaaatgggtagtgagggtcgtggacagcctcaactacagaagacttcattaaggggctcaaaaagtgggcttacgaccgcctgtaactcgagttccacaggattctatggcttcttctggcttccataactgtactcatgtgcacattcctacacacacaattagaagcaaatcttaaagtgggaacagatctagatatagttcagtggtagtgtgactgtctagcaccacagtgtcctaggttccacaaccaatactggggggaaagggggaaataagcacaattactaaactaaaaatgatgcttaatctacgggatgacaaaagagtgagccgcaactgtggagaaatatggcaaaacgtcaactctaatattagggtttcattttattctctgtgtttgcatttgtgttaaataggtcataatatataaagctgccgaaatgttttaaaaatagcaaacattcctttgtcaccctcatacatatatgaaaaaaatgagatcatattatcctacaacttgtttttaatgtaacaagctatcatatcatcttttacaccaaagagccaaaatatacagacttttaaaacatcctcctattaatggatacacaggttgtttcttatcacttgccacaagaaaagagctgcatagacatcctcttttaggtatccttatttatatactgatgcttctctttctgaaggattgagccgtgaaagtcagactactgagttccagatattggaacttggtactccatatatatttttatttttctaaatatagctacatcaatgcttccaaatggttgcaacaattcatactttattcagcaatgcctagctaaggtactgaaatgtctttttgaccaagtaagcatctaacaaaagaacacagatcaccctataaggccctattataacagatgctcccagaccacaaatttagtaacatactctggtcctcatttggagtacataaaaagggcatagggcaaaaagcgttattataccataattaatgttaccaataagctagttttatcaactactaagtgttgatgagaaagaactgaggccgtttttcgaggcctctggggagctagaataaacactccattttggagacactcactatccgtcaaaccccaattagacaaaggaaaacaaaaggaaacctcaaaacacgatctctcctaggaatgagcctccccagcctgacaggttcatccgtggaggtccggtgatgtgggcactgatcactcatctattgtgggcggaataggggagaaatccggagtgccagccgccgactactcgtcccgctcggcagaccatgcggtcggagtggtgaccgctgcggcgggtcggcgtggtgaccgctacggcggccatctctctgacagcgcgagacccggcactcaccagggcatgttcattaattggccagtttctccactctccttattaagtcatcctctagctgcctggctaatcccgggaaggacgtatacatgtggacgccgccattttataagttacagaagcctggtggtgccgtgggggggggggggggtcgggcgggcggagagcatgcgtcacagccgaacagtccctgtgccgcgcggcgccgcgctgtcaggctgtccctaaatggctgctccagcaacgtgaccgggactgtccgcggtcgcttccgcagatgactgagcgcttgcggttcctctcccggctgcctctgttagcatctttcacgtgctcccgcgtttcttgcccgtctttaatttgttctcttgccaccccctcaccccccaccccccaccccccaccccccccctacccccaccgaaattcctttttcttttttgtttctatagaagaccagcttgtgttttgctcccgagatctctttcggagccccttctgtgtttttagctgccagcattgctgtagctgctataactgcaatctacatgtcacagaggctaggtggcaaagtaaaccacaggcctgggtatgtcccctagtttttgataaagacagaattataccttgtcctattcctattggacacctcacagggccgaagctgacaataactcctttggcttttggatgttcacaccaatactggttaccacacaaattagaaaaggatcttgggttatcaataaaggcagagaactacacttccatttaaaaaagaaagaaaaaagttctcattttacctattgcaccacgaggcacaggggcagaagcgagtgctcagtggttaacagtgcttaatgctctagcaaaggatgcaggttcagtccccggcacatacttctctctacacagatctctctacacaggcaaacatgtatacacacacacacacacacacacacacacacacacacacacgaagtaaatgcatgtgtgtgtgtgtatttaagtaaaaccatgttggaaagttgccgaaggggcctcagtgaatatctgcttgaggaaggctttgctaaggcaacctgggacagctgtcatggagccgagggctgtcctctctccagaaggtagcacattttcccttacactggtttccctctttcccaagacagcaaagccctggcttcttttcattccattacaggcagttctttcctgtgcgagctctcctcagctgtagccagaatttgcctgtttggaatcctttcttcctcctagagtttctctgagatggcaagtttgtgaaaattattacacacacacacacacacacacacacacacccatggccaagacaatcaatttgatatgctcctgtgactataaccactttattgccccccccatttaaatttttaatctagattcccttccccctctctccatgtgctcatggccagcctctagttctctactctctctttctctctctctgcctttccctgcctctgctaccctcttaactcccctccccatgccctgaataaactctattctatactaaaaaataaaattaatctaaatataattacatattctcccccattcccttctccaattcctcctatgttattcctcgccactacacacacacacacacacacacacacacacacacattgcctctcaaatttctggctttttgtatatatgtgatttttctctgggtgcgtatttggtttctacttatctttgttgttgaacaccccaaaagcagggctggagagttggcttggtgtgtaagagtacttaatattctcacaaaggactggggttcaatgcctagcagctgcatgaggcttctcacctcctctgacaccatgctcgagtgtggtacacagacctatatgcaggcaaaacactcacacacataaaaattctaaaaaaaaaaaagtttttataaacttaaaaaaaacaaaagtcaaatataaaagttgattcagggtatctgggagcccaactgtctgcatttccaacttcattctaatgtctgtggcaaaactgttgaaagaagtacctaggaaagtgtgactctagctaatttttaaagatttggcttttcaggcatgcatatcgttgttgctcttctgtttttgagacagggcccccgttattccaggctggcctcgacttattacgtagcagagaatgactgtaaattcccaattctccttccttccccgggcctcactttatcttctacaaacttcttgtgacatactcaggcctttggcaatagactaaaactttctggttttttccctcatcacccctttttgtccatatgggaacaatcttttagttttaggataaaaaccttatactctattctcatctaaaagtatttccttaatttcctttaattttctttatataaatgacctataacttcttacaatattttacatttatttatttttgtgtttgagaaagaccaaggcggggtagaagaagggagagagagagagagagagagagagagagagagagagagagagagagagagaatatatggatgtgtccaccacatagtttccaaggatggagctcagggtgtctgccaggctttgaggtaagctccttatcagctgagccatcttgcagtcaagactcagcccgtgtgtgtgtgtgtgtgtgtgtgtgtgtgtgtgtgtgtgtgtgtgtgttactaaggactgaatccatgattttctaattacatgctaagccattgctctaccactgagccatattgccagccccaagaaaaatgtttttctttctttctttattggtatctcaagatagagtttctctgtgtagccctggctgtcctgaagcttgctctgtagaccagactgggaatcagaaatcctcctgactctgcctactgaatggtgggattaaataaaactattctttaatattctaaatgaaaatcaaagaaaagctgagcaaagtggtgcttgcctaaaattccagaatttgagagagttaggaaggagcatcaggagttcagctcatcttcagcaacacagtaagttccagatcagcctgaattacatgagaccacgtgaaagaggggtggagagcaaagccaaagcaaaccatgaggctgtatatgaaacataggaaacaacatgctatcagtctttgaaacagtcctgtgttttcttacaatttaagttgcactgttgttagaaatttatgtcctgttagaacaggttttcagaaagtgcttttgctaaaggtattgatggcctacttggcttcacaaggtaaccaaccacaggattaaagacttgagtctctgccttcattttgagtctgtctttccgttcatttcaaactcctgcttgactgtgcataggcatattaataacagaaggagtgtcttcctaaattatttcattcatccttagtcatgttgaactccaagagcaaaacctcccaggacagaccttcttccatatgagggcagttatccatgatgcaaggcaaaagtaatcagcttatgcttcaaacatgagccaccctttaaaaaaacaagaactctctcaagacatagtatggtctcaagctcaaagcaattcttctgctgggattataggcatgtgctaccatggccagtcaagatgagggtttctctgggctatcttgcagtaccacaagacacaataattagtcaggctacacctcgaagaaaattacttttttttcataatgagctacaatttatttatttattgaatttggagtattcctcgatatcatccttggcctaagattctttgccatagtccttaaccactacgcaacagcaaccgaccaccttccgtggtttcccctctcgatcgattctacagaggcctacccattcccctagtttcttgttgtcatcaacctttatcaggttgatttggtgctcagcacaaagtgcctccaccagcttgacatacatgggctcatcacagttggatgcgagcacacagagatgggcttggcgcttgtctaactaaggctttggcagcttcgagtatgccacgtgctaggccatcctggatgagggcggtcttgagcacctcttgtagagcagtgttgacgtccattacacctccagcagctatgccttcctcggccatggcggtggattatgggtgacgccgaatcttgaacgcacctgagcttctgcctccgcgcaaattggtggcggcaggggaaaaaagcgaaaattacttattatgggtactccttgttctctattgaaatgtctctcctatttttagtttaaatctcaatactccagcgataggggcagggtcgttgaacccttctatggctcttaccacttgaccacctttgtcatcaggttatgctactctaagttactccatgttatataaaacattattagctcgtgaggtcaaactgccagtggcctattctttaaagaaaactgaacctggatcgtctggaaaagcagcgaatcctcttaactgttgagccatctctccagccccccaaatgtattattatctactctttctgtttgtttgtgtttgttttcaaggcagggtttctctgtggccttggctatactggaactgcctcggtagactatgctggtctcaaactcagagatccatctgcctctaactcccaagtgctgggattaaaggtgtgcacctccactgctcacattccatgggtttatcttaatcacatctcttttattcatattgcaacctcaccagtaccctcagtaacgtcatttaaataaaacaaacaaacaaacctgggactagagacatacctcgatgcttacaaacatttgctactctttcagaaaatccaagtttgattctcagcactatcaggcagttgacaaccacctataacttccgctccaggggctttgctgctctcttctggtctttgagggcacacacagaccatatacataactaaagtcagaaataaaccttaaaaactcaatacttttcaatgatgtaatggggatctaaagagatggctcagaggttaagtatttgccataaaagcatgaggaccagagttcaagtccccaaggcgtgaacccatgtgaagccctcctataattgcagctatgaaaggctcaaacagggatccccagagcaagttgcctaacaagacgtgccatatcagtgagctctcggtttggctaagatcttgcctcagtaaacaaggtagaaaaatgattgaagacattaaacttaggcctatatattcacacacatatacatatgaacctatatacatgtgtatccacatctatggacaaaatgcatatacacacaaaaatggaaaaggcaagggtagagtgggaagatgaacaaatgttttctttgctctctcaaccttggttataaaatacttcctttaaataacagaaacttaaaaaaaaacaaatcaggtatatagctactactgctggacttcagtccatgcccctcccaatacccactcatatctttccttcatcttattcaataagcattcttaagttttctgtaatataaatcaagaatcacaacaatatataactagagagaactctgcggttctgaggattcctcaggttgcataattgtgaccatcaacttgcattgcctgctcctgtgccaagactataacaccggagtatgtaatccggagtatgagctgagaggggaaaaactgatgtggcaagtggaagaacagatatagaatctatgtatttatttacttatttatatataataaaacacttatacttatcacttatatctgtgaccggtagcacatgcttgtaagcacaacactttgtaggcaggaagttcaccataagttcaaggctagtttggtctacatagtgaattccaggtcagcttaaacagtccttggaataaaagaagccacagagatggcttagcagctaagaacacttgctgctacagcagaggcccacattaagttcacactcctctgagacccatccaccatggctctgcttcccaagtgctcgtattaatggaatggatcattacatcttctccaaaacattattatttgtatttacatttgattattacatgccaggagggttttgttttttgttttgtttggttttttttttttttttttttttttttttgggtataattggtactctataagcttcttgtatgtttataggcttctctttctttattcttttcttttttatgaatgaggcaatttattaacccagtattattttttctaatgcttcttgttggcagctgccacctgttcagcgatcctgtccagatgtgtttcctgtccctgaggtgttagcttgcggcccccatctcggcccttttccaccattttcagccctttcagggcttggaggacctggcaagccatactctcagagcctctgctgaagtggctgggcctaacaccgttcctctgccatccttcatagatcttggtcacggaaccaactcctgcactacagttgtgtacagaggtacaggtccggagttgtggaagcagctcgtgggtagaaccagttctcatcatatggggcaagctctttatgtttggctaacttgactgtgtccacccattcccgaactttcagcttcctggactttttgaggaaggctgccagcgctctgacgaacctgatggttaacatcttttacagtgacttcaggcatcgttcagcctccatgctgccagccaggggaaagggtggcatctctttaggttgggaaaattttcttctgattttgttgatatttttccgggacttggagctggggactcttcactttctattactataacttataagttggtatgcctgttttatgaggtgctggagattgttttttgttatcttatataaagtctgtgaagttgcacatgaaagcctgatctttagatcccttagcactgaaattacaggcagtaaagatttgtctagtgtgagtgtaaatcttgaactttggtcatctggaatattaagcatctcaagagtaatctaagagcagtcttaagcaccataattgatcacttcttaggtctggggactaaagacatgcaccacgtccacctggttgaccacactttaagagatagcattgtaaaggggctttctaatattttctagggttaaagtctattgtcttcatggtagggagcatgtcagcattcaagaagacatagtactggagtttgacatctggttccacaggtagtaggaagaaagccaaccaccggccctggcttgggcttctgaaacctcaaagcccactccctagtgacttatgtccttcctaattcttctaaagtagtgccacctcctccccgctcctgatggcttagtgataaaatgtctgaggctgtaggagtcattgttcttacatgatctttggtagattgatttctgtatagggtgagatagtaccactatgctaaggatcacttggccaagtgactgtatgtctcttacatgtggtgtttgtacctttgttgagtagtggatggctgtctccaggtcctctattctatcccactaatttacaagcctacctatgagcagtagcatgttgacgctgtggtgcaacctgttcattcatttgaagctttgtcatgtagctcaatctggtctccaattctctatgtggctatttctgatcatccttgtaactcccaagggctgggattcacaggcataagctacttaccatgtcacctatttttaaaaactatttatgtgaatgtcattagaattttgctgagtatagcgctaaatccatagatgggtttttgatgcaacttagacaatattatgttgattcatgaacttgggagtgtttcttcaaccattttataccagatcaacccctctcccaatatacgttagaattgaaaaaaatatagatttcctggagagactggatgcctgatctacctatagttgtggctccaactttctctctgttcacagagccagtagtgtcattgaacatcccttcctttaaaaaaacaaaccatttttcatgatttattttgatcatttttccttcctccaactcttccccactcatccaaatccatattcattttcttaaaaacaaaacgaaaactgcgctgttttgtctggatggtgttttcttggagtcatttactgcagtctttctgactccttatcttcatagatgcctgagcattgaaagaaagggcttgatgaagacatctcatctaggaccaagtgttctaaagtctcttactctctgcacattggaagaccatttcttaactcccatttctgtttcttgctgctttgtagtgggtccttgtttcttgacccattatcatcatcatcttgttcttccttcttctcctctttgaatttgcatggagaattcctcaagattactattttaccccaggtgcatttttaatcttaatgttaagaatatgcaatgaggcaggcagtggtggcacacacctttaatcccagcacttgggaggtggaggcaggtggatttctaacttcgaggccagcctggtctacagagtgagttccaggacatctggggctatacagagaaaacctgccttgaaaaacaaaacaaacaaacaaacaaagaatatgcaataaattacctagttaagtgtacaggaatggaggtgttttttagaaaaatatttatttaatgtgagtacactgtcggtcactgttcagatacatcagaagaggttagatatcggatcccactacagatgactgtgagccactacgaagttgttgagaattgaactcaggccctctggaagagcagtcagcactcctaaccactgagctatctctccagcccaggaactgagttttagcacatatcccttcatgctttcttgtgataagactaaaaagtgtccccgaaacctgacataccttgatgtacacggtgtgagaaagaatgatgaggtttgcaagaattgggactaagtaaaacacagagactaaatttaactctttaatttgatgattctctctagcatccccacaaaaatgatacactggcttgcataatctgtgaccagtacctcgcaagttctaaattctctttgtacagctcatttagaagttctcgtttatacaaagccatatccatcgtggagccaggtgctcttagctgtgaagagcccttccttgggtcttttttccctaatatgtcctatgtgacttctcactggtgatgcttttggtgtgcttgttactctgatcctgatcgctctgtcaactaaagttagacaaagtaacctttacttctcaattcagataggaatccttttgcactccaagtttggcttcagatgccttggaaagattcatgctgccacctgctggtttattcagtctgtgtgcatcatttatttacttgttaatttgtttttcttttgttgaaacagtttattttgtagcagatatttttccatccctacctgaaccacctcaatagtaagattagtgaattgctggcactttgatcgtccataagcaaaccaattttgtgtcctttattattcatgggacgcctaaagggaacttagaacagactgtgaattatttgtcagcgtgaatcaacgagacaacaatatcctttgattttctaatacccagggtgtctgatctctttcatgtggatattcatagtttgacagttaacaaaatttgacagttcttttaagttagcagtgtctctggggcgagtaagataccaatgagctattattccctcaggctttgctttggcatttaggaattatttttcattactgctagcgagtaacgtacttcagtgcgtttttgtcccaaggtatggagtcaccaggttcccagagaaagactaagatgccaatgacccaaaactatgagcgtaagcccaccaaatcggtcacaactaatactctgataatttaggaaccaaggagccattttgtgaggcatttctaccctttcctctcctcatctgaggtcgccaactaatgcagaagaacttctagtgtccaagacgcggagcgatacatggtttgtccaagtagaagatatattgaaattttgcatagacaggtgtgtgacctaatgtacattatttaatgtttatgtggaagttctacataaacgtttttagctgtaaaataggataatccttcattatcgcgcaaaataatgaaattcacgcgtcatgtcactgagcttacgtacctccatctttattcattttaatttttttataatatagttagacctaaaggtccaataagatgtcagaattgcaatctttgtggccactcctcttctggtctctccgccttcagcgccgcggatcagttaaaggcgtgcaacggcttgctccagccatgtttgctcgtttcccgtggatgtgcggttcttccgtggtttctctccatctaaggagctttgggggaacatttttagttcccctaccaccaagccttatggcttatttaagaaaacatatcaaaattccacgagatttttgacgttttgatatgttctggtaagattttttttttgacatgtcctccatactttttgatatttgtaatattttcagtcaatttttcatttttaaggaatatttctttgttgtgccttttggttgatacttgtgtgtgtatggtggacttacctttctttcattgtttatatattcttgcccatcggggccacggatacctgtgtgtcctccccgccattccatgcccaacggggttttggatacttacctgccttttcattctttttttttcttattatttttttttctaaacttgcccatctgggctgtggatacctgcttttattctttttttcttctccttagcccatcggggccatggatacctgctttttgtaaaaaaaaaaaaaaaaacaaaaaaacctttctcggtccatcgggacctcggatacctgcgtttagtctttttttcccatgcccaacggggcctcggatacctgctgttattatttttttttctttttcttttgcccatcggggctgtggatacctgctttaaattttttttttcacggcccaacggggcgcttggtggatggaaatatggttttgtgagttattgcactacctggaatatctatgcctcttatttgcgtgtactgttgctgctgatcgtttggtgctgtgtgagtgaacctatggcttagaaaaacgactttgctcttaaactgagtgggtgttcagggcgtggagagcccgcgtccgccattatggcttctgcgtgatacggctattctcgagccagttacgccaagaattaggacaccgaggagcacagcggactggataaaagcaaccaattgcgctgcgctagctaaaggctttctttatatgtgcggggttgcgggattcgccttgatttgtggtagcatttgcggggttgtgctagccggaagtagaaagccaaggagtgctcgtattagtgtgcggtgttgcgcggaagccgcagaggactaggggatagggctcagcgtgggtgtggggattgggcagggtgtgtgtgcatatggacccctggcgcggtcccccgtggctttaagggctgctcagaagtctataaaatggcggctcgggggctccacccgaggctcgacagcccaatctttgttctggtgtgtagcaatggattataggacatttaggtcgtacaggaaaagatggcggctcaagttcttggtgcggtataacgcaaagggctttgtgtgtcacatgtcagcttcatgtctgagttagcctggagaggtggcacatgctcttgaatgtgtctaagatggcggaagtcatgtgacctgccctctagtggtttctttcagtgattttttttttggcgggctttagctacttggcgggctttgcccgagggtacacttggtgcattatggtagggtgtggttggtcctaccttgtgccactcgaagctgaggcaaggctaagtggaagtgttggttgccacttgacgtaactcgtcagaaatgggcacaagtgtgaaagtgttggtgtttgcttgacttccagttagaaatgtgcattattgcttggtggccaggatggaattagactgtgatgagtcactgtcccataaggacgtgagtttcgcttggtacttcacgtgtgtctttagtcatcattttttcgaagtgcctgcccaggtcgggagagcgcatgcttgcaattctaacactgaagtgttggatgatgtcggatccgattcgagagaccgaggctgcgggttcttggtcgatgtaaatcattgaaacctcacctattaaaagaaagaaaagtatctaaggccatttcaaggacatttgactcatccgcttgcgttcatagtctcttacagtgctctatacgtggcggtgcaaactaaaactcagcccgttccattcctttgtattgttcagtggctagtctacttacaccttggcctctgatttagccagcactgatctcaagcggttctctaagcctactgggtataagtggtgactttggccagagtcatagtggatcacaaatcactggtgaagaggtagaatcctaccttcttccaaaatctaccccatgactattgctggggttgcattttgatttcaatgaatattttggatgccaacgacacgtctgatagtgtgctttgctagtgtttgaatttaaaaccgaagtgattgttttcaaaatgtatttacgatttgcttacttgttgaattcattttaattacctttagtgaattgttactttggagtccttaaagttttcaataatttttttggcagatgatactcaaattacttggcacttaaatgtactttctttcaaactcatccaccgagctactcttcaaatttttaagtcttataacacagatactgttaatgtaaagtgaacattatgactggatgtcaggagtatttgaggttctataccagttcaggctttgcttttgttgctattgttgatgctatattgactaatggttttacttgtcagcaagagccttgaattgtaatgctctgtgtcctctatcagacttactgttataatagtaatattaaggcctacatttcaactttctgtgtgttcttgcctttatggcatctagattctcctcaagactcagcaaatagtgctgctgctattgctgccccagccccaggcccagccccagcccctgccccagccccagccccagcccctgccccagccccagcccctgcccctgccccagcccctgccccagccccagccccagcccctacccctgcccctgcccctgccccacccaaccaacccaatccagtccagccctgccccagcccagtcctagccccaggcccagatactttcagacctatcccaagcccacttctacttagagaaattcgaatcttcattgattcagtgctaaaatgcagtgtccatcactcagcctataagactgagacagcccatctataccccctccatactgacttctagagtcatggaatttcacttaatgcatagaatcgtattgctaaaatgcagtgcccatcactcagcctataagactgagatagcccatctataccccctccatactgacttacagagtcatggagtttcacttaatgcatgcagtcctattgctaaaatgcagtgcccataactcagcctataagactgagatagcccatttataccccataccccctccatactgacttctagggtcatggaatttcacttaatacatagaatcgtattgctaaaatgcagtgtccatcactcagtctataagactgagatatccctatgtataccccatactccctccatactgacttccagagtcatagaatttcactttgcatacggtcctattgctaaaatgcagtgtccatcactcagtctataagactgagatatccctatgtataccccatactccctccatactgacttccagagtcatagaatttcactttgcatacggtcctattgctaaaatgcagtgcccatcactcagcctataagactgagatagcccatctataccccctccatactgacttccagagtcatggaatttcacttaatgcatgcagtcctattgctaaaatgcagtgcccatcactcagcctataagactgagatagcccatctataccccataccccctccatactgacttccagagtcatggaatttcacttaatgcatgcagtcctattgctaaaatgcagtgcccatcactcagcctataagactgagatagcccatctatacccactccatactgacttccagagtcatggaatttcacttaatgcatgcagtcctattgctaaaatgcagtgcccatcactcagcctataagactgagatagcccatctatacccactccatactgacttccagagtcatggagtttcacttaatgcatgcagtcctattgctaaaatgcagtgcccataactcagcctataagactgagatagcccatttataccccataccccctccatactgacttctagggtcatggaatttcacttaatgcatagaatcgtattgctaaaatgcagtgtccattactcagcctataagactgagatatccctatgtataccccataccccctccatactgacttccagagacatagaatttcactttgcatacggtcctattgctaaaatgcagtgcccatcactcagcctataagactgagatatccctatctataccctctaccccctccatactgacttccagagtcatggaatttcacataatgtatagatttctattgctaaaatgcagtgcccataactcagcctataagactgagatagcccatctataccccctccatactgagttccagagtcatggaatttcacttaatgcatagaatcgtattgctaaaatgcagtgcccatcactcagcctataagactgagcccatctataccccataccccctccatactgacttccagagtcatggaatttcactttgcatacagtcctactttacttgtccatggacaagtaaacaaagaactcttgtccttcatgttaatcaagatacaccaatcaaacaagagttttatatcagagacttgccatggaggtatcatctctcaagtctcctttcctttaaggaaagaaaaccattctgtcattgctgtagtagtcacagtcccaagtttctaagcagtgttcagtcgtcttttctcatgtattaccttgagtactgaataattctgtcagaaatattttgtccattggattagactttagctagtccagccctgtgtgcatttagcaaaggggcaaacacaggtctgttatcagacagttaaagtgctcagtcccaattttcaaggcattggccattaaagggggtagaatactatatactgttggcatgctgtcatgggtgctatcgccccaggtcacatctttctaactgatggagatacatttatttgctcatgatattgtatactagtctcacatgctttcttatttcagccaaaaacctctgcactggaacattttatgtggataatcctgactaggaattgagtcttttctcaaggtcctaatactacccttgctttatgtaaagagggtgctgattacttaatgcctcttacacaattgtgcaaaattgcagttgttcaagtccccttctgttagtaaccaagatcccataccctcataccctaatgggtgacaatcaagggtgccaaccaatgagaccacttctctgttctggtctttctgctgtgctggggaatcaaaccttgagtcttgtgtacgctagtaaagcactgtcatagagctacagccccaccgtgtggtggtttgagagaacagcctcttatgtagcctgggctgggcgggacttacaggcattgccacctgtaatgtaaacatatttgtgcctgttgtgtgcacagctgcatttgtccctcttcctaagcattggataaagaaaccaaactaagtcaagtcattttgttggtaatcaagaagacctttgatctgtcctgtttttaacttccaggctggcctggaacttagcatataacccaggctagccttgagctcaggatctagcctgcgtttaacaagtgttggcatatctggttcctaccactatgccctgcatgcagtctttcatattgtgaatgtgcatatgtcatttcactgtagtaatctgcatctggtgaagacttatttgtattgcagcagtatttaagatccttaacatagtaaatgtgcacagtgttaactctattgtacatattctcatgtccacagttgtgccttttagatcaggactcctgtacttagcaaagcaaagaggctcactaatataaagcttctttcatgagactatagattgaaacgattccaatacggtcaatggtccttcaaggtaagacttctgtctctgatcattcatatcctctttgctttatggaattatgtatgtgctgtgcacttgaaaccccttcctcaaactatttatgtacatactggcaattttagtaggatcaattttactcttaactttgaagtacagaagtggtgttgacctataaggtcccattttgtggcttgctaataataatgactgattgtagtaggccttttctgttcactacagaaggaaacctgaacagcgtaaaactgtaatggccataaacatgtaccttgcatattagtatgcatttactgcacacatctcattccatttggatacgatcctactctcaaacccttttgcagtacagcaagggtcactaatcttttggcttcttcatcttcctggacactggataaggctgtcccctcctttccactctttaatttccaggactattactttaaagacttaatatttgcataaaggatggggtttttaattgataacatgtcccttgaacattaatgtatataacagggacatgatccattcattttaataaaaatacttggccagttaatgtgtaaaattacacttatccacaaccttattacttttcggaccattgtatctcttgcactcctgcaagggataccgtttatctcccaaggtccctgctagtggaccattaatatacagtgaatcttcctttgtctttgccagtaaacaaaggccatactccttcgcctttcatttgcactatatcaggatatgctgatcaacaaggccgcattcttttggactgttatcatatattaaatgtatgcgtatgcactgccacctgctctgtgcacttgaaaggatcccactcacttccttagcaccttcagcaggaagtgataataagctcaagactttcatttggaaagttcacatgtctaagcacttctctaagaactactgtaccctcttctccgctttaaagcagaaagagggttgtacgaagtgctcttcatttggacttaagtgcattaatgcagttagttgtccatcattacctttggagttggattttacatccttgtactcttttgacaccagaggcatattaattatttctgagcacttctcttgtcaatattaatctgtacccttacacatatgacctgtgcggcagcaaaggttctgaaatgcctaccttttgactggggctgctgagtggtagtaactattagtaacctcagcatttggatgattactatgcaaaaatgtcaaggacctgtgtgctctctttgcataccatcaaggctactgagtcccagaattaattgctaagttatgcgtatttataactatgaatgtctggaatattttgtcccctttacattattgcagaggttgctgagcccccgaaactacccggtactgtcaatgagcacaggggctctgacgaatgacctgctctcttccttaaactgattttgggactcttaataggcacaatggcagttctggatggtttattttctactccaacttgagcaaatcccctgctagtttcccaatgatataataaagtacagcagtatgtacacccaacaatgacccggatttcgaccctttttgcattgctttaatatatacaatcctaaatagtcacaatctcacactttatagtgttccttttgcccggcctctagtttgtccattgaccacttttctgaatcactaattctcacaaacccatcattaaggaagagtttgtgccctttctcaattccatcatgccatcccttttgcctctttgtttgaacagtattgactgggcaaagcccttctcttgacttaaagtcaacaacaccagtttactcacttcatatggctacagtgtctcagttgccttctccttgctcccactgaacagagacacctcgaattcttacattattctgggtaatgttaattaccccaaacaccctatgtgtcattaataaattttggtgtatttatacactgaatagcaaaagcaggccaaaactaggtggatgagccttcaatctttaacttgcacttctaaattattccaattccaactgctggcacattctagggccaggaaccattcttgcctacctttattaatgctttattgtgcaaaatattgcaggcaagtagctcagggagttggattgccaccttttacttggggctttcctttacagtatgaactgaaaattgtcttcctgagaaggaagcttagcacttttctttccgttcttcctccaggaaggagccaactgtctgcttaagaaactttaagcccgattttgtatattgctactgtacaggaccaactgccagaaaagttattgataattttattccttaagaaaggcatttggattgcaaggtggattgactgtgagatcattagcttttgtgaagtaaaaatagccatttgtgtcatgtttctgaagactaagcagtgtctcagtgtactgagggtgatgagtctgtggaaagatcagtgcaactattgcagaatgtttaagacaagtatctttgcttggtctttactacaagtttaacaaaacgaaaaagtcaatctttgtgtggcctttagtatgattaactttttggaagatgacctaagccttctaatcattatattttgtctgacattggtcaccagtccttgcttatttttaaaaggtgactggatggattaaatttgagaacatgtcaagtcgcctttgaaaattatataggccatcacatttaattaattcattctatccaccattaaactctggcaataatttgaagtagcttgaaaattcctaaagtgggaatttattttagagatgatagaacctgtttccccactttacattttaaaatatgtctgccaggatctaatcattcctttaaacgtacacttcaaagagagattttcctagtaagaaaagagctttctctagtgtgaagggtgctttgtagccgccgagtacttaggtcttttttgggagctattgtgtatgagtgtatgtatgtgtgtgtgtacatgcatgttgctgcgcgcagtcattcattcacatggtgctcagacaacaatgggagctggttcgtctatcttgtgggtcctggagatcaaagtgagatcatcaggcttggcagcaagtgcctttaccctccgcgtgccatcttgccatcccgctgctgagtgtttgatatgacattgctgatgaaaataatcatcacaacagcagttctcccagcattactgagaaatgatactatttttctgaggaggatgttcaagtaactcatccagtgcaggatcctgcttgaactactgctcctccgttacatcagactctggctgtttagactacagtaagtactaccttgttagctactaagctatctttttctcattcgagtttctttctgtgccacccactgaaaagtcaaagtgactaataagtcactagctcttctcagcttatccatacacaacacatagtatgccaacgaaattgtagaattaacacattgtgtacccaatcgccattatgctggggtacactaaaatgagaagcgatgatattttacaaaatttcttccgtgagatgattatgttatttaagacttaatgtaatataagcacacttgagatcattttaggaaatgtactgcctgtgtgaattgtttaagtattttaggaagtctactggggttgaaatttgacttcttaaagagggaagtgtgcttactttgccttgttggtccagacgactattagtaccatctggttggtttatctgaatgccatctgtttctatctacctcttggaagcatggaaagaatattaagagtgaaagactccatgcattatgcttagctgtacgccaagggtagcaagagatgagcttgtgtaggaattgggaatataaatttgataatttggttctttcaaccatttttactgcatttctgcccagaacagaccactggacggcactaacagcttagacagagaacttcatagcttacaatctttttttttttttttttttttttttttttttttttttttttttttttttacaaaagtgcaaagaaggataagttttatgaacaaattttactatggactactttatgtaccctccttgctcatttttctttttcattaattaatcaattaattttgttttgttctctgttttgttttgtgacagggattctctgtgtagtctggctatcctggaactcaaactcaagagatccgcccgcagagatccgcccgcctctgcctccagtttagagtgttgggattaagggtgggtgccacactggacccctgccagcacttttcaacagatactttcagttaaaacaacaaatacttgactcctgtgtagaaaatggtctagctgaaaaaacatccttgtccataacacttaacatttttttgcatttgccttttgtacgtgcaaatgaccctctagtactttaacccttttaagtccactgtaaattccttcgcagcaggtttcccccaactccaaaggcttagcattgtctggctctctaggtgataatacatctagaactattgagtcttttaggaaactaggaccattgttgtacaagtaactgcttcaaaaggaaacatttgcaaggaaaaaaagctttttgagatgctaaagaatgtgtttggtgcactaagacagttagctaaagcttcggtctcaccttagcaccattggctacccaccccagtacatgcaaagtgacccccccccccaggcttgcctaggcacctagagctttcagcctgcctcctatggacctaaatagagattaggactcagactccagttagtggcctggaggaagctggtactgctgctattcacagtaaacccactatcactgacagttccctattgaaatgatcaagttgtgtgagcaggcagatcattaatcagggccaattctgtcatggcaacctagtcctacatgacctccacggcactgtaaaatacacacttatttgtagtaggacatctggaacatgagcttgtctgtgattgaaatgtccattaggaggtgccatcacacaaaaccatctggaggccatctttggtccccataattgatggaatacaaagagttccccaaattagtgtcctgacccagccctcactgtcagtaatcatgtaatggaaagccaccaactcgccatcaccatcttcaggctgcctgaactgtatacattaagaatgagctttcagccgggcagtggtagctcgagcctttaatcccagcacttgggaggcagaggcaggcggatctctgagttcgaggccagcctggtctacagagtgagttccaggacagccagggctacacagagaaaccctgtcttgaaaaaaaaagaagaatgagctttcttccaagctgtccaatggcttgacccagacttaggagtttgtaaacaaagaaccctgtagaacaagtgaatttgagaatgtacaccttcattaagtggtgggaagtggaagtagtggattttgccagctgattttacaaagccctgtggcagaaccagaccaggtctttgtatgcatactgccatataacctagccactgtccaacctgtgccctctctcccagtccagtgaacctcttctgcctgccccttacttagtcctctggctcatcccaggggaagatggctctatttgtgtagtcataagaaagttttgttaattttaaataaaacaggaaaagagaaagctcacttaagacgagagctggagagatggttctgttagtcttccagaggtcctgagtacaattcccagcaaccacatggtggctcacaaccatctgtaatgacgtctgactccctcttctggcacacaggcatacatgcagatagagtactcaaatatacaaaaagggaaaagaaatgaaaggcctttgaaatgtagacatgctttcaattttaaaggctgttttcacatctcttaagaactaggggttccatgagaacatatcctcaccctgagttcttaccaccaattgaaaacgctgacatgtgcatatgaagattgtattgctagtaatcaaattatcatttgtagagtttagtataattatcatttgttttccagggatgaatttggagtctgttttgtgctcctgcctcaagaagaaggattgcctggatttagaggagtgaagagtgctggagagagcccaaaggtatttccgttacttggttgactgagatagtatcttcccttaaaggtctaatgtgtcaagttatacctcctaagtaaatacctcattattttcatgtggaattttcaacaatttttgtagtctaatgatagccttgtatttcttcacagggacaaacaatccctatgtgagactcaaggactgccagcagcctatacagctacattacatctcagcagaacttctcttcaagtcctcgctactctgaacaaaaagcttacaggccacatggagaaaaaaaggtactttggagaatttgctatttgggggtttctatctgatctccagttcatcagagaatgagggggcaagtcaataaagcactccccatctcctggtcccctggcatagtcagttagccaatgagatccttgccttatgatgaggccttgaaatcatccccaccatgttatgaccaatctgtaacatttctgctctgaaatgcctaaaaggtaggttatcagaggaatgaaggccagtttctgacaccctagtcttttgtacttgatagagtaagtagatatggctgttgtcacattctgtaggcctgtcataattctggtctctgaatatcctcaaactcagaggtccaatgctacaccagtttctagggacatatgcaccataagcactgagccaaacaatgctattcaccttgccagtgttctggcatggtattgtttaaagcacaaattaaaagaagaaaataatttaacccctttattcccagagtatttgaagtacaaggactttaacacaacctataatctaaaggatctctcattggtaggtgacagaataaaagccagaaagaacttggatggagcaattctcatgtctctaagttaacactaagatctacaaatgtgaagggttcactctccaagcccctccccatgatttaacacaactgctggttactacataatgagacaactttcccagtattcttgatttcaagaattggcttttctttcacctcttttccagatctccccccagaattgtgggcttgctgctttgcagtgctggcgacctattccctttgacgatccctaggtggagatggggcatgaggatcctccaggggaatagctcaccaccactgggcaacaggcctagcccagatttcagtgagacgctttcctgaacccagcaaggaagacaaaggctcaaagaatgccaccctacatcaaagtaggtaagttttctgcaacagtgtaataattttaactttgatcttgttttccattaaagtcagccttttacttgagatatatacataaattttatctttttcccacatctgggaaatgtaactaaacagtgcaaatgtttcttctaggagaaaagctgctgcaatagtggcactgaccttcgaggaagccattctgctctatttggttctctctccagaagctaggaaagctttgccagctgtttacatacttcaagatgcactgctaccctactcatgccatataatacacaagtgagtagcttatttacctacctagctatttacgagtacactgttgctgtcctcagacacaccagaagagagcaccagatctcattacagatggttgtgcgccaccatgtggttgctggggattgaactcaggacctctggaagagcaataggtgctcttaaccactgagccatcactaacattactgatgatgaatgcctctaactacaaatggaaacctggctggaattgatacagaagtatctatcattaggcagaatttaaagagccaggatgttctagtacttctttcctggcattcatacagcttcttttgttctttgtagtgccatctaccaaatattacccttccccaaagcagcacagaaaactgggtcttcagcgtgatcaagcaatgtgaacacacaaaaggaaggcagctttataaatgacccgaggatcaacatgcctgactgcagcatcttaaaagcaatagaatgaggtaagtcactagcattgcagtcttctgaggatttgcatttgctggaagatggtgctgggtggagagcatctaatgtgataatgtgaggcagggccatgtacacgatggaagatgaacaggctttcacgttatcaaatggcctcacagcagcaactcaaactattatctgcttaccagttatatcacaagaggaatttagcttctaggttttgttgttgttgttgtttgttttggcttggtgccctaccattcttacagacttaaacattgaaaagctttaaatagtttatttcttatctccatctgtgaagcagccattagacttgtgaaggatgtaaaaaccaagcccccccttttttttaatagaagaggagagtgaagctgacaattaaatatgcagtcgcttatagtgtttgctgcttacagaagcttttaatccatgtaacagaatgttgagatgttcattctgtgtttaaatgtaatatcccctagatgtatgccctttggcaatttagttctgctaagacctgtctgtttgtgaaggtcaaatgaaatcatgaatggaaagtgttgagtacagagcctggcaaatatgccctggagttgcatgactaggccatttggaagagttgacgggtgtgtcctatggtcctatgttaaggaaaccttaagtttaacgttgatagcctggtacagtgtactaatggcaatttttttctttgcccttccctgtttcttgttaccctctttctggtggtctttgcttactatcaatcattagtgtgtattgtgggtgtgtctatttcttgttttatgtatctattttttccttggtctgtgtgtctaattctttgttacatctatttcttccttgctttgtgtgtctatttcttccttgctttgtgtgtctatttcttccttgcattatgtctaattctttgttatatctatttcttccttgctttgtgtctatttcttccttgcagttgtgtctaattctttgttacatctatttcttccttgctttgtgtgtctatttcttccttgcattgtgtctaattctttgttatatctatttcttccttgctttgtgtgtctgtcttccttgctttgtgtctatttcttccttgcagttgtgtctaattctttgttacatctatttcttccttgcttttgtgtgtctttctttcttgcttttgtgtgtctatttcttccttgcagttgtgtctaattctttgttacatctatttcttccttgcttttgtgtgtctatttcttccttgcattgtgtctaattctttggtatatatatttcttcattgctttgtgtgtctatgtctccttgtgttgtctaattcgttgttgcatctatttcttccttgctttgtgtgtctatttcttccttgctttgtgtgtctatgtcttccttgctttgtgtgtctatgtcttccttgttttgtgtatctacttcttccttgtgtgtctaattctttgttacatctatttcttccttcctttgcatgtctccttctttcctttgtgtgtcttttctgtctgcagtgtgtcttacctattcccatgtttctcctgcatgttctttcttgcagagctttgagctttgtttcactttctctggtgcctgtgtggtctgctttgtcttcactagctatggctctctgttttatctatctggttgctatttctcttagcttttctttcactcctgcctttcgtgactcccctttgggtcacatgttgcatgcatccctctctttttcttgtgctcaccccacttgttctttgttcaagttctctttgtcagtccatttcagttttctttctgctgcttctatccttagtgaattcttgtttacatttcttccctgcctttcttgggccactttctctgttttcttttgtatttgtgtctctttgctattggtggatttcttatctcagcatcattctgttgctttgtgtttgcttgtgtttctatcttctactttcctcctttctgttcactttgagcatttcatctctttacaagtctgtgtctctcttgtattctaaagtaatcctttcttggatgtttctttgtatgtacatgtgcgtgtgtgcatgtgtgttatgtgtgtcatgtgtgagaggagcttcatagccccttcccaataggtccagaatgtcacccgtggagccgttcctcacaccagactgccctgagaaataatctaagacaaaatacatcattccgtccggtcaggattcaagtggctctgaagtgaacgcccaagtagaagacagaagttttgcgacttgagatttaaaaggaccaaaatacacagatggcccgtcttgagctggctggacagaatgctgacaacccaaagaagaggaactgtttctacaggacacctgtgacttccaagagcggggaactacgtatgtcataagacacaaaacctgagctaagtccaagcataagacctaaggacccaatcctatatggacagaatatttaagagataaaggcctatggcccagaactctggaaggatatttctatccttctatccccaagaccaagaagggaaattcgaagatgagacctgccccccaaccccagcatccctttccatttcttatatttctatttaagctgtcttcacttgagatgtaatttttcattgttgccattgcccataaaggaatacgtttttagctggatagtattgtgcaagggtctgttttaaactgggtcttagccatttgttaaattgttgatgttttacaacttccatttctcttcacatctgctccacttgagacggaactaaatccagccagtgtatatagcctgactattgaaacttccctaggaataagcatgcatacagatatgcatactgccatcctccctacctcagaagccctaggctgacaagaaaaggaaagcatcaggttgttagggggaaaacaatgtcaggctatctagagaaaatataaagagttgttccagaccaatgagaagaattagacaagcaatatgcagatgtgccaaccctctgagaagcaccagccagtgtcaccttctttctttgggcttaggtgagcagggtatggttttctaataatggtttggggacaaaatgaggtctgaactccctgctcatagtagtggccgagtaatttggtgcatttcaccaaaggaactcctgggtctaatacctacctttaaaattaatgatgagagactctaaggactacttaacgggcttaatctttttcgtgccttcctcttcctctgtaagagggaagttaaatgacacaggatgaaaaagtaacatgctcatagcacattggcaattatacatggttattatctgaaagtgtagagcttttcctataaggcatcagactaagtacctgaagctttgtgggttcatggtcttagttgcatattccttagttgcaaatccttttcaaaaggtaagaaaaaggcacactggtctattgcctgtacttgatcaagccctgatatgaatgccagggaatgtctgagtaacattaatttccttccctgcatattttttgtgctgaatactaaggctgtgatgcttcactgtggtcacccccaggtaacaagatattaccaggtaaccaggaaacgtatgaatacgtaaaccatgaagcctactgtaacttccaagtcagtgctgagtatgtattacatagtagctgaagtctacgcctctgtgtgctataggcacaaagattgctctaggaataacatgctttgtaaaaacaaatatatgaacataacggggcttgaatgaataacagtccatatacttaaggccagtgtgtttcttctgctttggtgaggctcagtaagttatattataccaggtagcagaagagaaaacacatggaaactgattttaaactacaaactaggtcactaatgcaggtgattgattaccctattctgatcaccttctaatttctgaatacccatgttcagcactgggaataacaaagggggacattaccacagaactagaatttacaaaagaatgcattaaataaagcattatacagctatcaattgttccatgtgtgcaaatgaatgactactaactacctctgatgtatccgatattgttttgggtacatgaaatattcatgagtaactgccatgaaataagaatgtttgcattccatactattcataaggaatgagccaatgcttaatttaatcagtcaaaacttgagtgataagggcatgttaatacaagaacatttgcccaggtcacattatggttgtgggtactttcttaactataaagcagttcagtagtataagacaagacaaattttctatagaaataaagctgcctataaaataggcatagtctctacaaaattttcattgtactttttagcccataatgggaagagtacagttaacaagctgggtgtggtagcatgtgctctgagctgaagcaacaggaccacttgagcccagaaattggaggctagcctgggaagaccataaggtcaatctcaaacctggaggctaaatattgtctcccatgtgtatattctctttcatgggtactggagagatacacagacgtacatttcagtgtgtccacacttgagaataatatgtacgttggcattttatgaactcggaggtaccatataaatgtaacaattcattttcttacttggtatcaatttccaggcttttaaaattctgccacatttattatactgtgaaaataaagtaaataagtaactgtgaaccactgaatatatgaagcattcaatacttgatgagtacatactgaatggcagtcatttattacaaaacagtgcccttgctaggcactgggatgcaaagagcattctcattgtcctgtgtatctaaagaaattatgcatgagattaatttataatttgtaaactgccatatatatgtgtatatatgcaatatttgcctggtgtgcaatgactttgcttttatcccaggcatgcacaacagatctgtgtggagctttgtgaagtctacagttctataaagccgggacctaactgttggctttatcagtgaacagtgattactttctaagtttcataatggctgaaacttaatcataatgcttatcacctaacaccacctaataataattttaccatgctatgtgttgagcgaacacatagattgctttctagcattatgtagcacttataggagtgaaatctagaccaaaacttcaattcacttcaatgaggaaatgaaaacagaaaaaaaaaatggatttgtgcaaggcagtgtgctaaatgttacactgagtggactatgctgtctaggatacttcccagctggcttgactgaggaggtggaaaaggttttattaatgacaggaactttttccatccagtttcttaaatgtttgttgaatgctgctgccagagatgaattacaaacaccttgccagtaaaggagttttatagggccagagtgagataatcccagagcatgggtatcagggaacaaaacgggaagaggccagagcatctgatggcatgtactcagtgtggcccagaacctctcgaactagatgtactggctggagggaccaagcatgcagaacacaacacctaatgaaacattgtatataaaatatgctaacctaggtcctaaaactaaaatgtgaggtggacctagtgtagatcactgatcataggagacatggtctcataaagcccaggctggttctaattggtgactgtcacagcttctcaagtgctgagattacagatgtgcttaacccatgcccagcctgaagaatatatctgattactgagtgaataatatttttaaagaattatatattttatgtatatgagtacgctgttgctgtcttcagacacaccagaagagggcaccacatcacattacagatggttgtgagcccccatgtggttgttgggatttgaactcaggaccttcggaagagcagtcagactcttaaccactgagtcatctctccagccttctgagtaaatattttaactataatggctgtttgcgaaacccaaccaaggccaagattccttcaacataaactggagacttcctagctaaggaagctccaaaagtcattttctcattggcctagcttgaagccaggacagacttaaagtctgtcctttaattcattacccattttccttttcttactgttgaagtgtttcaaaggagaatcaagatgaatcgataattctaaacgtatttgttcattgcctggctcagcgtcatgtgagcaagaagaatatactatcacactcatacttttaacttaagtgtgatgaaagtgcagttctaagtactaaaatttctaagtactgaaaagaacaaagacatttaaaggatgcaacccaaagtgtactttacctcagtagtttctgaggggactgcagtcacaccttgagactacagctctcactttagctgggaaaaacatcaaggtgtagaggaggcaagttaaataaaaagttgctcccctcctcatgggcatgcttggtagagtggaaataataaaagaggttctctatttcctcggttccacacattgcagaagatgctactggatgctaagtgcaacacatttgttccaaaagggcactcagtgtgacttacagatgccccggaaagcagagggatgctctttattaaacagaaatattagctcaaacgttttctagactgaagaacactttcctcatttcccacagtttgcctcagaggttgaatacaggaaggttattattcattcatttgctttattggttcgcctgttctacaaggatttgcatgtctcttaggccttcacttggctcctgagacatggaaaaaggaaacatagacatagggaagtgctggatggggggggggggtctcttttctgggtagtggcacgacttagtccttagtccccaagtaatatgcaatgtgagtcctcatcctcatgtcttctccggccactgcaatgagtgggaagctgggctttgtagcaagcctgaccctaaagttacagaagccctccacgctaagaaactcaattttctaggccattttagctatgactgtgaccactactggtcaggagggatgacagccatctaagttccacaatcttaggctactttgcattatcctggggcaaacaagccatttttgagctgcagcaggctttgaaatacattgaccaattttgcctgtgttcgttaaaccttttacctttttacatgctaatgctcacagtaatttagaaatgttctccttactataatatactcaaggtggcttgctatggtaaaataatgccagtggatgaaaataacattaatgtttaacattcttgcataaaatttaagaataataaaattgacaacaatcagaaaactggaggaacgaaagaccaaattgaaagaacttgaaaaagattaaaaatgcctgtgctttgaccctttccatttttctttcactcacagagggtgggacaggaggccgagtgaaggaaagggtccagcctgtctatctggaatctaagttgggactttaatgcagttccacaaaattggtattaattcgctaaatgtttctgaaaatgtattttcatctaaatggctatcagctaagccttgagtcaaatgggaatgaaacagattaagtcaatgtgatctctttatccaagttgccttagagctgaagtcacaatttgctgtaaggaagcttattcattgtagcatacgcatactttcaaagtatctagactttacttagtaacccaatcaggacattcaggcaaaagaaaaggaacagagaagatggagccaggttgaagaggtctgggagttcaaacaaatttttttcattttcattaaaactcaattgggcatcaaaagtgttactaatattagcttttaattagtggaaattggctggattcagtaatatccctttgtatgggtaggaatgggcttacatttctggaatttgcaaaggaaaaaataactgaaagccttcctttcacagttactgccatcaatattgctaccaattaagcacatcctaccatcatctgctttgatcacataaatgaactgtgtaccaatctgttgttgaaagactggagtcatcttcccaccaactgtgaaaaaacacatggaaaacacctggactttgtgaacggatgcggaatacagaacttctgttgactcttgggtgttttgaagacttgaaaaaaaaaactgttgcttaccaacatgtcacaatgagtccgtgtgtgggtgggtggatgggtgggtgggtgggtgggtgggtggttgagtgggtggggtagtttgctgttaaataaaatgctttgttttgaaaacatcatgtgctgtatatgatattttccttaaattttatttaatgtgcatgagttttgtctatgcattaggtttgggtgttatacccgtgtaggccagcagagggtgtcggatcccaaggaaaccaagttacagacgccatcttgtgtgtagccggaatgtaattcagatcccctggaagagcagttagtgctcttaaatcagttcaccttatgctaatacaaggagccaacaaaaccacaaaagcctcatctacaatgtgattggcaagaagagaaagatagacaggtactgcaagcgagtgtgagtgaggcaggtacaagaatctattatggtatcttaaccactgccacattccccttttcctttgcatggagccagaactaggctagcctccaagtccctaagtagccggaatgactctgagctcctgatcctcctgtgttagaattacaggcttgtaccactaagcctgcttttcagatgatagtttctaactcagtggcccttttatcataccagatacctcagttttaattccctatgtaatgaaattggttatgttgccctggccatctggctagcctgaagtccatgtagattaggctggccctaaatccatagagcactgtctgctactgactcaggagtgctcggattaaaggcctacaccaccaggcaggcctagccagttccttgggtaatttgaggtctcataacttagagcctaagttgttcaggagaaagattatgagaacacaaatctaataagatcacgagaagcaaaatattgaggctcaaaagtgggagtactggtaagatgaaatgaaaagaaagaacatggctgtcaagaagtccttgaatagagaaaggggcctctgatagttctaaaattcaaagtgacaaaattgcgtctaggagaaaagataaattctctcaggagagagtttgtactgttagacatggctctgcctagccattgctaaccagtagaagtgctccaacaaaaccgggccttcgtttccatccaatgaatgggccagaaaagcaacaacattttacctgaaatcagttcaccttatgctaatacaaggagccaacaaaaccacaaaagcctcatctacaatgtgattggcaagaagagaaagatagacaggtactgcaagcgagtgtgagtgaggcaggtacaagaatctattatggtaaatcttaacatctttggaaaatagcattggcccaactccaagaagcccatgaaaccttaccatttattactggcaactaaaggattgggacacggggcactcaaacgtatccactgatgagtatttaatagttccaaactatgtctggggtgaactatgaaacactaaacaaaataaaactagcaaatatgacagagacattttgtaaggaataaggggtgctggccagggcgggagggaaattgaaagtggaagagtaagcagaatgcattctatatacctatgaaaaatttctaataaaaaaccctatttaaagccgggcgtggtggcgcacgcctttaatcccagcactccagaggcagaggcaggcggatttctgagttcgaggccagcctggtctacagagtgagttccaggacagccagggctacacagagaaaccctgtctcgaaaaaacaaaaacaaaacaaaagacctgtctgagctggagagatgatggctcaggttaagagcactggatgctcttccagaggtcctgagttcaaatcccagcaaccatatggtggctcacaaccacctgtaatgggatctgatgccctcttctggtgcgtctgaagtcagcaacagtgtacttatgtaaaacaaaatgttttaaaaaatagaaaggaagaaagagagagagagagagagagagagagatgctctcataaacaacgtggaaggccagatgcacacctgaagttgtcctctgactccattatgctctgtgcaaccctcacccacaaacgtgtacacacaccatccacattcatatacaatacgcatcacacaaaagaaggaaggaaggaacgaacgaaaaagagtcaagaggagggctgccagcatccttgccctgatggctagggtcgctgcacgggtcagcagcactggactccctcgtctgactgtcaccctggtcatttagaagccaaacactgcgattcttcaaaggcgggatctgggctaagtaaggatgtggctcagtggtagagggacagccagggcctcgaactcagaaatccgtctgcctctgcctccggagtgctggggattaaaggcgtgcgccaccacgcccggctttaaataggattttttattataaatttttcataggtattgaagaggcacacatgagccccttcatggtttgctagaataaatgctcttggtgatataacttggtttcctcagcctgggttcctcaactagaaacaggcagttaaggtccaaggcatgagttgtgagctgcccgggtcttccaggcaacctgcaagtgacaggttcttgctatgcatgggcatccttattccccctgggtgaggagctttggaaactcaggggcagggagactccttctgaggcttctggaaagagagaatagatgtgaggatcaggtagaagttcccagactgtccctgccatccaagagggaggcaggagctgggctgggtatgggtcacaaagccagcagctgctagcactgagggtccttgcctttctgtcccatggcccctctcccatctgcactgtggttgcagagcctgagccagcacttcccccgactggagaatgacagaggcagagtccactcctcccattccggggcgggaagccaccatgttgcacctgggcccagcagggcctgggaacacgaggagcccacggcacccaaagccctcccctcaacccaggtccttgcgcaaggtcaggagagggcaggcaagtggccattaaaactgccctcccggcacaatggcacagtgaggtgaagctggcacaagaataaagaagaggaagaaatagagctgtagatagaagagacagcaacgtgtaataacatggcgccttcaagggtcaggaagggctattctgcaagtaatctcaggttaattagttcctctgtgctttactcgaaccaaaatttgtctcctatcagggagagaaggtggagtggataagattaaactaagcacacacagagacaattgtttttgcttttgtttttctttcatttttgagtcagggtctcacattgcagtcctggctggcttggaagtctctggcatactgctggaaacccaagcactcaccctaaccaagcactcaccctaaccaagcatgcaccctaaccaagcactcaccctaaccaagcactcaccctaaccaagcactcaccctaaccaagcactcaccctaaccaagcactcaccctaaccaagcactcaccctaaccaagcactcaccctaaccaagcactcaccctaaccaagcactcaccctaaccaagcactcaccctaaccaagcactcaccctaaccaagcactcaccctaaccaagcactcaccctaaccaagcactcaccctaaccaagcactcaccctaaccaagcactcaccctaaccaagcactcaccctaaccaagcactcaccctaaccaagcactcaccctaaccaagcactcaccctaaccaagcactcaccctaaccaagcactcaccctaaccaagcactcaccctaaccaagcactcaccctaaccaagcactcaccctaaccaagcactcaccctaaccaagcactcaccctaaccaagcactcaccctaaccaagcactcaccctaaccaagcactcaccctaaccaagcactcaccctaaccaagcactcaccctaaccaagcactcaccctaaccaagcactcaccctaaccaagcactcaccctaaccaagcactcaccctaaccaagcactcaccctaaccaagcactcaccctaaccaagcactcaccctaaccaagcactcaccctaaccaagcactcaccctaaccaagcactcaccctaaccaagcactcaccctaaccaagcactcaccctaaccaagcactcaccctaaccaagcactcaccctaaccaagcactcaccctaaccaagcactcaccctaaccaagcactcaccctaaccaagcacacaccctaaccaagcactcaccctaaccaagaactcaccctaaccaagcatgcaccctaaccaagcactcaccctaaccaagcacgcaccctaaccaagcactcaccctaaccaagcatgcaccctaaccaagcactcaccctaaccaagcacacactgtaaccaagcactcaccctaaccaagcactcaccctaaccaagcactcaccctaaccaagcactcaccctaaccaagcactcaccctaaccaagcacacaccctaaccaagcgctcaccctaaccaagtactcaccctaaccaagtactcaccctaaccaagcactcaccctaaccaagcactcaccctaaccgagcacacaccctaaccgagcactcaccctaaccgagcactcaccctaacccagcactcaccctaatcaagcactcaccctaaccaagcatacaccctaaccaagcactcaccctaaccaaacactcaccctaaccaagcactcaccctaaccaagcatgcaccctaaccaagcactcaccctaaccaagcatgcaccctaaccaagcactcaccctaaccaagcatgcaccctaaccaagcactcaccctaaccaagcacacactgtaaccaagcactcaccctaaccaagcactcaccctaaccaagcactcaccctaaccaagcactcaccctaaccaagcactcaccctaaccaagcactcaccctaactaagcatgcaccctaaccaagcactcaccctaaccaagcatgcaccctaaccaagcactcaccctaaccaagcatgcaccctaaccaagcactcactctaaccaaacactcaccctaaccaagcactaccctaaccaagcactcaccctaaccaagcatgcaccctaaccaagcactcactctaaccaaacactcaccctaaccaagcactaccctaaccaagcactcaccctaagctcagttccaatagaaagaataactaaaagaattctgtagacaagggagggctttctaggtttaaaattaatttactggtccctaaaaaacaaacaaacaaaggggctggagaaatggctcattggttaagaatgctggctgctcttccggaccggaccgtggttgtggttcaattcccagcacccacatggcagctcacaactgtctgtaagtccagttccagggtatctgacaccctcatacagacttacattcaggcaaaacaccaatgcactaaataaatacatacatacacaccgaacaacaaaagactacaggtctgaaaaaagccagtaggcattgcaagcctggaggtggtggaccatggatcagaattcaaggctgggctgggctacatgagagcctttaaaagtaagtaaataaacaaggccttattctctattcccactagggaaatgaagcaaactataattggatatccctcgcatctacctacttggaatagctatctagaacctaggaaccagctggtgttggaggcaagggcctgtaaccgcggcacttgggagatttagagcaagaagatgaagaattgggtctatcctgggcaatgtcatgagactctgtctcaaaaaaaaaaagaaagaaagaggagagagagagagagagagagagagagagagagagagagaggaagaagaagaggaggaggaggaggaggaggggggaggggaggaggggaggggagaggagaggaggggagaggagaagaaaaagaaaggaaggaaggaaagaaagaaggacaggagagctggaaagatggctcagtggttaccaagaacatttgctactcttctggagcccctgaatttgttttttgtttttttaaaggtttatttattttatttatattagtacactgttgctgtcttcagatataccagaagagggcaccagatcccattacagacggttgtaagccaccatgtggttgctgggaattgaactcaggacctttagaagtacagtcagtgctcttaactactgagccgtctctccagctcctgaatttgttttttgtttgtttgcttgtttgtacgttttgagacagggtcttgtagcccaggctggtctcaaattctctttgtagataggatgaccttgaatttctgacacttctgccttgacctcagtgctgtgactacaagcacacccctcacctggtttatgcaggttccggatggaacacagggcttcaggaatggcagagaagcaagttacctgactcttgctcagccattttgaggctataggaggagggggacaccaggcagtgagtccccatgtcaaaaaataagtcgagccaggcagagagggacgtgcttttaatcccagcacttggcaagcagaggcaggtcgatcactgtgagtttgagaccagcctgggctatactatatagtgagccagccagggctaccctggaaaactctatctcaagaacaaatcaatactgtactctcctcgaccttggccagagaagtttcttctgcaaggaggagcagctaatgcagactcagagctggcctgagactgagcaacaattgcatgcttagctccaaacaaggtgtctatagcaacccacacactgcccaaggcccatggaacatcgtggaagcagggctggaaagaacatgagagctaaagatggggaggcaagctgtgaaaatgctggctgccgccctcacaagcgtactgcggctgtggctacctgcatacgattccgacaagattagccaacattccagcaagcactgctaactggactcacagggttgttattattattatattattattattattttaaaaggagacctcattaaggttataggaagacagcttcgggatgtgtagggagtgggggagaagtacgagtgaatgcatgtatgaaattgccaaggaataaataaatattaaatatagggaaaacccaacacttggaaggtggaggcaggaagggcaaggtcagcgttggctacggagcaaactcaaagccagctgtactgcatgagactgcgtctcaaaagaacaaaggtggaagaagagctcagcagttagcagcacatgttgctcttgctgagaggacctgagtttgctagcaagcacctaagtcaggtagctcacaagcctctgtcactccatctccagggggccaatgcctcagacacacatatttaaaaacaattgtgagcagggtgtggtgccgcatgcgcatgcctttaatcccagcactcaggaggcagaggcaggcggatttctgagttcaagtccagcctgatctacagagtgagttccaggacagccaggactacacagagaaaccctgtcttgaaaaaccaaaaaaacaaaacaaaacaaaaaaacaattgtgtgtgtgtgtgtgtgtgtgtgtgtgtgtgtgtgtatgtgtgtgtgtgtgaaacaaaacgaaacaaaacaaaacaaaacaaccctactttcatatttttaccactggtagtaaaatccaacactaaaaggaattcctggcataagaaatcttgaggatgaaaagtcaatttaagggtatgtttgaacatagcactctgataaagacaccatccacccatttgtctaaagtgagttagtcttcccaatcaaatcctcacttatgccaatgcctgccttaaatgttttctatgtgtagtctcctcaattaccatcaacattcaaaccatcactttcccctataattccatttaccttggactttcacttccagccttattctaatttcttgggctttcatgtttattcgtcaactttcattttcattatacaaggacctgataagtttttattgataaaagttttattatttgctatgaattgaatgcggctatgccctcatgtgtgtgtgtgtttaaatagtaagctcagatgtttacttaaaaacaaaacaaaacaaaacaaaacaaaaacatgtgttttctagccaagttggtcaggaactgactgtgtagcccaagctagtcttgaactagctgcaatccctttctgcctctgcctttaaagtgctaacaagtgtgagccacctgcccagctataactactattttttaatgtgagcactttctgttctcacagaggacctggtttgatttccaacacccacattgtggctcataaccatctataactccagttccagggatcctagcaaaccctcttctgacattggtgcccaacaggcatacacatgattcacaaacatgcaaacaagcagaacactcatacacgtaaaatctaaaataataataaagtagacctatagagtatatataattccaaatggatttcagtagaagaccctacttacattgcacagaaaaagctgtctggctgcttcaggcatgccaatatcagcacatgtaaacaagcttccaactttgtttttgagtaatcaactcattattcaccagatctgaggctatttctattcaacagcacaagaaaagaagggagaagcaggaggatctctgtgagtttgaggccagcctggtctacagagctagttccaagacaccagggctgttacatagagaaatgctgtctcaaaaatgaacacacacacacacacacacacacacacacacacacacaagcgcaagaaagaaaccattcgaatttgactgcatatgtacataaaacctttaaataaaagacgtaatttcaaatcaaatgaggtcttaagaatggagcctaaacctgtctgtctctttaccagacgcagggcagccagaaggcagccattcacaatccaggaagacaggaagggataacaccagaacccaacctccattttagagaggtctagcctcttgagctatgacacactatttgttctctaactacccaaagttgtattttactatgctaattagctgattaagacattaggtaaaggtgttctacaaagaaactgtaaataaaagacatactctgtgccttagcctatctcatgattccttttctggatgtcttcataaccaccttaacctctacgaagatacagagacacaggtagcactacagtgctgtatttgtttaagcccccaacaaacttggtggcttaaagcaacacagatctataaccttataattttagaagtcagaagttcagtgtgagacacctagttgaaattgaaattattatttgaaattaaattgaaattattccttctgtaagttttagagaattcatttccctgccctttttagcttcaaatttcttagctagtaattgccttcctctatgtctatagccggatgtagagtctttgtcaatcttttatccctgccatttcaatgaaacaacaccttaccttctaggggaatctttttatctcaaggtcgattgattagaaacctcagtttcttcctccaatgtaatatagtatattagtatattctggggagtcagtgtttgtctgcctactaacacaggtaagaatttgcataggtattacaaaatcagtactttgcaaatctttcttctcttccgaattgaaaactgaacattaatccaaacatggcggcagaagcctttaaaatcggcactgtcccactgaaggcagtggcaggcagagctttgcgagtttgaggttatttactgagaccttgtctcagaaataaggcattaaaaaaaaaacaaaaaacaaaattcaccccaaatccgcatcaaaaccaaagctgattgttaatttccctcctttctaaactggattcattccttagtgccattgtttgctcgtctgaacacactgaataaacactaccgggagggattttccgtgcctatagtaaataagaatatgatttttcagatacgaaccactgagaattgttttgccttgcccgccacccccaccccgaaaatactccttgtcccagatagtagaaacttaatgggttttcaaagcactcagattattttcgaatttcaacgataccagagatcgggtcattatgtacctcggaaataaacggaacgcagtaccaaaattttaggtctcaacttccaaggcttctcaaagaaagttatcgcagacttagttactcgttcttggttacttcacacgctaccagtaatttttccacttttctgaatctgtgccccccccccacattctttcatcaactttaatccaaacgcgtacaatcagaaaaccccactaaagcggaggtagaatcccattggtttttagcataatcacatggcgggaaaattgttaccaaaaaaaaaaaaaaagagcaaaaatcttacctgaaaaagacacgtgcggtgaggtagtattgctgaatttggcttgagcaatattaaaatattaagactattccaaagagtttttcggacacgaggctttccctgatgtgagtgtgtggattctagaccctgctacaagtcacgcccttaactttcttttccgctctagactgcagtttattacccacgccaggcttattgaacgctttgcatatctacctgtaacattttagccaaccatctctacgctatcccagacattttcatcacctctgctctgcccagcagacattttagtcgacctctaggggttggttataaggcagggattttagcgatctccccaggtccctggcggcggcaggcattttagtgatagcccaggtccccggtggcaggcattttagcgatagcccaggtccccggtggcaggcattttagcgatcttccagatccccagtggcagacattttagtgatagcccaggtccccggtggcaggcattttagtgatagcccaggtccccggtggcaggcattttagcgatcttccagatccccagtggcagacattttagtgatagcccaggtccccggtggcaggcattttagtgatagcccaggtccccggtggcaggcattttagcgatcttccagatccccagtggcagacattttagtgatagcccagatccccggtggcaggcattttagtgacctcccagatccctggtggcaggcattttagtgatagcccaagtcccccgtggcagacattttagtgacctcccagtaagcggtggcaggcattttagcgacctcccagatccccggtggcaggcattttagtgatagcccagatcctcgacggcaggcattttagtgacctcccagatccccggtggcaggcattttagtgacctaccaggtccccggtggcaggcattttagtgatagcccaagtcccccgtggcagacattttagtgacctcccagtaagcggtggcaggcattttagcgacctcccagatccccggtggcaggcattttagtgatagcccagatcctcgacggcaggcattttagtgacctcccagatccccggtggcaggcattttagtgacctaccaggtccccggtggcaggcattttagtgacctcccaggtccccggtggcaggcattttagtgatagcccagatacccggtggcaggcattttagtgatagcccaagtaccccgtggcagacattttagtgacctcccagtacccggtggcaggcattttagtgatagcccaggtccccggtggtaggcattttagtaaagtctcccagtcccaggcatccatttgagccattagtccgggaacgtggcatgtatgttagctatctttccaggtccctgaccggtagtctaaccacctgtaagggacagacattttaaattttggctccaggacccagcagacattttagttattcctccgttatgcggcaggcattttaactatcggttcgggactacgcaggcattttaccttcatctccgcatagctggcaagcattttaggaatctttctgctgcttggcaatcactttaaccatctcttccgctgtcccgcaagcacgtagccatcgctccactgtcctgaaagcactttgccactgtcccactgtcccgcaagcacttagccacctctcccctgtcccgcaagcacttagccatcgccccactgtcctgcaagcacttagccatcgccccactatcccgcaagaatttcagccacctctccaccaccccaacaaggacttcgggcacctctccaccgtcccgcaggcactttaggcatctgccctctccttagcccgcatctcacccaccgctccgctctggccacctgtctagctggctatcacgctcttcttccatcacgcgcttgccgcagccgcctcccgggagtggatgcaggactcaagatgcgtggatatctcggaaagtgagaacagagcaagggcgccgagcgcaagtgtgtagcgcttgcaggtacttttgggaccgagtggagcacgacgtagcgcctcaccggatcttgcgagattgcgcctgacacaagcgctgcactgagggtttgagggagtgtggggcgggacctaaggctcttgaggcgcgggatcctgctgagagggtgtggttagcacacttgaccacctgcgcagagaagagggggcagagcttaggggaacagagcatggaccttgtgggagtcacagaaaagaatggctgcaacctgagcccatttgcctttgagagctgggaaagctaggccagcaggtagcagcttgcctggtcgaatggcccttggtgagtgttggaatgctggaaacccagagaccaaagctgccaggctcagctccaacacagtctcatttgtttggtttgtggcagactgcctgcaccccaaccctttcctccccagtcttgcctcctcctgccccctctcttaaactcttacggtctcaaagactgggtttgagggaaacctactgtaatggattgatatacttctccttcaattgacaagagacttaatgtcctagagaaaaattttccttaaactgtacatatccaaatttcaaaaaatgtataacagtcagtatcaatgcaaactgagcaatctgcctaggtacctataaacacacaagatacctataaacacacaagatacctataaacacacaagatacctataaacacacctagatacctataagcacacaagaagcttatagagcaccaattagactggaacagaaaagaaaatcctcctgccacataataacccaattttcttttcaaagaattttttaaaaatatttttattttatgtgtgtgggtgtgtgcagagcccatagaggccggatgagagcatcagatctccctgcagctggaggtacaggcgtctgtgagctggtactcgagtgtttgggaatcgaacctgggtcctctgcaaatgcagccactgctcttagccactgtaccatcattttaaccccaatgtcaattttcagtccccaaagctttgctggtatgtgatacaaattttataaaagtagaaaatgaggagaacttctttgcaaagaaataggatgtagcccaagggaggaaacaaaaaaccctctgagtgaaaaaggcagattcttcaagtaaaatgaatacaaaaatccccaagaatgtgatattttggcaaaagccctctataccatccaggtctgaaatattaaaagaattagagcctttcaccaggtggtggcggcgcacgcctttaatcccagcactcaggaggcagaggcaggcagatttctgagttcgaggccggcctggtctacaaagcgagttccaggacagccagggctatatagagaaaccctgtctcgaaaaacaaaaacaaaaacaaaccaaaaaaaccaacaaaacaaaacaaacaaacaaaaaagaattctagcatctttcacatacaaaagaaagtaccgaggaaaagctggaatggagctctttcatgttcttccttgagttctttgaactgaaacaaatgatggaaaatggcttctccccagaagccatcaattctcagtagaaattcaagaagcccattcatgaaaattcatggaaggccacaggaagctgcacccaagctaatcacctacctttgccaagtatactgaaatagctccatgttcttagtatgtctactgttccgtgtgcttggcacaggtctgtaattgcagcacttgggtgtatgtggtagagagagacgtttcaggtgttcagggttatcctctttggcgatatagtgagtttgaggccaggctaggatgcatgagaccctttaattcctgcacttgggaggcagaggcaggaggatctctgactttgagaccagtctgatgtacagaacaagttctaggacagtcagggctacatagagacaacaatctgtctcgaaaacaaccataaaacaattgtgtgtgtaaaattattaaattattgagctttctaggaatttaaagctttaacagtgagatactttgcttttaaatatcaatgcccaattcattcatatttcttcaaatgaacgaaaatgaccagtatgcatatgttgttactggaatgcattctttttttacctttagaagatagaaagtaatactccaaaatatttaataaaatattttaaagatggatgctactagtgattagtattataagtagttgttaactgataacattgattacctaacaaaagttgactgtgagaagatagcatttctaggatgtacaggagaaaacatactgatttctagaaactatcaccaaattttaaaaataatatttttattaattctttgagaatttggcatgtgtactatatcacccccattcctttctctaaccccttgcagatccaccacctgccaccctctctcaacttaatctcctcattaaaaaaaaattacccacagtgtccaatttgtgctgcacgtgaatgcctggatgtgaaccatccactggggtggtgtgcctaccaaggagtcaaaaaaccgtgactgtccctctcccaaaagctctcaactctaaatagtgcttccttatgcttggaatggcgattaacacaagcttattcaggcagctacagttcacaagtacagcagttaatgtcctgtcctgaaggttttgttttgctctggtccggctttgcctatacatcacaaagtctgtttcttcttctgccatggtcactggtccttggggagaggggactgcttttgaaaatgaaggtcatgaatcgacttcaggaggcccattgaacttgtgaaacgttgtgctcaatatttgccctgtatatgctttgcagagaaagttttcttgatgctgagaatcattggtgtcagagataaatccacagtctgtaaactgttgactgtagctctctccttacttagcatatgggggatgtggttattaaatgttttattgtatgcttttcctattttgttttttggagtaatttttggcaggaaaaaaagtaataaaatgaagagtttgaagttgaaaaatataaaacagcaaccaaagggaaatactcactttagaaatgagtacattcaaatatacctgagaaatcattacattaaaactatataaagtaaagccaagtggtgatgatgcacacctttaatcccagcacttgagaggcaaaggcagaagcagagaggcagagagaggcagatgcatctctgagaattcaaggccagcctggtctacaatgcaagttccaggacagccagggctgttgcattcggaaaccctgtctcaaaacaaaacaaaacaaaacgactaaccagtcaacaatagataacaacatcatgccctgtataaaatacctacaagttaatgttaaaacacaagtcaatagagtaggggaaaggcagtgtgcatgtggggagtactcaaatgtccaacaaaagtaaaaatttgccagaatcaggtgtttgtttgagggaggggaatctcaggaagcttgggatatcttgttcaactcatgctcctgcctccaccattcaagtgctagcagtataagccttcttttttatttatttatttatttatttatttatttatttttattagatattttctttatatacatttcaaatgctatcccgaaagttccctataccctccctccgccctccacccctacccacccactcctgcttcttggccctggcattcccctctactggggcatataaagtttagtataagccttcaataacaaacatgttcggccccagaatccccatattcaaagctctgtaatgtagcaaaaagtccacaagatggcgatagagacaaggtgctaggttaagtagaagaggaagttcaaggccctcttttccgcagggaaagtttgtgaaatttttcctggtccttgctctagctctgtctggtggaatgtaacaatgttggaggaagcagtttcttttttcgggaaggagaaagatctagggatatcacgctcattactttctacacttatctgaacgctatctggagtcagaaatcaaatagctgagcgcatttggatagcagtgatcaaaactctggaaagagaaagtatactgcaggggaacagcgggctgctaagtaggtgtaggtagtccctgctgaataaactaaagtagccaacgacttgaaaagaaatagagagatctgcagagaatttaagaggtttaaaaggcactgtgtacacatgtgctgattttggaacttcctacaaagctgcacgaatcaaaagtacatggaggggttggagagatggctcagcagttcaaagcactgactgctcttctgaaggtcctgagttcaaatcccaacaacaacatggtgactcacaaccacttgtaatgagatcggatgccctcttctggtgtgatctgaagacagctacagtgtacttagatataataaataaataaatctttaaaaacagaagtacatggaggtggatttgaaggtcagcagctcatattgctgatggagtttacttggagtagagtggaaaatgtggacataactgtgagtctgtgttctgattgttgcctcccagaagatcaactcagggcattaatgattgatccacttacatgaacttcctcaggcagacatttaaaaattaattatagtgttgttatctaggttatgacaacatagtcaaagccagcaaaagggatgctttgaggtgacgataggggaagatagctttgaaattttgtttctacgcattctgggggaactacaaagtcatctatgtgcccattactcaagtcatattcaggagaaagggggggtggaaaaggttgaagtccttaatctgattgtaaccagcttctaggttcacaaaggcagtaaggtgaaggacaggacaacattgaaaactgcctgcttgccgggcagtggtggactttaatcccagcacttgggaggcagagacaagtggatttctgagttcgaggccagcctggtctacagagtgagttccaggacagtcagggctatacagagaagtctcatctcaaaaaaaaaaaaacaaaacaaaaaaaaacaaaacaaaaacaaacaaacaaacaaacaaacagaaaactgccttctgggtattaaaagtgtgtttcaacgaacatagagcccatctggagagatagctttgtctcccttctttttgaagtttcttttttatgtgttttggtaattaccagcatgtgtaccacctgcatggctagtaatgtggaggccagatgcttgagtcagatcccctggggctggagttacagacagctgtgagctgccatgtgggtgctggaaacagaacctaagtccttcataagatcagccagtgctcttagccactgagccatctcttcagcccctttgtatcacatctttaaggaaattctgtcaagtctagaaaacagacccccatggccacacacaacaaagaatgcggattttataaaaatttacacctcaaattccaatatgcaaacacacttcaagtaaatgagcaatgggcgtgtgagaaatctttggtatgggacaagcccacacagggtgtccttgcaaggacattctataggtctcagaactgagccttcgttatgctgctggaagccatctttatctagctccgttgagtgagagtttgcttgggaacagacctggtgataattatgtaacaggcagaaactggctgaaggtgctgtagcaagtgacacaaataaacttgttcattcttggaggaggggagcagtggggtcaaaactctgagaaagaaaggacaatctatttcccaagtggcaagattataaaattcaacctgtcacagtgacaaccaaaaatgacctggtaaacaaataggaatttaagatttgtacataagaaaaatagagccttcctgctcataatgtagatgtgcagcttggccttcatgtggatcctgaactactggaacactggaacgggggctatcacaaaagctgttgcctgtccatgggatttgttctcctagctgagttgcctggtgggcctcagtaggagaggatgcacatatcctcacagaaacttgatgtgtcagggtgggaggatacccaggggccctcaccagctcagagaagaatgggagggagaaggaagaaggatcatgggagggggggacctggagttgggggcagtgagcaggatgtaaagtgaataagcaaaaaaaaaaaaaaaaaattgtctcctggagccaggcgtggtggcgcacgcctttaatcccagcacttgggaggcagaggcaggcagatttctgagttcgaggccagcctggtctacagagtgagttccaggacagccagggctaaacagagaaaccctgtctcgaaaaacaaaaaaataaaacaaaacaaaattgtctcctggaaatccagaagaccagacagaagatagtcaaccaaagaaaagacttgagtgatactgtaatctgactgtataacacagaacaatacaaaggcataacagtaggaaagcaagcttctcattgtaggctcggtcttcagggaagactgtatcctagggcaaaaaccaagtgtttcctcgggatgtgctaaacctggtgctggcccagtatcctctgcaatgatagaattctacctagactgctccatttttcagccagcctctattcagctagactccagaaaaacaagttcagtgtttggtgttttgctatttggtcactaggtggcagtataagcccaggtttgtgctacagacttaaagccataaaaaggagcttggttggtcatatttttacaaatacaaatatttgtagtaccttggatgactttagatggatgcagtcctctgcagtgatctatactatagtttatatgtaactccaattaaaggcatttcaaatcagactggattagcatggatacatttttgggctgttagctccgttctattttgtttacatatgtttcttttttcactcttagggaaactcattccaacagtcccacagcttcttgtcagaggtcctcgataaatattaaaaggttgaattgaaacacagcaagttgtaacacatcacacacatgtatacatatatacatgtatacagcaaccatatgctagctcatagcacatggtagcccgcaaccctctataatggcatctgattctctctttcattgtccatgaagacagagaacacatatagattgagtaaataaacaagtaaataaatgatctttatacacatacctctagggaaaacaatatgaatatagctctcataaattctcaaaaacaaatttaaaaataaaaaaagaacttaaccacatagaattatactagaaataaaagcaaaaagatatagggaaaattcacaaatgcatcgaaatacaatttgcctaaacatccaaagaatgaaagaagggaaattataaaatatgaagatggataaaagcatctcaaagtagcagcagaccagaagttgtagcatggagtaatagttgtaataggaaatttatacttgtaaatactgacataaaagaaacattaaaaagacagttaaaaaaaatgggtgctgtaaatctgaccaagaacccacaacttggacactcaaagacccttggggtgatagtggtggaccatccattattattttgcttatcagacacatcgtctaactcctctctaaatacagacctccaacgggagaggctggctcagtggttgagagcactggctgcttgctcttccagagcacctgaatgcaattcctagcaaccacatggtggctcaaagcacatggtggcccacaaccatctacaatgggatctaatttcctctttcattgtccatgaagacagagaacacatatacattaagtaaataaagaaacgaacaaataaatgatcttttaaatgaatacttctagacccatggattagggtagctctcagacctccccagagacacttctttgtgtagtgaccagggctttgatgtggtcaaaatggagagaatagtatctgtagagtgtgaagggtgctcagttctaaatggagcatctatatcacacagttacatgcaaacctcagagaaaatcacttaagacaggggccatctgggctgggggttaagcagcagtgacaggaccggtgctcaggagctcacagcagctgtgattccaatactaggggaggtactcgatctaccgctgaggagccattgggagttaatggtgtggccctctgatagatccatcaacctgcaatggatgaccccatctccatgcatatatggttggttggcacaaacgggacccagtgtgttattaaaaaacaaaaacaccattaaaaaaaccaccacaccaggccaaagccatcatttttagcatcacaaaaaaaattgaataaaatgaacaatttcttcgactctatcagggaaataacattccccaaattacaaagtctcttagagagagcagcgacttgctgatgagtgagaaaacagctcctgtccacagacagtgtgaacacaggaaaacaaactgacgctttcttggaaggtttgtttgaataaatttaataataagataatccaggctatatccagcgagcaatacacttttgtgacttttcttcataggagccctagagcatgttttttagtgaaaatgatctccatagggattggaacagaaagagaaaaggaagcattctgaaacacccccatagcagtctgctctcctagcttcagcctcagacaaacgtgactcattagaaattcaagtaactgagtcccttaatccccaggctgacatgcaactcctgagctcgaacattgccccaccttagctttcataagactcaaaccgacctgaagggagggaaaaaaaagcccaattctagcccaccacgcttctgcttaaccgacgggaaggaaaactgtacaagacccaagaagaatcgctgtgatgaccacagttgagtggcatagatacagctaatgaacaccctgccaccatcaaggcctcctgtaatatcagagaaatacaataacgtgtcatacaactcagaactaattcaagaagtctctagagcaaccaaagcaacaaattaggaaaaataaagacacttggaacattctccaacctgggatccctctggctgtatcaaacagtggacacatggtatagccctcattttcaaccacatcaaacactgtatgtaaagcttactaaaacaaaaaaatctcagctagaaaatacagatcagaaccaaattcaggcgtggtagacatctgcaaggattagatggtacatctaattatgattaacatggtaaaagtgctaaaacaaaacaaaacggtagactggttttgacccccggacaagggacagaagtgcttattttacatatcaatgcagacctggcttccaggttctactagcagcgttcagtccctgcctgatataccttgttcccaaccttgaactttccagttcaggggcttagctgcccttccacaagacgttctttccaatgttatctagacattttgcgccccacccttctcctctctgcacgagcgcaccccttcttcccttttctcctctcccctctccccatggcaactcctcaatccttgaagccagtgaactccccgagagcagttccccaataagcctacctttaatgcaatcggacttgaatagtctcgtttcacgggcagagaagtcattgatcggagacaacatgcatgaataggagaccaacaccatcaacacaaccgatgctcaaaatcaatagcattaagaagtgagcattcataaagatttggaagctaacacttcagagcacactccagaagaacaaatggggtgtgaggggaagggatttagttagggattttgcttgtcattggcggtgcatctctgcaatcccccaaatctggaaggctgaggaggatcagaagctcaaaggctgcctggaatgcgtggggagaatctccctctaccaataaagagacaaacaatgccagacaagcagaatgtatcaggagacaactggaaatgggataaagatacaagataatacctaaaacctaatggaatgaatgaagctaaagccgcacaaaggtgtgtgtattggggggtggggggagttacagatgcgcattcctaaggaaggaatctctgagtcaccaccacctgcaggaaaaccttggcagaaaacagaaatgacaaaggctcgagcgtaaatacaaaattttaaaatgctgtttttcttgaaaaaaaattttttttaagaagctgatgaaactaagctacaccaataacaaactcaaatcacgtttgcaaaaggagaccttacaatcagtcaatgcttaaaatctctcaagagccgaagcagaagggatgctatctaactcaattcatgatgccagagtgatcctgatatcaaagccagaaagagacacaaaagaaagttaaaaatttatagcccacatccctgatgatcatcatcattacaatatccataacccgagtttgatggaattaaaatatccaggtgggatttactcatggaatgcaagaatgattcaacatacaaaaatcaatgaacacgatatcaccacaatacaatgacgatcatcttgatagcattaaaacaaaaacaaacaaacaaacaaacaaacaaacaaaaaaacccacggggctggggagatggctcagcggttaagagcaccaactgctcttctgaaggtcgtgagttcaaatcccagcaaccacatggtggctcacaaccatccataatgagatctgatgccttcttctggtgcatctgaagacagctacagtgtacttacatataacaaataaataaattaaaaaaaaaacacttggaaaaactcagtgtactcatgattaaaaactctcggtaaaccaggaataggaggaaattgtctgagtacataagggccacattgaaaaagcccacagctaacatggtcaatggtgaaaaattgagtgctttccctttaataagatgaaggaaccaagaatgtttgctctcttagattccaatcctaatagaattgatggtcctgtgcagaacagttggggaagaaaaggaatccagggctgggactgtaccacagtctgtagaatgcttttctctagaatgcataaagccctatgtgcaatcccaatagtggtacaagcctatgaccctgatactcaggacgtagaagctagaggatcacaattcaacgttaccctgggctaaagaccctgttttactttattactttttttttttttaatatctgaattgtaactgactggagtactctgctcacaaatgccatgattatttatgtgggggacttacgaaagtctacacacacatacacacacacacacacacacatacacacacaccatacaactcaggtaattcagctgtaaagttataggatacaaaatgagtatataaaagtgaattgagggccactgagatggctgagcaattacaaacacttgcccccaagtttgaagacctgagtttttgtttgatacagccctggctggcttggaaattactatgtagaccaggctggctaccaatttatttaagatctgtctgcctctgcctttgagtcctgggattaaaggtgcaagccactacagcaaacttggtgttatagtttaaatatatggtttactcctagcaacttgtatgttgtcttggtgctgaaatgtggtggcatctttaagagggtttaattaatttctcaagagcctagctgagttcttggattttaagaagaggttgctataaaatgatcctagcatctacctgatagctcttgtgcatatattatactggacaaaatagatgtttccctaccacaactctcctatgagttaacactgcttccaaccagaaactgagaaaatcctggccagcacagtcttgaatgtctctgtttccagaattgtgacctaaatttatctttactattcatgacttaatctaggttgaggaatgttgctataacaaaaaataatctgagataattgctctgactagaacatttaatattgttaaaatactacttctgttcaaagtgatctgtagagtcaatcaatatctatcgcactcccaatgggtttttgtttgttttctttttgtattttggaagtagcaaaaataactataaaatacatatagatgcgtgaagacccatgaacagccaaaataatcctgaaaaagaacagctcttgtccaatggaccttgggggaaaccaaacgtcacattttacacagagcaggataaggtattggttttcattttgcctctccagaacacaaaacctagatttttttgtttgtttgttcatctgttttaatagggcctcatctttagcctgggcttaccttgaatttggagtctgcctccctcagttgctatagttctgggattataggcataaggtgcaatttccagcaaaaatcctttaagggctgcttgaaactcactatgtagctcagcctggcctcaaactcataaccatcctctcaagtgctaggattacatgaatgagccacagtagcagctaaaaccctttacattttattagggtatattctatacaatatgagtgccattataacatcacatacacgtaagattttgttcctattcactcccattactctctttttttctccctctcacttttactgatccccttactctgctcacacacttctgatttctggtttcttctatagcatggatgaagggttatttacaggaacatggcagattcttaccgaagaaagtatccccccctcccaactccctcagcaaacaataactactaataccccttctgcagggaggaatgaggcatcttggtcccttacgtctagacactgttaactgcctcctcggggagggatgaggccttgtgagcctcttgtagcaactgttaacttcctacacatcctaaggaatgtgggggtccccttgtatacacaggccttgggtagggtaatcataggtgctgtgagtttatgagtatgactgctgctgtatgttccacaataccccatcccttcttccagctttacctttctgccctctttgctgtggtgtttcttgaaccttgcaagggaggagatgcagatcccattagggctgatcttcaacaatcacacaatcacatattcttttttgtttgtttgtttgtttgtttgtttttttgagatagggtttctctgtgtagctctggctgtcctggaactcactctgtagaccaggctggcctcgaactcagaaatctgcctgcctctgcctcccgagtgctgggattaaaggcacgcccagccaatcacatattcttatgactcagagctaaaagtctgcacgaacagaaactagtcttaccaaagctgacagtagcacaaatctacaggtataaacatacatggttagaagacaatttgatagtcataaggtggccagctagggaggcaatagtggtaaagcttctccattagagcctatggtctccccagctagaggcttttgacaaggcatgaactttctcctagcaagtgagcctcaactccaatcagaaagttaattagccaaataaaaaaaatggtaccctgtgctcagcttggcctgtgagtaaatctgtgggacattttctcggttaacgatcgactgggggggggggcagtccacttaaaccatgtgggtggagccacccatggacaggtggtcctgggaggtatgaaaaagcaaagtgagcaagccatggggagcaagccaggaagctgtcctttgtggttcctgccctaatttctactgtgatgtggaagtacaagccagataaatcctttcctacccaatgtatttttggttagaatgttttatcacagtaatagaaagcaaactaaaaactaaaacatctttctaactttcatgccacagtttctttttcttcctttcttttttcttttctttcttttcttttcttttttttttttttttttttttttttttggtttttcgagacagggtttctctgtatagccctggctgtcctggaactcactctgtagaccaggctggcctcgaactcagaaatccacctgcctctgcctcccaagtgctgggattaaaggcatgcgccaccactgcccggctgcatttttttttttaaattaaaaaagttgaacctaggtgtgttgtctcgtgcctgtaatgcccatgttcaggagagagagagagggagggcagggtgattactatgacttcaacatcagcatgcgcttacatcatcagttagaggccagtctgggatacagagtgagaacctgtctcaaaacaaaaacaaaaaaacaaaaaacaaaacaaaacatcaactatcataagtgacttaaataatggatattaaacctaaatatcacacaacttcacttaagaaaattctgaggactggaaagatggctcaatgattcaaagtgctttccggaggaagcctgaacaccacagtttgagtcctaacacttttatataataagctaagtgtgggcccatgcatccctataagtccagcactgaggctagcagagactggaggattaacaaggcaaacaggcagacacggtaacagcctcttcatgcatgcactagctcacacacatgagtgcgcgtacatcacaaacacaagcacacacaataaatacatttaaaagttttcttctttctttgtaagtgtgaaaattacaaattgtagaattttgatccagataagaggatcaggagtttgaggctagcctgggctacataagaccctgtttcaaaaaccaaactaaaccaaaacacacacacacacacaaagttgacacaaattttcaccatgtattcgacgtgtcaaggctcacctgggtcatgcaagactaaataaattaattgtaactaaatgcaagactaaatgtctaaagtatttttgaaagtctggcttaatgcaatttgcttcggtgttttgtcagatgacaagttagataggtcattccatgcttgtttacgaacaagacaagtaaaatttctcgagtctctgtctcttggaataggtctttccactgtaggtgggagggaaatgtttccgtctcccaagtgctggaatttaaaggtgtgggtctggttgaactcgttttttgtgtccttcagtggtcaggtgccccggctggtgggtggggtgggaggaggagtatctgtctctattgttcctggactgatcctgaagtgtaacggaagtgaaaggaaggttgagtggagggctagtggacagtgactggcccacaacactacctttaagaagacaaatggaccatagtgatgtacacctataatcctagcacccaagaggcagaggcaggaggatcactgagttcaaaaccgtcctgatctacagagagagagagttcaaggacaaccagggctatacagagaaaccctgtctctgggggggaaaaaaagcaaggaaaaaaggaaggaaggaaagaaagaaagaaatgaagagaaagaaaaaagactaataggtcccagagactcccatgacagtgggaaagaagagtctgcacacttcctcctgctggaattcttgataagaaataacctccagagaaatggcaatcatttacaatttataccacaaattatactacactggaacaccatagtaggccttaggagaaaaacagacgcttaaacatccctacttggaggctttttgaaaacaaagtaaattatctttactgagcaagaaaacacttggtgtctaggtaaccctgtagcatgtgtgaaacaaaagactattgcccagacagagcctcaactttctcctttctattaaattcacagtaaaaagcaaacatgtatagacataagtaataaagtcaggtgtaggcataaatcaccgcatcttttctacaaaagtgagcttaagcgttttacctttttaggacagagtgaaaatccggaagttgtcttctgattgttacatgctgccacggtcctccctgtcactgctgccattgggctatggcctggtgtctgtactcaaactgaaaacttgcaagctagcacacgtgctggcggagtgtggacgcacgggtacacgtgcgcacgcatgaacacacacacatgcacacacgcgtgcgcacagacacacacacacacacacacacacacacacacacacacacattttgcgcatgcgtacagatatgtgcgtgcgcacacacatacaggcacacgcacacatgcaagcgaataaaattaaaatatggtaggcgcatggtagaacatgcctttgatcccagcatttggaggcagaagcaggcagaactctgaatttaaatccaatctggtctaaaatatgagttccagttcatccaggaccacgacaaaaagaccctgtctcaaaaacacaaatcacaaaatggcaaaatgaaacaaaacaaaatgaaaaccaaataaaatagaaataagaattctaccttcagctgagtgtgtgtttgtgttatatatgaatattgtgatgaatatctgtaatcccagaactgaggactttgagacagaagaattaggagtttgaagccagcctggaaaagatggccagattatgactgtttttctaaataataagtaaagaaataaagaaaaggagaataacaaccaagcatggtgataaattcgtgacctcatcttctatgtatatgatgtaaaagtcatgaagtaataacctcttacaatattcaagtagtagctttacttggaaagaaagattttaaaagaaattttattttttagacagtcaaaaatataattaagaagtatcgtatctgtgctaagcagacaatataaaattcgggaacaaagaacatatatctttatctgtttgcttatttttatttatttatttatttacttacttacttacttacttacctacttattggagacacatttttttctatgtaacagccctcactattctggaactctccctgtagaccaggctggcctcgaactcacagagatttgcctgcctctgcctcccaagtgctgggattgaaggcctgtgccatcactgcctggcactttttctttctgtctctgtctctgtctctgtctctgtctctgtctctgtctctgtctgtatctcttccttcctttctgtctctttcttttttatctttagtatttttaaaggcatgtttttatctgctagctatttatttttgaggtagagtctcacgatacagcctcaactagcctggaactcagaaagagccatcttcctccccccaccacacctggcaggttccttttaaagacattacttctcaactcaaataatgctaaaatcaattgagctgtttatcatctgactattgttggttagctagaaacttctgaagtgttgcaatgtttagctaaagtctagaatttgctgtttttccatgtgttaagtgtcaggaaatgcgaggtaggtaagtgtttgaagatagtgtctgccattatacaaaatgctgagtgataggctgattgagtgtacaaccaaacagatccagatagtcaccaacttatttattagttgctggactggtttttaccaaactatgaggaaaagtaggagggataaaaaagagtaatagaggggtgaatatgcaattatgttatatgcattatggaaatagttaatgaaatctttactttgtacaaatagtatacactaattaaaaagatacaaatagctgatatgcaagataaataagttttacagatctaatgtatacatagcacaggcactacagttaatgatactgtgttagatcctttttaaagaaaactctagttttgctgagcgtggtggcacacgcctttaatcccagcacttgggaggcagaggcaggcagatttctgagttcgaggccagcctggtctacaaagtgagttccaggacagccagggctacacagagaaaccctgtctcgaaaaaacaaaacaaaacaaagagtactgactgctcttctagaggtcctgagtccaattcccagcacctacatggtggcttacaaccatctataattccagttcttaggggacattgacaccttcttctggcttctgtggacactgcacagatatggtacctaggtatggcagccaaaacacccaagcacataaaataaagataaataaatatttttaaaaagggggatgggggtggacagatggctcagcggttaagagcattgactgctcttccagaggacctgaattcaattcccagcaaccacacaaccatctgtaatgggatctaatgccttcttctggtgtgtctgaagacagctacagtgtactcaggaaaaaaatagtttttttttttttaagaaagaaattcagatatctgctgtattgtactctttattactgccaggacaaaatgtccagaacgataattcaaaaatagcccactgacttttcacgtgctagaaggtagaaagtgatagcagatttcatgccatgcagatgatccctgtttccacagaggtgcttctctcacaagacagaagaaatggaagagcaaaagacacaaccaggagtgtacttttagctgttcttacaaggacagggacagtaatcgagtcatggaggcattaccaaatacatccaaaaaggccttatctttcttgttgtttttgttcggttggttttggttttgaggcaaggtttttcggtgtagttctggctatcctggaattctggagtcaggctgacctcgaactcacaaagatcctcctgactctacctcctgagtggtaggacaaaagccgtgcaccatctgatcaccctactcatgatgtgtgcatgcacacacactaataataacaagcaaaaaatatctttaaaaagtctaaaaccacaactttgagacagacattaggtagacatacttattccaaaagtcagaaataggaaagaagaaagggataaattacgccaaataagccccagacatggcagggcaagagttcgttctgtgtgcgcacgtgctccaaagtgtttcattacagttgctttcagagtcctgggtgaggggattatttgtaggagaatggactccctacaagtagttacacactcagatcttctctccctttctcaccaactatagaccccccagggaggggtggggtaacatcagctcctcccaataggggaaggttttgttggtgttgtgttgtgttgtgttgtgttgtgttgtttgagacagtctatcactatgtagcctgattggcctggaattcatcaggtagaccaggctggcatctaaatcagagattcacctgcctctgtattttgactgctgggattaaaggtatgtacaccaacatattcccctaagaggggatggatcccagggtctagatgccattgctctctctcccctctctctttataaatatagttttaagatttttacttgtatttatcagtacagggggtgggttgctggagtatgccagaagagagtattggatcgcttggagctagagttacagggaattttgagacatctggggactgaatataagtcccctgaggagcagcaccccaacatggtaatacttcatcttaaggctcaagagcaaactttggctccaagttctgcctctagacacacggagcgccatttgggttcacagggctctaagcttgcctcgctaggcacgctgacacagcacttcttgtcagtcggaaccagttgctggcacctctcccaagctgtttttgcatactggtggctctatagctctggcgtcataactgagagcagtgttttcatagctcttttgggcattgctctcattgggggtctattctctgggcaaaagtcgctaagcactgtgctggtagagactttatatcagccttcctctggttctctgcttggctctcaaaactcatggaggaatcctttgaaatctaggtgaagctagtcatgactccacagctcatacgtttggaggcagcagttccttgctaaattctactttgtgtgcattaatgtctcctaagcaagtctagtagaaaatcctttataatatcaattgtagtacttcaagtttcttccgcatcacggcatcggctgagtaacagtcccccagatagatggaacaatagaagattacaaagtgagaaaaggaaggaagtagaaaaactggtgtttacttggttccagctgttttctgattcaggaagaaaggggccgggcatactctacccatttatagtaagaagatttttttgttttggtgggtttttcgagacagggtttctctgtgtatccctggctgtcctggaactcactttgtagaccaggctggcctcgaactcagaaatctgcctgcctctgcctcccgagtgctgggattaaaggcatgcgccaccatgccaccacgcccggcttgtagtaaggagatttaactgtaccatgtaaggcaagagctcctcatgtcagagttcaaaaagtaaatgtgctgaaccatcacttggtttagaacagcttaagcccccagcccccaccccaccccaaaccaacccttgactgtttaattgctgataaggaataaaagccctttcctataaaccactgtttgtttgtttgcaacgaaatcagagatttactatatggatatttaaaaattcagaatttgggggctagagagatggcttagaggttaagagcactggctgctcttccagaggtccagagaacccagtttcaattaccaacaaccacatacagatcacagctgtctgtaacttcagctctaagggatcctataccatcacacagatatggatgcaggcaaaaaagcatcaatgcacatggaataaaaataaataaaatttttaaaatttggaatttacaaataatgaagatccctcactggttcagccactcaccgaggtacctcactccagcaatttcccctcaccagacttattcatttttaaagtttagatgtttgaatatttattgtaaaacagcaagcacaatgatttctatttttataattggtgacgtgatctggaaaaatacttctaattggtaaggcaagagtgattgcaatgcactcttcatttttttctaacttcttaaagtatcttcttttttaaaattaaaactttattataggggctggagagatggctcagtggttaagagcactgactgctcttccagaggtcctgagttcaattcccaggaacctcatagtggctcacaaccatctgtaatgagatctgatgccctcttctggtgtgtctgaagacagctacagtgtacttagatataataaataaatctttaaaaaaaacctttactggaaggagttacagagacaaagtttggagctgatacaaaaggatggaacatctagagactgccatatccagggatccatcccataatcagcctccaaacgctgacaccattgcatacactagcaagattttgctagaaggaccctgatatagctgtctctagtgagacttcgcctgggcctagcaaacatataagtggatgctcacagtcagctattggatggatcacagggcctccaatggaggagctaaagaaagtacccaaggagctaaagggatctgcaaccctataggtggaacaacaatatgaactaaccagtaccccccagagctcgtgactctagctgcatatgtatcaaaagatggcctagtcggccatcactggaaagagaggcccattggacatgcaaactttatatgccccagtacaggggaacgccagggccaaaaagtgggagtggggggaagggtatgggggactttttggatagcattggaaatgtaaatgaggaaaatacctaattaaaaaaaaaaacggggcctagcaaacacagaagtggatgatcacagttagctattggatgggtcacacggcccccaatggaggagctagagaaattacccaaggagctaaagggaactgcaaccctatagatggaacaacattatgaactaaccactaccccggagctcttgactctagctgcatatgtatcaaaagatggcctagtcggccatcactgcaaagagaggcccattggacttgcaaactgtatatgccccagtacaggggaaccccagggccaaaacgggggagtgggtgggtagtggattggggggggtgggtatggcggacttttgggatagcattgaaaataaaaaaaaacctttactataaaaaaacttgcaaataaaaaattacccaccggagctaatgaccagatctttaatagttttgttttttatattgttatagtgtttgtgttctcagcacacttaacaaaagcaacagaaaatataagaaattaatctactcaactaaactaattaaagtttattttgagacaggatctcactatgtagtcctgaactggaactcactatgagcagctggcttttaatttaaagacccacaggtttttgcctcttttgcctctggagtgctgggattaaaggcatgagccagcagcatcccagactacattttaagaaagggaaaaaagctggtcgccgggcatggtggcgcacgcctttaatcccagcacttggaaggcagaggcaggtggatttctgagttcgaggccagcctggtctacagagtgagttccaggacagccaggactatatagagaaaccctgtctcggggggggggaagaagaagaaaagaaaaaaaaaaaggaaaaaagctagtcatgatggtgcatgtctttaatcccagcactcgggaggcagaggcaggtgaatttctgagttcgaggccagcctggtctacaaagtgagttccaggacagccagggctacacagagaagccttgtctctaaaaaccaactaaccaaccaaaccaaaaccaaaccaaaccaaaaaggaaaggaaaggaaaaaacgaggtaattagcataattagcatgacaaggaaggggtagtgagaaacagtgacacagaaacgcaaaggtttcaagcagaatttattggaagtttggcaagcaacaaacaccctagttggcctgtagatgactttagattgttttgcggtgattttcattttgaagaaggatttccaattttcaaaacagccaggctcaaattaagtattttccatttattttagcagtttggtatagatttgttttcggcttagtgtgtagagatgtttgtttgtttgtttgtttgtctgttttccatcaggacttcatttatgcatgagggcacaatggtagctgatggtgacacgtttctgcctgcctgcttaatcagttgggttcatggcaccatctgtggaagaaaggttttcaattattctctatttttcagtaatgcctccctcgtgaacatctttagaaaaggggccttccaaggtctaccaagtcttatcgattctctctctgtgttttgttgtttgggaggtttttctgtgtaatggccctggccgtcctggaacctcctttgtagaccaggcagactttgaactcagagagatctgcctgcctctatctcctgagcactggcattaaaggtgtgtgctaccgccatccagctgattgcttatattaaagggcaaacatcagtgtttcagctatattagatgcctacgtgaaaaggcagtatggggctggagatgcagctggttaagttgcatgctgtcaaacctgtgagggtgcatacgtgtaagagtacttgccaatacaagcaatgctaaacagttaaatgtctgtttccttctttacctatggatgttgtcattggtttgctttgtaaactatagttttgacgctgtgaaagacagaaggcactacagaaactacaaaatccttttcctttgtgtgaaatgtgaaagttttaagaaaacttataaagaaattgcactgatttgattactaaacgtcagttctacttaatgccaagcttagccaataactatttacctcacttctttccaggaaaatgttcatggtattttattattattttaaaaattatatgtctctgtgtcacatgagtgctatatctgcccagctcttgagctgtttaaggtttactgtaaatgataaaagttgtatgttgggctagagagatggctcagtagttaagagcactgactgctcttccaaaggtcctgagttcaaatcccagcaaccacatggtggcttgcaaccacccgtaatgagatctgacgcccttttctggtgcatctgaagacagctatagtatacttagatataataataaataaatctttttaaaaacagttgtgtgtcttttatttaatttatacaagtgctagtgcctacaggggtgataggaattgggtctcctggagatgaaattataggtgattgtgagcagcttgacacaggtgctggggatcaagcttgggtcctcctctgtaagagcaatatgagcttttaactactgagccacatggttttagttctttataggagacactgttttttgttgttgttgttgttcttgtttttccccctccgttctgccaagtcctggagagtgttcgagaccgtgggtctattctatattctcagagctcaattgttctggaaagtcagagcctaagaggtaggatctcagaagtaggactggctgtggattggctgctcagctcttccctagcttctactccttcactgtgattgtagcttcagggattctggctccaggggcagcagtacagtttagtgcgatctgaacattaggaccctataaacttgtactgcttcagatcctcccagttccttcaaggtctcatttcttttttttcttgataactattactcacaatctggttcctacaggtgaaaaccttatctactccccagggatctcagctgaaccagcctgctggggctcctccttggccagattcaagagccttggacttggtttgttaacaaaggggagaggaggggctgcttatctggggatgtctgagtgggaaaggacaccagggacagtccttgagctagagtcctcccttgtggccaaagtacagtgtaatctgtgggaacagtgaccatttgtgtctcttccttacccttgatgttctttgattgcctagaccatcctcggaatgggatagggtgccttctgtctcctggatactgggattgcatcatactcggcttttgtagtactaaggactctaaccaaggacctcattcatgcaaggcaagtactataactagtgagctacatcctgattatccctccattgtcttatttattatttggttagttatttatttggtagggtctcactatttagccctagcttgcctagaacttgttatgtagaccatgttggccttgaagtcacagatacttgtcagttgcctctctgagtgctggagtgctaggcttaaaggtgtgtaccctagacctggcttccagtgcctttaaattccctgtatgtatgtcaggctgcaaggatgaaatgtgtgacttcaataacaatccaaagggcaagaaagatacctgattcagtttcttccaggtcttggtcagcttgtgggttctgatcagtgaacatctccctagaatatatagtgtaatcaattgtcaataggctaaatccaacaacttagagagacatgaaaatcattcatgcacacacatgaaaatatgacccatttatatttgaactaagacaggctatctacccccaccttctttgagacaggctcttactatatagtcctaaccagcctagaagccactatgtaaatcatgctctacgtagctctcaaaaagaaatctggaagtggcaatgtggtgaggtagagacggtgatggagagctcaaggccagcctttatcccaccagcagtctgggaggcagaggcaaatggaagctactatgtggagcaagttggcctagaactcctgcttctgcctcccaagtgctagaatgaaaggtgtgcactatcttacctgactatttttccattttaaaggaaaaaagacatcaaatgtgagcctccccctgccagagcctgacaaatacagagatggatgcttgaagccaactattggactaagcacagggtccccaatggaggagctaaagaaaggactgaagaagttgaaggggtttgcaaccccacaggaagaacaatatgaaccaaccccaagagctcccagggactaagtcatcaacaaagagtacacatggctccagctgcatacattgcagaggatggccttgtcatgcatcaatgggaggaggggcgcttggtcctatgaaagcttgatagatgccccagtgtaggggaattgagggtgggaaggtgggagtgggtgggtgggtgggtggaggaacatcctcatagaagcaggggagggaggatgggataaagggtttcgggggggagatgtggaaaggggatataacatttgaaatgtaaataaagaaaatatccaataaaaggaaaaaggaaaaaaaagaagaaaaaatgtaagcctccactagcacatgacaaatgacagtactgaaaggacagagcatgaaagttcttctctaggacattgcttgtactcaagagcagtcacatgaatacaaatagacttagggtctcttttactctttgaactctctgacttcctacaaaaatgagagccaggcccacaaaaacaaaatcctacataatttcataccaaaatcatctgtgagaaaaggtacacacaaaacagagtagacaaaaacaatctatcccataaaggaacagcagcatattgcaactgatgtgtggaactacagaccagatcactacaacactatgtcattacagacttcatcatcttcctacgttgcttctcaactgataccaaggataagactaagcacagttaatggataaccaactcctattgtatttctcctccctggatttcccataacccaagaacaattgagaatacatacatatacatggaggggcttgctttaatgttgccagtgatgactttcacattattgtctatgtctctgtcactgtgactggtttcatcatcttcagtacatccctatggagtgataaagacacaggggaaagtcaaaattgaagtagataatttttggctgtcaaaggaggacttttgtcttaatgttaaccctagagttgatagtcttaactgatgagaataaagttgggacaaagcttagtaaacagttgtaccttatggactactgcttctctcccacatcaagatcattagtgtagataccttgataagttttgagaaaatgggccttgggtacagtgttcttataatggtagattgctcacattaatgaaagcaccagataccctgaagaagtttgacttggttctagaatattttagtggctttggttgctgactataatcctcaattggcttttattactgctcacatttattttctttctttcaaaatcccaaaaggaaatctgaatgtggcagtacacatctgcagtcccagtactgatgaggtagaggcaggactgagggctcgaagcccagtttttaatcccaccagccctcaggaggcagaggcaaccagatctctgtgagtttgagggccagcctagtctacagagtgagttgtacagtgagaccttgtttcagaaataaataaggaaagaaggaggagtggagaggattatatctgtctaggtctcattcaccttagctccccagggctagtgtcctggcttcagggtaggcaaatagcagctacttggaaagaatctttactttggaagtaaatcctcaattttcatgtattctatattagcaaatttgcaaatattttaattgccttttggtcatttcagacacgcacagagaggtgaacaatttgtcacctggtttcagctctcaaactttaagcacacatcctctacattgttcatctaatatcacaatttccacatttacattccttttgctggcaacctccaccccaaggcatagtgctaaaactctatgcggtgtgtctaagcacacaaggctgtattgatgctg

SEQ ID NO: 111 - DNA, 56094 bp, Homo sapiens
cccggctaatttttgttttttttttttttttttttagtagagatggggtttcaccatcttggccaggctggtcttgaactcctgacctcgtgatccaccagcctcggcctcccaaagtgctgagattataggcgtgagccaccgtgcccggcctactgagagattattgtgtttttttggtgatgttatgtctccttggtgtttcatgtttcttgttgccttaagttgatgtctgtggatttgaacaatttgggacttgtttcagtttttatagaatgctttgcctgggaaagcccttcaccaatcagctcatccaaatattcttggcaggctctcaggcgtgatttgaagaaaaccttgttgctggagtccttgaacaagctggcctacgcctgggtcagtaggtagacaggcctgactcctaaactgcagggttgagtctggacctgcatccacttgggtgaacctgttaattgggactgcactgatgagcccagagcctgggtccatgagtctgaggctgagacctgtgtctccagaggcaagcctgaagcctggtccacagaggctgatctagcacttgatggggtgggccttagacctacatctacaggggctgggcaggtgctgggatgatcctggagcctgagtccacaagcactggcttggcactggggctggcctggaccctgagtccatagtgcaggtctgggtcctgggcccacagggcctggcctggatcctatgtctgcagatatagtcttgaagcctcagtccatgggatctagcccgccattggcgtctactacagtgggccttgaccctgcgtctgctggaacaagcctggatcttgtgttttctggagcctgtttccactgggatcaacctaggctaacctggtgctagggctggtgtaaagcctgggttcacagggtctagtctgaagcctaggtctatgggaactgactttgtgcctggagatcctggggctggtcttaagcacggggctgtcaggctcagcctagagctcatgtccacttgtcccagcctggaggctgggtgtgtaggtgctggcctagaggctaagactgtgagggctggcctgggtttggatgacttgagggttcctgtgacctgagtacactggggcaatctttaagcttgtgtctgtagtggcaaatccagcacaggggtctactgggacaggcctggaccctgggtctgctgaagctatgaagccacagggtccagctagagtgtgaggtcatggggactggcctggtgctgggcaggcctggagcctgtgtctgtgggtgcctgcctggtgtttaagtccagcattgctgacatggtgctggagcaagcctgaaacctggcaccacaggggctggcctggagatgggtttgtgggtgtcagcctaatgactagagttgcagggaacagctgattgctggggtagaactgaagattgggactgtgggggctggcctagtggtgagctggtctggagcctggggctgttggggttggcctggctcactgaggtttttttaatgtgtagattaatgtgtcttatcaaatttgggaagtttttttaaccattatttctcccttttttttaatgctagttcactctatcccctcctgaaacttccataatgtgtgtgttggcatcttgatggtgttccataggtccctcacattctcttcatttctcttaattatttgtatttgtgccccttagactgaataatttcaattgacctattcaagttgtttctttctattggctgctcaaattttctgttgaatgcctggaatgaatttttttgtttcagttattgtattttcagctccagaatttctatttggttcctttttataagtgctatttctaatgtataatttctgtttgttgagacattattctctctgtgttttttagttctttgtctattgtttcttttatgtctttgagcatatttgaaatatttaatttaaactccttgtctagtggagtgaggtcagcatgatgtcagagtaggagattcagccttcctctccctgtgaagaacaattctgcaactatccatgaaccaaaatatctctggaagaggctaggatccacttaaggtgacacaacaatacagtagaagagaaaacccaagaagagccacacaaaaatggtaataagaacaagttcatttcacctccatcactgcatccttcatgctgacactgctcagcatggagagggacctccctagcttaagtttgccttgcaagacaaagcagagcaaggtatagaaccagttttgccagtattttaggacactgcctatatgactagcttcagtttcaccccacccagatctctgggggtaacctgcatagctgagatatctggagacagctgagaacaaagacaagggatgagggtttttttttttttttttttttttttttgagacggagtcttggtctatcgcctaggctggagtgcaatggcgtcatctcggctcactgcaacctccacctcctaggttcaagcgattctcctgcctcagcctcctgagtagctgggattacaggtgcccaccaccatgcctggctaatttgtgtatttttggtagagacagggtttcaccatgttggccaggctggtctcgaacgcctgacctcaggtgatccacccgcctcggcctcccaaagtgctgggattacaggggtgagccaccgcgcctggcctggatgagctcttttagaatcagccaaaaggtggaagttactgtgacccccagtggcctacctgacatgggaaagcagcagacttctccactgaggacccaaacagcccctggagctgctgtgtagaccccacagccttaactgctgaggattcctcagtgtttgaaattgtggagcccagcagcttgtcctgcagaggaacatagcagcttttactactgagaaaaacaaatgccagcacaccagcaataacccccctgccacttttgctactgaaggccttgcagttttcttcaccttcatagtcttaggtgctggcgttacctcccctccccattcccaggagccatgtagggcaggattgctattgctgcagtttcctcagcctggtgacacaacccaggagccttgaagtctttaggtgcctaaccaaccaccctcctccccaaagccacctgaactgcttctgttgtggttgtcccagcccagggtactactgcagtggccttcatataccgcaggtgcctaagacaaccatcctttccaaagccacccctgatgttgcttacatgggtgctctggcccagaggcccagtgcagctgttgcacctgtgcctgcaaagagccccaaagcccctcacctcagaaattgaccccacatacactcaaggctgatctctgcaggactactgcatgctgccagccctggttcctgtagtggtgcatgcataagccactggtcctgccccatgggtcctgcatttatcaccatgctgcacatgcctacccacctccagttgagccctgcagttgccacacacacacaaacacacacatgcagacagcctgacccctgttgccaccatgcatctggcccttgtgatcaggcatgggcaacctgcagcacctaccaccacatctatgctcacattcaggcccagcttcggcatatgacccaagctcttgctaccatgtgtgagactacaacaggctgctgctgcaaccagactccacagtggagcatgtgtacactttcagctctggcctccactgctgccagtcccagaccctagctgtttgtcacatatacatagctgaggaccccaacagccctcataatctttgcgaaactcccacagctcttgacacaaaggaccatgcagttgccaatgttgtaggcatgcctgagctgactagactcggcccctatctgccgccacaccaccagacccagagccacactatgcccctgcatttggtttcctatggtctagacccagtgccacagtgcacctagtatgtctccctttttcctccttaggtaaagggctttccttgccaaagccaggccataatgtctgaaagaggtgactgctgcttcaaaagtgcagacacctttgcaggactacaaggatgaggaagaatcagggaaacattatattgccagaaaaacacaagaagctttccagtgtgtgaccacgaagaattggaggtacatgaattgcctgacaaagtattcaaaataattgttctaaagaagctcagcaaattacaaaaaaacaaatatttttaaaagatcaggaagacagaatatgaacaaaacaagaaggtaagcagagattcaaaacttgaaaaaagaaccagataaattttcaagctgaacagtatgatgactgaagtaaaaaataccaaagatgcttcaatagcagattacatcaagcagaataacaaataactgaatgcaaatatagatgattggaaatcatccagtcagagaagaaaaagaaaaaaaatgaaaaagtattaagaaagcctacaggtctatgggacaccaccaagaaaactactatttggatactaaaactacagatggtgaagagtgcaagaaagaggcagacagcttatttaaagaaataatggccaaaaagttcccatctgggaaaagagaatattgaattacaagaagctcaggaatatgcaattaaattcaacccaaagaagagttcatcaagacacattacaatcaaactatcaaaattcaaaaactaagaaagaattctcaaagcagcagaagaagcatatcacatacaaggaagctttaatatggctaccattagatttctcagcagaaaccttacgggccaggaaagagtgtgaggatatattctaagtgctaaagtaaaaaatctgtcaactaagactactataatcagcaaatctgtctttcagaattgaatgagaaataaaaactttcccagacataagctgagggaattcatcaaacaaggcctgccttagaaatgctaaacaaagttttccaatctgaaagaacaagatattaatgaatgaaatgaaaagatatgaaagtataaaacttaccagtaaaagtaaacacatggtcaaattcagaatactcttacactgtaatcatggttccaaagttttatcatattggtgtgggcaataatgttttagatatgaacacaaaagcagaggaaataaaagtgaaaatagacaaatgggattacatgtaactaaaaagcttctgcataggcaaggaaacaatgaacagagtgggagacaacctttggaataggagaatatatttgtaaaccatacatccagtaaggggttaatatccagtatacagaaagaactcaaagaactcaatatcaagaaaacaaatagctcaattaaaaaatgggcacaggacctggatagacatttttcaaaataagacttagaaatggccaacaggctgggtgcggtggctcacatctgtaatcccagcactttgggaggccaaggtgggcagatcccttgaggttaggaattcgataccagcctggcaagcatggtgaaaccccgtctctgctaaaaatacaaaaattagccaggcatggtggcacacgcctgtaatcccagctactcgggaggctgaggcaggagaatcacttgaacccgggaggcagtggttgtagtgagccgagattgtgccactgcactctggcctgggctacagagtgagactctgcctcaaacaaaaaacaatcaaacaaaaaccaaatagcaaacagatatatgaaaaagtgctcaatatcaataatcatcacaaaaatgcacatcaggctgggtgtggtggctcacacctataatcccagcactttgggaggccaaagcgggtggatcacttgaggtcaggagttcaagaccagcctgcccaatatagtgaaacatcttctctactaaaaatacaaaaattagctgggcatggtggtgggtgcctgtaatcccacccgctcaggaggctgaggcaggaggatcacttgaacccgggaggcagaggttgcaatgagccgagatggcaccactgcactttctgtagcctgggcaacagaatgagactgtgtctaaaaacataaataaataaggccaggcgcagtggttcacatctgtaatcccagtgtgattacagatcacactgtgggaggccaaggcaggcagatcacctgagctcaggagtttgagaccagcctggtcaacatggtgaacccccgtctctattaaaaatatacaaattagctgggcatggtggcagatgcctataatccaagctacttgggaggctgaggcatgagaattgcttgaacccaagaagtggaggttgcagtgaaccgtgatcacaccactgcactccagccttggcgacagagagagattctgtctcaaaaaaataaaaattaaaaaaaaaaaagaaagaaagaaaaaaaaaagaaaaatgcaaatcaaaaccacaatgcaatattgcctcacacctgttagaatggctattttcaagaagacaaaagttaaggattggtgagggtgtggagaaaagggaacatttatacagtgttggtggaaatataaattagttcaaccatcatggaggcttctgaaaacactaaaaatacaactaccttatgatccaataatcccacttgtgggtgttgttcaaagaaattgaaatcagtgtgttgaagagacatttgtcctcctatgtttattatagcattattcacaatagtcaagatatgaaatcaaggtaagtccccatcaacagatgaatgtataaagaaaatgtggtatacatacacaatggaacactagtcagccttaaaaagaaggaaaatctgtcatttgcaacaacatatatgaacctggaggacattatgctaagccaggcacagaaagatgaatactatattatctcacttgtatgtgtaattttcaaaacttgaacttgtagggagtagactggtggttaataatctgaagggagggtaaaaatgtgttgatcaaaggataaaaattttagttagagagaaggaataagtttttgagatatattgcagagcatgatgacaatagtgataaggtattgtacatttcaaaaactgctaagtaaattttaagtattctcatcacaaaataagtatgtgagctgagatatatagtaattagcttgatttaattattctacaatgcatgcatatatcaaaataccacattttactccatgaatatatacaattatttgtgaactaaaaatacatttgaaaaagaactactagaaaaactaaaaatgagaaaataaataagcacattaattaattaattaaaatccttgtctagtaagtttaatgttggtactttctcagggaccattttttgttaattacctttttttctatatattagctataatttcctgttttttgtatgccttgtaattttttaataaaaactgcacagttttaatattataatgtgataccttgggaaataaaattcctccctctccctagtgtttgctggtgattttttttttttttttttgagatggagtcttgctctgtcaccaggcttggcgcggtctcagctcactgcaacctccgccttccgggttcaagcgattctcctgcctcagcctcccgagtagctgggattacaggcgtgtgccaccatgtgcagcttatttttgtatttatagtagagatggggtttcaccatattgaccaggatggtcttgatttcctgacctcatgatctgtctgcctcggcctcccaaagtgctgggattacaggcatgagccaccgcacccggccactggtgatgtttttaatagattgtaattttttttgaggtagcgtttgctttctcacccagtctggagttcagtggggcaatcacagcccactgtatccttgaactactgggctcaatcaatcctcctgcttcatcctcctgagaagctagaactacgggtatgcaccaccacgcctggctaatttttatattttttatttttgtagagacagaggtctctctattttgcccaggctgatctcgaactcctggcctcaaaagatcctcctgccttggcctcctaaagtgctgagattaaaggtgtgagccaacgtacccagcccatttacagtatttttaatgttgacgtgaactatgtatacaattgttaagcatatactcactgagctttaatatgtataaccccgtgttctcttttgataaactagaaaacctttcccaacatcctaatacacttttgaaggatatcataaatagtgtgtttgagggctagaggaatggcccaagtactgtgatgaggttcataggatttggggctatttggaagacccttacaaggcatatagcacaacttttctatctgttgattgtctctgtagcatcctcacaaaatccactattggcttgcaggtcttcagagactggcattcaccagttctggaggtgttaactgttccatctttggacagctcagagtattcagacgtctttatttattagaactacacacaacaggactattcatcaacttcccccattgcagacagccctttgagttgtaaagagcccttccccaggtcttttattttcttttccataatatgtcctggtccctttaactgcttttcactggtgatgatttggagggcccccaccagcctgctaattagatcctgaaggctttatcaaagtcctctttaaatggcatagccctgaagccaaggacagactcctgtttagtggggggaggggctcttcaaattagagggggttgagcacttttctttgaccctttcttctgatactgaccttgtatgaatcagactttcccccctttatatcagattctggtcctgccctgtatacaactttggctcctttcctgcagacaggctcagtgcttctttggtgattttatgctgccatctggtggctaagtcgacagtgccggctttttttgggcctaatttagcagaggagaggatgtacagatgaacatagtgacaatcctagaactggaataatctgaatctttaaaaagaggacctgatttcttcctattgtgtgccatgtgattgggagcccaaagaagaggatgctaacacagctatggcatggccacagaaaatatgcctgaaatatccccatcagagcccaactcttactagctaattgactttgagcaagtcacttttccttctagtgtctcagtttccatacttctgatcctaacaggtttataaaatggagccaagcagtagtgaaggtgaggccaggtcgggaagaggaggaagtaaagtgaattgaaagctagtgagggcaggggagtaagtaaaacctgaaggtgataaatggcagaagagggcaggactgctctagggcaaaggcctaggcaaatatttttcagaagttccttttaatgtaaacagtttgattaaaaatatattacaaatacatgggcccatgtgaggtgtagtgatttatcaatgaaaatttagaataccaggtggagaagagatgcttacgtatttgtttattcaacagttcacatatcaatttttataatgaccttgcaccatatcttcctttttaggtccagaaatcatctctttgtgtttattgtcaaatgcaccattcctggctaatttcacatctccctctatgagaaaaacatagcaacactgtactacttccatttttgcaatggcactctggaacctctttgtattgaaattataaatttcttgcttttgcagtttctttagcctaagggtcaacagtggatttaggtaggccacagctctgaacatgtcctgtgtccaatgtgagtgtcaccccataacggcacatcagcaccattttgcatgcctagccttaagagttaccatttaaaaaactccaatgacaaccaatgagagtgatctgctagcgtggctgcccacctggaaccagggcctggtcacagaaacccaggacaaccagtttataaattgtctttttgcctttttatttgaaaaggtatttttgtgaaacaaaaggttttaatttcagagtcaaatttatcaatcttttatatttgatgctacttgagtctttagaaaatttttccccaactaaatttcttttttctttttttgagatggagtcttgctctgtcgcccgggctggagtgcagtggcaccatctcggttcactgcaacctccgcctcctggattcaagtgattctcctgcctcagcctcccaagtagctgggattataggtgcctgccaccatgcccggctaatttttgtatttatagtagagacggggtttcgctatgttggccaggctggtctcaaactcctcacctcaggtgatccagccacctcggcctcccaaagtgctgggattacaagcatgagccaccgcgcccggccaaccaaatttcttaaaagtatagaacatttccacacttgtagaaacttctagtagataaagttgtattagaggtttggtaatccagtctttctgatagctgcttcataggtgtcactgtaggtagtttctctctttgttaagcattgttttctcaaaggtaccattgtattgcaccactttacaatacaataaccctcatttggaatgacaagtcagattactttttttgtttgatccaaggacacttagaagatggaaggtatttcttaaggaagaaaatttgcatactttattatttttctggaaactgaagagcaagcttacctgatagatttgggtcgatagttacactttccagttcagccagtgggagggtaatgtatcctttgactttctagaagttgctctataatacttaagttgccattgtctcccttctggttctctgttgtttctcgaatgacatagaagagtttatgagattaattgcttcctactgaaatagccaggtttctgagggcagctttggcttttatatgagctttttcttcctaccacttatcagttactgacagagggtcaacttcactactgtgtcatatggttggtccaatgttgggttcctcagattcatggaggaaataggaaaatagtaaagattaaggagtcatagttaaaaaattacaaacaggtcacaaacagtactctttcttgattatttaggaaccaaatagccattctatgaaatgtctttctttcctttttctctcttgctcaccaattgactcgtaagcacttccgttctcttatggttgggagccatacaaggtagagtgttggagtaaaaactacattgactctgaatcatggtgtgtgacctcgggcacatgatgtaacctctataggactctattttaatgtataaaacaggaataatcctttattattatctatgcaatacatattccattatctattacatgggataatggaatgggaagtcccttgaagatggtactaacctcaatgtattactcctttctagcttctttggttcaaaagtttggtggaggagttacaaattctggtttgaatgatatatttggatactttatcaacacatcaaagctctacctatcccttcccccattctcaaaaccaagctgaattaacatctttacatttattatgcagtttatggaggattttagcattaattattgcttgatttactcaatgtccccatgttatagatgagaactggaaaacccattgaagttgtgactcctggtctagaaatgaagtctacttccagttaatgttctttctggtatgtctttgctttcttgaaatttcccttttttgtccttactgggtaaattttgaaccaaccaaatcacaaagatgtccggctttcaatcttctaggccacgcctcttatgctctctccgccctcagcccccccttcagttcttaaagcgctgcaattcgctgctgcagccatatttcttactctctcggggctggaagcttcctgactgaagatctctctgcacttggggttctttctagaacattttctagtcccccaacaccctttatggcgtatttctttaaaaaaatcacctaaattccataaaatatttttttaaattctatactttctcctagtgtcttcttgacacgtcctccatatttttttaaagaaagtatttggaatattttgaggcaatttttaatatttaaggaatttttctttggaatcatttttggttgacatctctgttttttgtggatcagttttttactcttccactctcttttctatattttgcccatcggggctgcggatacctggttttattattttttctttgcccaacggggccgtggatacctgccttttaattcttttttattcgcccatcggggccgcggatacctgctttttatttttttttccttagcccatcggggtatcggatacctgctgattcccttcccctctgaacccccaacactctggcccatcggggtgacggatatctgctttttaaaaattttctttttttggcccatcggggcttcggatacctgctttttttttttttatttttccttgcccatcggggcctcggatacctgctttaatttttgtttttctggcccatcggggccgcggatacctgctttgatttttttttttcatcgcccatcggtgctttttatggatgaaaaaatgttggttttgtgggttgttgcactctctggaatatctacacttttttttgctgctgatcatttggtggtgtgtgagtgtacctaccgctttggcagagaatgactctgcagttaagctaagggcgtgttcagattgtggaggaaaagtggccgccattttagacttgccgcataactcggcttagggctagtcgtttgtgctaagttaaactagggaggcaagatggatgatagcaggtcaggcagaggaagtcatgtgcattgcatgagctaaacctatctgaatgaattgatttggggcttgttaggagctttgcgtgattgttgtatcgggaggcagtaagaatcatcttttatcagtacaagggactagttaaaaatggaaggttaggaaagactaaggtgcagggcttaaaatggcgattttgacattgcggcattgctcagcatggcgggctgtgctttgttaggttgtccaaaatggcggatccagttctgtcgcagtgttcaagtggcgggaaggccacatcatgatgggcgaggctttgttaagtggttagcatggtggtggacatgtgcggtcacacaggaaaagatggcggctgaaggtcttgccgcagtgtaaaacatggcgggcctctttgtctttgctgtgtgcttttcgtgttgggttttgccgcagggacaatatggcaggcgttgtcatatgtatatcatggcttttgtcacgtggacatcatggcgggcttgccgcattgttaaagatggcgggttttgccgcctagtgccacgcagagcgggagaaaaggtgggatggacagtgctggattgctgcataacccaaccaattagaaatgggggtggaattgatcacagccaattagagcagaagatggaattagactgatgacacactgtccagctactcagcgaagacctgggtgaattagcatggcacttcgcagctgtctttagccagtcaggagaaagaagtggaggggccacgtgtatgtctcccagtgggcggtacaccaggtgttttcaaggtcttttcaaggacatttagcctttccacctctgtcccctcttatttgtcccctcctgtccagtgctgcctcttgcagtgctggatatctggctgtgtggtctgaacctccctccattcctctgtattggtgcctcacctaaggctaagtatacctccccccccaccccccaacccccccaactccccacccccaccccccaccccccacctccccacccccctacccccctacccccctacccccctctggtctgccctgcactgcactgttgccatgggcagtgctccaggcctgcttggtgtggacatggtggtgagccgtggcaaggaccagaatggatcacagatgatcgttggccaacaggtggcagaagaggaattcctgccttcctcaagaggaacacctaccccttggctaatgctggggtcggattttgatttatatttatcttttggatgtcagtcatacagtctgattttgtggtttgctagtgtttgaatttaagtcttaagtgactattatagaaatgtattaagaggctttatttgtagaattcactttaattacatttaatgagtttttgttttgagttccttaaaattccttaaagtttttagcttctcattacaaattccttaacctttttttggcagtagatagtcaaagtcaaatcatttctaatgttttaaaaatgtgctggtcattttctttgaaattgacttaactattttcctttgaagagtctgtagcacagaaacagtaaaaaatttaacttcatgacctaatgtaaaaaagagtgtttgaaggtttacacaggtccaggccttgctttgttcccatccttgatgctgcactaattgactaatcacctacttatcagacaggaaacttgaattgctgtggtctggtgtcctctattcagacttattatattggagtatttcaatttttcgttgtatcctgcctgcctagcatccagttcctccccagccctgctcccagcaaacccctagtctagccccagccctactcccaccccgccccagccctgccccagccccagtcccctaaccccccagccctagccccagtcccagtcctagttcctcagtcccgcccagcttctctcgaaagtcactctaattttcattgattcagtgctcaaaataagttgtccattgcttatcctattatactgggatattccgtttacccttggcattgctgatcttcagtactgactccttgaccattttcagttaatgcatacaatcccatttgtctgtgatctcaggacaaagaatttccttactcggtacgttgaagttagggaatgtcaattgagagctttctatcagagcattattgcccacaatttgagttacttatcattttctcgatcccctgcccttaaaggagaaaccatttctctgtcattgcttctgtagtcacagtcccaattttgagtagtgatcttttcttgtgtactgtgttggccacctaaaactctttgcattgagtaaaattctaattgccaataatcctacccattggattagacagcactctgaaccccatttgcattcagcagggggtcgcagacaacccgtcttttgttggacagttaaaatgctcagtcccaattgtcatagctttgcctattaaacaaaggcaccctactgcgctttttgctgtgcttctggagaatcctgctgttcttggacaattaaagaacaaagtagtaattgctaattgtctcacccattaatcatgaagactaccagtcgcccttgcatttgccttgaggcagcgctgactacctgagatttaagagtttcttaaattattgagtaaaatcccaattatccatagttctgttagttacactatggcctttgcaaacatctttgcataacagcagtgggactgactcattcttagagccccttcccttggaatattaatggatacaatagtaattattcatggttctgcgtaacagagaagacccacttatgtgtatgcctttatcattgctcctagatagtgtgaactacctaccaccttgcattaatatgtaaaacactaattgcccatagtcccactcattagtctaggatgtcctctttgccattgctgctgagttctgactacccaagtttccttctcttaaacagttgatatgcataattgcatatattcatggttctgtgcaataaaaatggattctcaccccatcccaccttctgtgggatgttgctaacgagtgcagattattcaataacagctcttgaacagttaatttgcacagttgcaattgtccagagtcctgtccattagaaagggactctgtatcctatttgcacgctacaatgtgggctgatcacccaaggactcttcttgtgcattgatgttcataattgtatttgtccacgatcttgtgcactaacccttccactccctttgtattccagcaggggacccttactactcaagacctctgtactaggacagtttatgtgcacaatcctaattgattagaactgagtcttttatatcaaggtccctgcatcatctttgctttacatcaagagggtgctggttacctaatgcccctcctccagaaattattgatgtgcaaaatgcaatttccctatctgctgttagtctggggtctcatcccctcatattccttttgtcttacagcagggggtacttgggactgttaatgcgcataattgcaattatggtcttttccattaaattaagatcccaactgctcacaccctcttagcattacagtagagggtgctaatcacaaggacatttcttttgtactgttaatgtgctacttgcatttgtccctcttcctgtgcactaaagaccccactcacttccctagtgttcagcagtggatgacctctagtcaagacctttgcactaggatagttaatgtgaaccatggcaactgatcacaacaatgtctttcagatcagatccattttatcctccttgttttacagcaagggatattaattacctatgttacctttccctgggactatgaatgtgcaaaattccaatgttcatggtctctccctttaaacctatattctaccccttttacattatagaaagggatgctggaaacccagagtccttctcttgggactcttaatgtgtatttctaattatccatgactcttaatgtgcatattttcaattgcctaattgatttcaattgtctaagacatttcaaatgtctaattgattagaactgagtcttttatatcaagctaatatctagcttttatatcaagctaatatcttgacttctcagcatcatagaagggggtactgatttcctaaagtctttcttgaatttctattatgcaaaattgccctgaggccgggtgtggtggctcacacctgtaatcccagcactttgggaggctgaggtgggaagatcccttactgccaggagtttgagaccagcctggccaacattaaaaaaaaaaaaaagtaagacaattgccctggaatcccatccccctcacacctccttggcaaagcagcaggagtgctaactagctagtgcttcttctcttatactgcttaaatgcgcataattagcagtagttgatgtgcccctatgttagagtagaatcccgcttccttgctccatttgcattactgcaggagcttctaactagcctgaattcactctcttggactgttaatgtgcatacttatatttgctgctgtacttttttaccatgtaaggaccccacccactgtatttacatcccagctggaagtacctactacttaagacccttagactagtaaagttagcgtgcataatcttaggtgttatatacacattttcagttgcatacagttgtgccttttatcaggactcctgtacttatcaaagcagagagtgctaatcaatattaagcccttctcttcgaactgtagatggcatgtaattgcagttgtcaatggtccttcaattagacttgggtttctgacctatcacaccctctttgctttattgcatggggtactattcacttaaggcccctttctcaaactgttaatgtgcctaatgacaattacatcagtatccttccttttgaaggacagcatggttggtgacacctaaggccccatttcttggcctcccaatatgtgtgattgtatttgtcgaggttgctatgcactagagaaggaaagtgctcccctcatccccacttttcccttccagcaggaagtgcccaccccataagacccttttatttggagagtctaggtgcacaattgtaagtgaccacaagcatgcatcttggacatttatgtgcgtaatcgcacactgctcattccatgtgaataaggtcctactctccgaccccttttgcaatacagaagggttgctgataacgcagtccccttttcttggcatgttgtgtgtgattataatcgtctgggatcctatgcactagaaaaggagggtcctctccacatacctcagtctcacctttcccttccagcagggagtgcccactccataagactctcacatttggacagtcaaggtgcgtaattgttaagtgaacacaaccatgcaccttagacatggatttgcataactacacacagctcaacctatctgaataaaatcctactctcagaccccttttgcagtacagcaggggtgctgatcaccaaggccctttttcctggcctggtatgcgtgtgattatgtttgtcccggttcctgtgtattagacatggaagcctcccctgccacactccacccccaatcttcctttcccttccggcagggagtgccctctccataagacgcttacgtttggacaatcaaggtgcacagttgtaagtgaccacaggcatacaccttggacattaatgtgcataaccactttgcccattccatctgaataaggtcctactctcagaccccttttgcagtacagcaggggtgctgatcaccaaggccccttttcttggcctgttatgtgcgtgattatatttgtctgggttcctgtgtattagacaaggaagccttccccccgcccccacccccactcccagtcttcctttcccttccagcagggagtgccccctccataagatcattacatttggacaatcaaggtgcacaattataagtgaccacagccatgcaccttggacattattggacattaatgtgcgtaactgcacatggcccatcccatctgaataaggtcctactctcagatgccctttgcagtacagcaggggtactgaatcaccaaggccctttttcttggcctgttatgtgtgtgattatatttatcccagtttctgtgtaatagacatgaaagcctcccctgccacaccccacctccaatcttcctttcccttccaccagggagtgtccactccatatacccttacatttggacaatcaaggtgcacaattgtaagtgagcataggcactcaccttggacatgaatgtgcataactgcacatggcccatcccatctgaataaggtcctactctcagaccctttttgcagtacagcaggggtgctgatcaccaaggccccttttcctggcctgttatgtgtgtgattatatttgttccagttcctgtgtaatagacatggaagcctcccctgccacactccacccccaatcttcctttcccttctggcaggaagtacccgctccataagacccttacatttggacagtcaaggtgcacaattgtatgtgaccacaaccatgcaccttggacataaatgtgtgtaactgcacatggcccatcccatctgaataaggtcctactctcagaccccttttgcagtacagtaggtgtgctgataaccaaggcccctcttcctggcctgttaacgtatgtgattatatttgtctgggttccagtgtataagacatggaagcctcccctgccccaccccaccctcaatcttcctttcccttctggcagggagtgccagctccataagaaccttacatttggacagtcaaggtgcacaattctaagtgaccgcagccatgcaccttggtcaataatgtgtgtaactgcacacggcctatctcatctgaataaggccttactctcagaccccttttgcagtacagcaggggtgctgataaccaaggcccattttcctggcctgttatgtgtgtgattatatttgtccaggtttctgtgtactagacaaggaagcctcctctgccccatcccatctacgcataatctttcttttcctcccagcagggagtgctcactccataagacccttacatttggacaatcaaggtgcacaattgtaagtgaccacaaccatgcatcttggaaatttatgtgcataactgcacatggcttatcctatttgaataaagtcctactctcagaccccctttgcagtatagctggggtgctgatcactgaggcctctttgcttggcttgtctatattcttgtgtactagataagggcaccttctcatggactccctttgcttttcaacaaggagtacccactactttttaagattcttatatttgtccaaagtacatggttttaattgaccacaacaatgtcccttggacattaatgtatgtaatcaccacatggttcatcctaattaaacaaagttctaccttctcaccctccatttgcagtataccagggttgctgaccccctaagtccccttttcttggcttgttgacatgcataattgcatttatgttggttcttgtgccctagacaaggatgccccacctcttttcaatagtgggtgcccactccttatgatctttacatttgaacagttaatgtgaataattgcagttgtccacaaccctatcacttctaggaccattatacctcttttgcattactgtggggtatactgtttccctccaaggccccttctggtggactatcaacatataattgaaattttcttttgtctttgtcagtagattaaggtcataccccatcacctttcctttgtagtacaacagggtgtcctgatcaaccaaagtcctgttgttttggactgttaatatgtgcaattacatttgctcctgatctgtgcactagataaggatcctacctactttcttagtgtttttagcaggtagtgcccactactcaagactgtcacttggaatgttcatgtgcacaaactcaattctctaagcatgttcctgtaccacctttgctttagagcagggggatgatattcactaagtgccccttcttttggacttaatatgcattaatgcaattgtccacctcttcttttagactaagagttgatctccacatattccccttgcatcaggggcatgttaattatgaatgaacccttttcttttaatattaatgtcataattgtatttgtggacctgtgtaggagaaaaagaccctatgttcctcccattaccctttggattgctgctgagaagtgttaactactcataatctcagctcttggacaattaatagcattaataacaattatcaagggcactgatcattagataagactcctgcttcctcgttgcttacatcgggggtactgacccactaaggccccttgtactgttaatgtgaatatttgcaattatatatgtctccttctggtagagtgggatattatgccctagtatcccctttgcattactgcaggggctgctgactactcaaaacttctcctgggactgttaataggcacaatggcagttatcaatggttttctccctccctgaccttgttaagcaagcgccccaccccacccttagtttcccatggcataataaagtataagcattggagtattccatgcacttgtctatcaaacagtggtccatactcccaacccttttgcattgcgccagtgtgtaaaatcacaggtagccatggtgtcatgctttatatacgaagtcttccctctctctgccccttgtgtgcccttggcccctttttacagactattgctcacaatctcaggtgtccatatttgcagctattaggtaagattgtgctgtctccctcttcccttccctctgccctgccccttttgcctctttgctgggtaatgttgaccagacaaggccctttctcttggacttaaacaattctcagttgcactttccttggtcccacccattatacatgaacccctctacttcctttcgcattgcttctgagtatgctgactacccaaagccccttctgtgttattaataaacacagtactgattgtcccatttttcagcccatcagtccaagatctccctaccactttggtgtgttggtgcagtgttgactatgaaaagcaggcctgaactaggtggataagccttcactcattttctttcatttattaatgatcctagtttcaattattgtcagattctggggacaagaaccattcttgcccacctgtgttactgctttactgtgcaaaatactgaaggcaagtcagacccagggagctggattgccatcctttattttgtgtttccagtgtacactataaaattgtctccccaggaaggaaggttggcactttctctgcattcttctttccagagcagattgcctggttaagaatctcttgttgtcccctttgtatattgttattgtaaagtgccaaatgccaggatacagccagaaaaattgcttattattattaaaaaaatttttttaagaaagacatctggattgtagggtggactcgataacctggtcattatttttttgaagccaaaatatccatttatactatgtacctggtgaccagtgtctctcattttaactgagggtggtgggtctgtggatagaacactgactcttgctattttaatatcaaagatattctagagtggaactcttaagaccagtatctttgtgtgggctttaccagcattcacttttagaaaaactacctaaattttataatcctttaatttcttcatctggagcacctgcccctacttatttcaagaagattgcagtaaaacgattaaatgagggaacatatgcagaggtgcttttaaaaagcatatgccaccttttttattaattattatataaaatgaagcatttaattatagtaataatttgaagtagtttgaagtaccacactgaggtgaggacttaaaaatgataagacgagttccctattttataagaaaaataagccaaaattaaatattcttttggatataaatttcaacagtgagatagctgcctagtggaaatgaataatatcccagccactagtgtacagggtgttttgtggcacaggattatgtaatatggaactgctcaagcaaataactagtcatcacaacagcagttctttgtaataactgaaaaagaatattgtttctcggagaaggatgtcaaaagatcggcccagctcagggagcagtttgccctactagctcctcggacagctgtaaagaagagtctctggctctttagaatactgtaagtactacttcgtagctattaagtaatctttttcctattctattttctttctcttagatgccacctatagaaaagtcagagggtccagtaagtttctttccttcttcccacctcatctgcaatatatatatatagagagagaaatagatacatacatacatgcataaatacacatatgtgagttaaccagcagaactgtagaattaatattgtggacccagctctatgctaggttacactgataacctgggtaggaatgatatcatcctatataatttcattcctgagatgattttatcgttgaggagctaatgtgagcacatttgaaataactttagaaaataataagtgctgttttgtgtgaatcataagtagtagttttaggaagggaacccacaaggatttgaagttgatagaataaacttaaggaagtgggtttgctttttctctttaagccaagataggattaatattgcagccatctggatagtccagttggtttattttaatttcatttgttttttacctcttttggagccatggaaagagatgaaagggatagagcatagccattgtgtttggctatttgcgaaggttggcaaattagtgattgctaaatctcataagcttgagtattttaaagttcagagattgagggcataaatctaatacttcggctccttccacaattttactacatttctgcccaagaacagatgaccatggataatgcatatcgtagatactttttaagtttggaacctttttgccaagagggtagtggagaagtgaagtcaaaaccttgaccttccttgcctactttatgctgtagtttatataccttctttcctcccacctttcgtaaagctaaaagaagcttagcctccttaatgttttccagctgacaaaatattgtttaacataacattcgaaactttttttctggtgcacattcatgcatcacagcaggagcaacaagaaccatataagtgaactggcttcacttatagcccgttttaattcatatccatatttcctcagggcttgtttccatgcctcccagccccactccatatgcttaacaacattgtctggctgactgagggttatatacatcatggtcttgaaccttcttggaaacatggtctgtgccattgtttctcaaacccaagtaatgcttcatgatgaaacaccttctaaaggaacaaaattttctgagatcctaaaaaaatgtgttttgaggaacactgacttaacaaagatatttgaaatgtaaatatgttttccaatttcacgttgtctttgtcaaagatgtgttttatataacttatgtagaacttggggatccattagaatatattcacaaatccccagggttatcaccccaatttgagaaaccctggtctatgcttatgaaatcttctattggtaattaaattgtcattcattgtcaacatacaattataattattattggaatttgttttaaatgaatgaatttggaggtgattctgtaccttaagtcaagaggaaggatggcttgattttaggtggattgattatactagatagcatccaaaggtgaatcttgaagctgtatttaaattcattgcttgaaataatttccacccttaagaaaaatctctagcaattgtaaaaagggatgctctggaaatgtgggcatcttcaaaatagagataattcttgtgttagttcaacaaatattattgtaccaggtgctggaataaatagcaaaaccaaagacaggatttatatcaaggaatttgctttcttatggaggatgcagaaggaaatcattatggttttgggcagaaatgcttagactttagtcctggctctgagtttggttcagatcaccatcaatctgaccatctcgagactgctagtgaaataagataggggcttatatcaaatacctaaatccctgaaaatgacattttgtgatttggaaaattttcaaaagtctaatgaaggaaacttttttggcatttctttaaatgattattgtcatttcttttctgacttttccctttataaaaccttaacatgtaggattggaggaagttttctgaccattttctcatatcctctttcagctttatctttctgtaacttccatttctctagccacctccctaaattacagaagactgtgagacccagggctgctgtgattaggcattcataatttcttttcagggtgtttgtgccctgattatcaaatgtacagcttgaagggagttcatgtcttaaagtaatgaattaagagttgacctttgttgactgctaaaatattcttatatgtgaaagcatcctggaaaaatacgttaccagcttaaagagaaagaaactaatgattatatctgaactgagctaatgcctcttctcttcccccaaaccttatcagtttggatggcaaagagtaatgatgtgtcagttaaacagagctaatgccttcctctgccttgtcttaaagactggattgggagaaaattgatattctcactaccatattttgggctgtaggcaagtagcattttacacaggtttccttcaaaaatccaactcaagttggagctcatgtatttaagacatagctggcctgctgaatttaacaagttaaacttcagtggccatgtacagttatatatcactatatatatgtgtattaggctgtcgagttggtcatgtttttgttggtgacttaggctttacttgatagctcttccttgacctttccaaattgagtactgatacatggagcttgggcttcttctgcatcttatacaaatgagtttggtaaagaagcctctcctttactgttttgatgtttatattagaaataacttttgattattttttttcatgttaggatgagaaactgaaacaaaatgtaaatttgaccggtgctagacttcttaaattatgggtagacttaaagtattattttccttaaccaattagaatgctagtcttctagtgttcccggaaacatgagaggttatgcagtagacccaagcaataccctcttattacataatcaagtgcgtataagaatttaaaaatagggatatgactggaacatcactgtactttaccaggtcccattataaaattatctatgttactttacccatagctttgaaaactagtggcatagtatattttatagtatgctgttagtgtgattggcattgaacagtgatgggatataatcactctacaatctatatgttattaaagttttccagccttatagatctcccttgactgaaaattagctactaacttacgacttattttttacagcagattgactaggtctttccaggaaatctgttgatgtacaaaaacaaagtttaattgctaatgtttttttaaaaaataactttttgatattacggatacctggttatttgggccttgtatattttaacatcaaaattacctattataaatccatataaacagaaaagaaagagagtaagtctttagatcagatctgcaaacaatgatggtacgtactgtagaaaaatctggaacatagacttaccagttcttaggttccattttgcttgctttttaaaaactgtgtcttataagtcttcagcaactggttgggagatttttagaaaaaataaccttttaatgttagaacagtgtagagatttacagaatgattctgaagatagagtttctgtgtacttcacacccagtttttcccagtgttaacattttacattagtttggtacatttgtcacaacaaaccaatattgatacattattattaactagagtccatattttattcagatttccttagtttttccttaatgttctttttgtgttccaggatcccattgaagataccacgctgcatgtgtccttagtagtcatgtctccttaggctcctcttggtaatgacagtttctcagactctttgtttttgatgaacttcacagttttgaggactaatggtccagtattctatagaatgtctctctattggaatttgtctgatgttcttctcatgactagattgggtttatgagtgtttaggaggaagaccacaaaggtagagtgccattcttatcacttatcaagagtacatactatcaacatgacttatcactgtttatgttatccttaatcacctgtctgaggtactatttgtcaggtttctccagcgtaaaattagtctttatttctccatttccctactatactgttcacataggaagtcactatgtgcagccagcacttaaggaatgggaaattaccttccacctcattgagggcagagtatttacataaattatttggaattcttttgcacaggatgtcttttctccacaatgtattgtgtttattcagtcatttatatcagtatgatctcagggatattttatactctgggttataatacagtattactttattctgttgttcaaattgttccagctttggccattgggaggtctttcatttggctttgatataaccccatgaatgtgggttttttgtttgagcactttcttatttttggaactacaacatgcttcagactcatttgcatatctcctgcctggacctaaaatgatgtatttctgcaaggagccttgatactttttattggagagtaatattagaaatcaagaagtgaatgctaggtgcgctcattactactggagtgtcattccttcaagaccttttcagttgacaagagcaaggagatatatatttgcattctaacgtgtgtatatgcacatagctataaatatatataaccatctgtatctatattaaactaaatgtgtttatacctacgtctccaactctaatcattgccacatggatcattatagtctcacctccttgcttatctgttacctcccatttctacagtgagaaacctggcttggttgggaaatttttctgttaatattacggtagtgagtgtttgacatttgcttctatggttaagtttagggagagtttagctgtagggtattcttgaaactagaaatgacccttctgccctaaatgtttctgccagttttgaaacgtaaaataggttgcagaaacaaactttatcttaagaaccagaatttacttcaatccacattttgacattgattttcagattaaattattctgatatcgccaggtaagctgttccttgggtatgcatttcttctttccgtttttttctaagagctaaaggaccctgagaacactggaggtgggaaaggaagggaaaggcatgttcacacgtgggataggaaaggttcatttactgacctccagctagccttccaaagtgcctatttaagacccaaggagtagatgtcttccttggcaattgtaacccaaatataatttttaacctttcaattttagtcaagaaagttggtgtgctgttacaaaaagtgccctgattaacagcattgtcatgtgcattgcatattaatcagcaatttaaaataacatgaaattatgttgagtataattttaatattttatattagatattagtttgagacagtgtttctcaagtctgtataataagtttgatagtagggaggttttctctcaagaaaagaattattcagtgtgcacctacataatcactgcttagattctacaattaatattttgctatatttgattaaacgttttctgtaaaagaaaaatattattatgtactatttaggtttatgggaataattgttaagttaaagtgtatgaacaaacctggaatgaaatctgtttgcctacatctataatacaactataaaacatagcagatgtacaaattagtagttaatagataactaaaatgcaaatatggcactactattatagtattatagtttcttttgagtggcgtgtctgtaatatcacatgctgtgttgatgcacttcaccaaactgctgttttcaaactgctttaaatcctgccattatagcacatagcaatgctatttcactttcatttggcacaaaacacatttatatattgtttgcttctcttcttttctgtaatccccaggcaacaaaactagaacatttgccactaatctggcaacgtggtcctatattatgaagtagtcatatagctgatctaaactatccttacagtgaaatgagagtattgtgaaagttttgtagaaagctccccatatgtcctgagaatctatgcacagaccccacagttaaaagacctttgaattgtgggaagacatgggtttaagtatcacttggttaccttctatttgtgtaacattgaggtagtttcatcttctgggttcccagtttccttagagaatgaaaatgttgaattatgtgatttttttttttttttgagacggagttttgctctttcgcccaggctggagtgaagtagcacgatctcgactcactgcaacctccttcccccatgatcaagcaattctcctgcctcagcctcccaagtagctgggattacaggcacccgccccccaccccccgcccccagctaatgtttgtatttttagtacagatggagttttgccgtgttggccaggctggtctcgaacttctgacctcaggtgatccactcgccttggcctcccaaagtgctaggattacaggcatgagccactgcgcctggcctatgtgattattaatatcacgtctagctgtgacaattctgtctgatgctggagtatttgaaccagatggctggctgtgccactcagttattctctccataagactttgatattttgttggtctgcaagatgacggattctcaaaattcttgtcagtgaatattgaaccctagtgaaatgtatggttctgtatcagttccaaaatgtaaccactttctctagccttagattcccagttccaaaatgtaaccattttctctagccttagattcccgttaagggaaagggaatgctctttgagtatgtcatcaccatagtaacaggcaaaactagagggctttgatgctaaagcaagatactccataaatatgcttaagaagacttggggagactggaatagttgttcccttttagatgccagtgtataaatgaatttgagctaggatccgtttatttaaaatttctttaggtgtatttgcttgcatatggagtgcacatttactctcattaatggagttttaggaagcagtagagtaaatgcataaacatgtatgaaccgccatgtttaactggaagcctgcatttggaagtcaagtatctaatcttagattaaattaggatggggaaggatgttggcaagagattttgaagcttgttctgcttatattgagaacatcatagaacagtttggcctttttaaagctagagaatagtgttgaataagtgatgttccatatattcctgtttgacattgacataaaggtttcctcatgatacagtaatccctgatcagggatctggaagcctgtattcatttaaggtactcaggtttaacatactgggtgcttttcacaccatactatacagtaccatgcaaagtgctttcaagactgcaaatttggcttagatcccctttagtgagctcctatgctatagtaaaggtagatagccaattattaaaaacagtcaagacaattgcacctctaagcagtagtagcagttgccacaccaccttgaatcttgaagtattttcagcaacaggatgaccattagccacaaatttagtgtcagcccttaaggtcggtattggtttgacccatattttcatgtagttctttttcttcacttgtctaatcttcccgtgtactgccagggcttgtcattagaggactttagggagaccaagcaggctagaaagtagagacaggagatacctatgtctaatgcttcagtttatacttcctaggtttttttcattggggtttttgtaactcttttggtatcctaccggtgctttggtagcctactgaaccctgtctttcttcttaaggacattctgagcatgtgagacctgaggactgcaaacagctataagaggctccaaattaatcatatctttccctttgagaatctggccaagctccagctaatctacttggatgggttgccagctatctggagaaaaaggtagtttggggaatttattgttgtagtgcttctgtctttggattgaacttcccacaactctcctttttaaagcagaacacagctgggcatggtggctcctgcttgtaattccagggctttgggaggttgaggtggggggatcacttgaggccaggagttgaagacccatgtctctacaataaaataaaattagttgggcatggtggtacgtgcctgtagtcctacctactctggaggctgaggcagcaggattgcttgagcccaggagttcaaggctgcagtgagccatcattagccactgcactccagcctaggtggcagagcgggacccagtctcttaaaaagaaagaaaagcagaacgtgagccagttttcatcaattcctatactttttcttttgcatgtacacatacattttaactttacataatgagttcggcctgtttcatttatccctcagagctgggctccagtgaggtctgtaagggcaagcatacttgatccccaatgaagaatgagagatgcaaagcactaaattatttcttttctcaccacacagcaagatagatttaatgaacttaacaccttttgattagtggccttttaaattattcccactttcctttggcagatgggtattaagttctcaggatttgtttacaaataagactaacttcatctgtattagctcagttttggtaggcctaattccattatcactgccatttccttgttttaagaaatcaaaatttcttagcttgaaaaacaattgaaattgttaaaaagtggaataggagagccccgggggcctgtataaggaatttactgaatccctggttttctgtaccttgtttttccttctgcatagatttgcttaactgtttttgtggcgtgtattttttttttttcgcagtttcgctcttgttgcccaggctggagtgcaatggcgcaatctcagctcactgcaacctctgtctcctgggttcaagttattctcctgcctcagcctctcgagtagctgagattacaggcatgcgcgaccacgccaggctaattttgtatttttagtagagacggggtttctccatgttggtcaggctggtctcaaactcctgacctcaggtgattcacccgcctcgacctcccaaactgctgggattacaggcgtgagccaccacgcctggccagctgttgttataactggagttctatgtgcttgtgaccattcttggtttctccgaatatcctagaactttggtggcgccctattatacaggttgttgaagaaatgttaccatgtggattgagtaggaaacaattctctttatcttggcaatattatggcatggcactacttaaagtacaaattaaaagagggggatgctacagaactagctgacaggcactttgatagaggtggatttctcagttcttaaaatagctctttataaaggaagccagaggcattgtggaggagaattcttacataactcatagggttagaccacatccgaccttttctgtgtggcttcatggctctcttggttgagaaagcattagtttctccttccattagtttcaacctcttgatttcttgacccccctactatattttgtgctgagaacacaagggtattaacaacccacattgtagaggatcgctcagtaataaagactggagaataaaatgcagcatgggaatattggcaattactcagttctaaatttctcttggaaatgagggaaagcatacagaatagagctggaatgaataggataattttttttttttttgctaagttggtagccagaatataacagctccgcacaactgtaaatgtccactcttcaatccacatgaagaaaagggtaaaaatatggttgaactcaaccactagttgcccattagaacagactttcccagtgtactgcatttcaatactttttcttttatctcttttcagatcttcctcagaagaataggcttgttgttttacagtgttagtgatccattccctttgacgatccctaggtggagatggggcatgaggatcctccaggggaaaagctcactaccactgggcaacaaccctaggtcaggaggttctgtcaagatactttcctggtcccagataggaagataaagtctcaaaaacaaccaccacacgtcaaggtgcgtaagctgtccctaaaagcataataagtagtcttaattttgattttgttttccagtatacattgcacttagtgtttcactgaggtcgtattcatcattattctgcatatgatttggtaaaaacagcttcctaactaacctgggaagcaactgggtgtgagattaactggttaaagtgatgatgtaaagagggtagcgggttgcatgtgttcgggtgtttggagtgggactatagcacgtggcagaggcttacagctaagttgttcttttaggagaacatggacaactgtcacatcagtgacattgatcacatgggcaaatcattctgttccatgtggtccccaaagtctctcttaaagccttacagaagaactttgccaatcatttacatacttcaggatggcttgggatgccatggtgtataatacaacaagtgagaggtgtgtctttttatgctatggttgctgattgatggaagccgcataaatacaaatggaaacctgactaaaaatggcacaaagttatctgtcatcaggcaggagctaaagaaccaggaccctacattctctaggtcagtgttgggagaggctgattagcgagtgagaattggcagataaaggtgaccattcggtgcaataaatcctgaacgtataggctttgcccagcattcttcgtaaatagtgggtagctataaatttcatgaaatattttcatgggtaagaactcttgaaatgttataattgactagaaatctctgtagatttagaaatagagagttactaacaaattgttagaaagtctaggaactagaaagctaagttgagagttatctaggaagatctatctattgtactcataatctttagataaattctcctagggccagtagtctatgtgaattttctttttcttcttcttcttcttctttttttttgtattttagctgcaatgttaaacaacctatgtgaattttcttattgtgagaatatttgccttccagagtgactcacctttatctcaaagagcaatattgtgagttttgaaaatgctgctctaaggctgtgttttgttagtcctgagccaggagacttaaagcaaacttgaggggtcttaaaacatcgaagtgagccttaaacattgggaagaccttatgtttttccctctcatatctattatttttgtgatctcagttattaatcatttaaagggactctttcctagctgattggcacttaaaacaggatggaagtctttttttttttttttttttttgagatggagttttgctcttgttgcccaggctggagtgcaatggtgcaatctcagctcactgcaacctctgcctcccgggttcaagcgattctcctgcctcagcctcccaagtagctgggattacagtcatgcaccaccacgcccggctaattttgtatttttaatagagacggtgtttctccatgttggtcaggctggtctcaaactcctgacctcaggtgatccgcccacctcaacctcccaaagtgctgggattatgggcgtgagccaccgcgcccggcagttctggtctttaactaaggtataaggctatgactggtagtggtgtctctagtgactcatcaagtgatatttggcaagacattttcccatttatgccagtttcctattctgttgaatgaggaaattttctctctaaagacctaaaagttttgactttataggtttcaaagttctgtggaaacattttctattgcttattaatttgaatcttatgtaactctagcacagtactcaatatttatggcatttacatggtttatctcatgtttttttatagctcttcattgttcctatctgccaaatcattatacttcctacaagcagtgcagagagctgagtcttcagcaggtccaagaaatttgaacacactgaaggaagtcagccttcccacctgaagatcaacatgcctggcactctagcacttgaggatagctgaatgaagtaagttgttgatgttgcagtcctgtgaggatcacttcagaactgttataacagctgttttttgggagctggtgttggatggggtgtgttggtctaatgtgaagtggggctaaatgtgagatggaaagatgaccagtcttccatattactgactgggttcactgaagcaactcaaagacattatggtcttcttaccagttgtatcacagaagaatttagcctttgcttgtgtgttctatgtcttcactgtataggccctctgtcattcttagagccttaaacgttgagaagcttaaaacaccatttctgctttctgctgaaagggtaaccctttctcatctccgtttgtgagagactctgtcgtcagttaagattagtgtaaaaagaaaactaaactctgaagtagccattataaaagtgtgagaatgaagtcagttttctaaagagttggggaaaggtgatgctaaaggaggggattgagcaagtcctatcaaagagccttttatgaaaatacttagtcatctgtgacatcccatttggctcttccagaaatcctagtaaatagttgtaacaggatgttaagaggcatacattgtgtgttttaaatcctctgctactcattaggtatatgacctttgacaacttaaagtctctagacttctctgtttgtgagggttaaatgaaatcatgtatgtaaagtgctcacctattgcagtgcctggcacatgtcaagtaaaaggtaacccaagaagactcataagttcatttcccacaatataagtgaccactagcactatcaggtagcaggcagagttggcatgctttggttctatgtaagaaatccctaaggtaaaagtttataaatagaagagcatctgtgttggtattggtggttgttattattgtagtactataagtagtattcgtagtaacaatagtttattataattactaatgacactttttgattttttttatctttctgtgatgcttttcatgcctcttgtgcccctcactgtatcttgcctcttctactacttacttcctctgaatgtctgcctttgcttatctcttgcactcaagtgtgtatttctttgtctctttctttcttgtctttgctctttgttctctatctaaagtgtgtcttacccatttccatgtttctcttgctaatttctttcgtgtgtgcctttgcctcattttctctttttgttcacaagagtggtctgtgtcttgtcttagacatatctctcatttttcattttgttgctatttctctttgctctcctagatgtggctcttctttcacgctttatttcatgtctcctttttgggtcacatgctgtgtgctttttgtccttttcttgttctgtctacctctcctttctctgcctacctctcttttctctttgtgaactgtgattatttgttaccccttccccttctcgttcgttttaaatttcaccttttttctgagtctggcctcctttctgctgtttctactttttatctcacatttctcatttctgcatttcctttctgcctctcttgggctattctctctctcctcccctgcgtgcctcagcatctcttgctgtttgtgattttctatttcagtattaatctctgttggcttgtatttgttctctgcttcttccctttctactcacctttgagtatttcagcctcttcatgaatctatctccctctctttgatttcatgtaatctctccttaaatatttctttgcatatgtgggcaagtgtacgtgtgtgtgtgtcatgtgtggcagaggggcttcctaacccctgcctgataggtgcagaacgtcggctatcagagcaagcattgtggagcggttccttatgccaggctgccatgtgagatgatccaagaccaaaacaaggccctagactgcagtaaaacccagaactcaagtagggcagaaggtggaaggctcatatggatagaaggcccaaagtataagacagatggtttgagacttgagacccgaggactaagatggaaagcccatgttccaagatagatagaagcctcaggcctgaaaccaacaaaagcctcaagagccaagaaaacagagggtggcctgaattggaccgaaggcctgagttggatggaagtctcaaggcttgagttagaagtcttaagacctgggacaggacacatggaaggcctaagaactgagacttgtgacacaaggccaacgacctaagattagcccagggttgtagctggaagacctacaacccaaggatggaaggcccctgtcacaaagcctacctagatggatagaggacccaagcgaaaaaggtatctcaagactaacggccggaatctggaggcccatgacccagaacccaggaaggatagaagcttgaagacctggggaaatcccaagatgagaaccctaaaccctacctcttttctattgtttacacttcttactcttagatatttccagttctcctgtttatctttaagcctgattcttttgagatgtactttttgatgttgccggttacctttagattgacagtattatgcctgggccagtcttgagccagctttaaatcacagcttttacctatttgttaggctatagtgttttgtaaacttctgtttctattcacatcttctccacttgagagagacaccaaaatccagtcagtatctaatctggcttttgttaacttccctcaggagcagacattcatataggtgatactgtatttcagtcctttcttttgaccccagaagccctagactgagaagataaaatggtcaggttgttggggaaaaaaaagtgccaggctctctagagaaaaatgtgaagagatgctccaggccaatgagaagaattagacaagaaatacacagatgtgccagacttctgagaagcacctgccagcaacagcttccttctttgagcttaggtgagcaggattctggggtttgggatttctagtgatggttatggaaagggtgactgtgcctgggacaaagcgaggtcccaaggggacagcctgaactccctgctcatagtagtggccaaataatttggtggactgtgccaacgctactcctgggtttaatacccatctctaggcttaaagatgagagaacctgggactgttgagcatgtttaatactttccttgatttttttcttcctgtttatgtgggaagttgatttaaatgactgataatgtgtatgaaagcactgtaaaacataagagaaaaaccaattagtgtattggcaatcatgcagttaacatttgaaagtgcagtgtaaattgtgaagcattatgtaaatcaggggtccacagtttttctgtaaggggtcaaatcataaatactttagactgtgggccatatggtttctgttacatatttgttttttaaacaacgtttttataaggtcaaaatcattcttagtttttgagccaattggatttggcctgctgttcatagcttaccaccccctgatgtattatttgttattcagagaaaatttctgaatactactagtttccttttctgtgcctgtccctgtgctaggcactaaaaatgcaatgattattgatatctaggtgacctgaaaaaaaatagtgaatgtgctttgtaaactgtaaagcacttgtattctactgtgataagcgttgtggatacaaagaaaggagcaagcataaaaaagtgctctttcaaaaggatatagtactatgcagacacaaggaattgtttgataaatgaataaattatatgtatatttgaggccaatttgtgtttgctgctctggtaattttgagtaaaaatgcagtattccaggtatcagaaacgaaaacacatggaaactgcttttaaactttaaaatatactgaaaacataagggactaagcttgttgtggtcacctataatgtgccagataccatgctgggtgctagagctaccaaagggggaaaagtattctcatagaacaaaaaatttcagaaaggtgcatattaaagtgctttgtaaactaaagcatgatacaaatgtcaatgggctacatatttatgaatgaatgaatggatgaatgaatattaagtgcctcttacataccagctattttgggtactgtaaaatacaagattaattctcctatgtaataagaggaaagtttatcctctatactattcagatgtaaggaatgatatattgcttaattttaaacaatcaagactttactggtgaggttaagttaaattattactgatacatttttccaggtaaccaggaaagagctagtatgaggaaatgaagtaatagatgtgagatccagaccgaaagtcacttaattcagcttgcgaatgtgctttctaaattataaagcacttgtaaatgaaaaatttgatgctttctgtatgaataaaactttctgtaagctaggtattgtctctacaaaattctcattgtatagttaaaccacagtgagaagggttctataagtagttatacaaaccaagggtttaaatacctgttaaatagatcaattttgattgcctactatgtgaactcactgttaaaggcactgaaaatttatcatatttcatttagccacagccaaaaataaggcaatacctatgttagcattttgtgaactctaaggcaccatataaatgtaactgttgattttctcacttggtgctgggtactaggtttataaaattgtatgatagttattatattgtgcaaataaagtaggaaaatttgaataacaatgattatcttttgaatacgcatacgcaagggattggttgtctgaagaatgccactatagtagttatctattgtgtgccaatctcattgctaggcattggggatgcaaagataaaccatctttattgtgtcttgggtagcagaagaaaatatgtgtaaaatcaatttataatttgtaaactgccacccatatataagctatatctgctgaatgatcattgattactcttatccttagagataacaactgggggcacaaacatttattatcattattgaacctacaacagagatctatgtgtagatttacaaagcctacagttctatacagataggaatgaactattggcttactgaatggtgattactttctgtggggctcggaactacatgccctaggatataaaaatgatgttatcattatagagtgctcacagaaggaaatgaagtaatataggtgtgagatccagaccaaaagtcatttaacaagtttattcagtgatgaaaacatgggacaaatggactaatataaggcagtgtactaagctgagtagagagataaagtcctgtccagaagatacatgcttcctggcctgattgaggagatggaaaatttttgcaaaaaacaaggtgttgtggtcttccatccagtttcttaagtgctgatgataaaagtgaattagacccaccttgacctggcctacagaagtaaaggagtaaaaataaatgcctcaggcgtgctttttgattcatttgataaacaaagcatcttttatgtggaatataccattctgggtcctgaggataagagagatgagggcattagatcactgacagctgaagatagaagaacatctttggtttgattgtttaaataatatttcaatgcctattctctgcaaggtactatgtttcgtaaattaaataggtctggcccagaagacccactcaattgcctttgagattaaaaaaaaaaaaaaaaagaaagaaaaatgcaagtttctttcaaaataaagagacatttttcctagtttcaggaatcccccaaatcacttcctcattggcttagtttaaagccaggagactgataaaagggctcagggtttgttctttaattcattaactaaacattctgcttttattacagttaaatggttcaagatgtaacaactagttttaaaggtatttgctcattggtctggcttagagacaggaagacatatgagcaataaaaaaaagattcttttgcatttaccaatttagtaaaaatttattaaaactgaataaagtgctgttcttaagtgcttgaaagacgtaaaccaaagtgcactttatctcatttatcttatggtggaaacacaggaacaaattctctaagagactgtgtttctttagttgagaagaaacttcattgagtagctgtgatatgttcgatactaaggaaaaactaaacagatcacctttgacatgcgttgtagagtgggaataagagagggctttttattttttcgttcatacgagtattgatgaagatgatactaaatgctaaatgaaatatatctgctccaaaaggcatttattctgacttggagatgcaacaaaaacacaaaaatggaatgaagtgatactcttcatcaaacagaagtgactgttatctcaaccattttgttaaatcctaaacagaaaacaaaaaaaatcatgacgaaaagacacttgcttattaattggcttggaaagtagaatataggagaaaggttactgtttattttttttcatgtattcattcattctacaaatatattcgggtgccaataggtacttggtataaggtttttggccccagagacatgggaaaaaaatgcatgccttcccagagaatgcctaatactttccttttggcttgttttcttgttaggggcatggcttagtccctaaataacattgtgtggtttaattcctactccgtatctcttctaccactctggccactacgataagcaggtagctgggttttgtagtgagcttgctccttaagttacaggaactctccttataatagacacttcattttcctagtccatccctcatgaaaaatgactgaccactgctgggcagcaggagggatgatgaccaactaattcccaaaccccagtctcattggtaccagccttggggaaccacctacacttgagccacaattggttttgaagtgcatttacaaggtttgtctattttcagttctttactttttacatgctgacacatacatacactgcctaaatagatctctttcagaaacaatcctcagataacgcatagcaaaatggagatggagacatgatttctcatgcaacagcttctctaattataccttagaaatgttctcctttttatcatcaaatctgctcaagaagggctttttatagtagaataatatcagtggatgaaaacagcttaacattttaccatgcttaagttttaagaataaaataaaaattggaaataattggccaaaattgaaaggaaaaatttttttaaaatttctctaaatgtaggcctggctgggctttgaccttttccgtttttaaatcactcacagagggtgggacaggaggaagagtgaaggaaaaggtcaaacctgttttaagggcaacctgcctttgttctgaattggtcttaagaacattaccagctccaggtttaaattgttcagtttcatgcagttccaatagctgatcattgttgagatgaggacaaaatcctttgtcctcactagtttgctttacatttttgaaaagtattatttttgtccaagtgcttatcaactaaaccttgtgttaggtaagaatggaatttattaagtgaatcagtgtgacccttcttgtcataagattatcttaaagctgaagccaaaatatgcttcaaaagaagaggactttattgttcattgtagttcatacattcaaagcatctgaactgtagtttctatagcaagccaattacatccataagtggagaaggaaatagataaatgtcaaagtatgattggtggagggagcaaggttgaagataatctggggttgaaattttctagttttcattctgtacatttttagttagacatcagatttgaaatattaatgtttacctttcaatgtgtggtatcagctggactcagtaacacccctttcttcagctggggatggggaatggattattggaaaatggaaagaagaaagtaactaaaagccttcctttcacagtttctggcatcactaccactactgattaaacaagaataagagaacattttatcatcatctgctttattcacataaatgaagttgtgatgaataaatctgcttttatgcagacacaaggaattaagtggcttcgtcattgtccttctacctcaaagataatttattccaaaagctaagataaatggaagactcttgaacttgtgaactgatgtgaaatgcagaatctcttttgagtctttgctgtttggaagattgaaaaatattgttcagcatgggtgaccaccagaaagtaatcttaagccatctagatgtcacaattgaaacaaactggggagttggttgctattgtaaaataaaatatactgttttgaaaactttgtattttgatgtgacaatttctaactcactgtccctaaccacactaattaccgtaagttcttcatttcttttttctttttctttttaaattaataaattaatttattttttggagatggagtctcgctttgttgcccaggctggagtgcagtggtgccatcttggctcactgtaacctctgcctcctgggttcaagcgattctcctgcctcagcctcaccagtagctgggattacagtcatgagccaccatgcctggctaatggttgtatttttagtagagacggggttttgccatgttggccaggctggtcacgaactcctgacttaaagtgaaacacctgcctcggcctcccaaagttctgggattacaggcgggagccaccgtgcctggcctcatttctttttttaaactaccttaatcacccagtgtgggtaaatggtttgaagtctcatttcttacagcatcagttgctttggtcaaggatactgagaagcacaaacccagtaaaaaatgtgagaagcaaaaaacttgaggatcaaaagtgggagaggagaagggtataaactgtaaggctgtgggaattaagcattcatgaaagaggcccagaccctgagtaggtgaagggatcttcagtgtttctagaattctgaatgatcaaatacccaaacattagattggtgactttataggcaaatgaaccagcacagtattttttttttttttgagacagagtctcgctctgtctccaggctggagtgcggtggtgtgatcggctcactgcaacctctgccacccaggttcaagcaattgtgcctcagcctcccgaatagctgggattaaaggcgtgtagtacgacagcaggctaatttttgtatttaatttagtagagagagggtttcaccattttggccaggctagtctcttaactcctgacctcaaatgatccacccgcctcggcctcccaaagtgctgggattacgggcataagtcgccgtgcccagcccccagcacagtattctataggcaagagttcctactgctttgttggaaattaaactggaaactggtttttttttttttctccagaaagtcttaagctgttatgggcccagatggttattcagtatatgaacttttttttttttttttttagacagtgtcttgctcagccacccaggctggagtgcagtggtgtgatctcggctcactgcagccactgtctcccaggttcaagtgattctcccgtcccagcctccagaacagctggcattacaggcacccgccatcatgcccggctaacttttgtattttagtagagactgggtttcaccatgttggccaggctagtcttgaactcctgacctcaggtgatccaccagccttggcctcccaaggtgctaggattacaggtgtgagccgccgcacccgtcccagtacatggacctttaaaaccgatgcctgaagaactcttacctatgtgttaacagttgaattttgtcattataaatgagtagagtttgaggtgataaagttgacccatatcttgggggttgcttctgaactgggatggtgctacatggacttttctctttactcttatttctttgcaaggctggatgtgtaggacagagggaaagcaggtgaggcggtaaggagacttcctgaagttattcttgagtgtcttctgttcctttgtccatccctcttgattccttcagcagatcctattcccataggggcttacttcagtccccttgtcatatttgctgtgcttactcttgtgtttgtggtgctttggtcctcaaattccttgattctcttgtaaaatttgaagggagaggaaatgaaaaacaccgtatctcctggttagtgaggaaaggtcagacaaggcaattttataggggcagcagaaatatttagaaaatgtcaaagcatttgatagtatttttcagtttttgtattttttatgtggtgtgtatgaagtggtcactgtatgcttgtagttggatttggtgccagcccaacccacatccacaaaaacttgtgcctcctatcaatttactcttttacccttggtcatgagaaaaggtaatgttactgaggccagtagacttaggcaagcatctatcattcaaatttcgaagtggaataatttaaatggggtttaaaatttagccagccattctattcactgtgaatggataggcaggaagtgtgctaatcataggtccaacttctgaaaaaggtggaggtagcaaggaaaaccagttgaaggaccttagtacctttcccatgaattatagcaaatggagcaccaaggcaattacatggtagctgaggagtcattagttctcaaaattcaaaccccactcagctatattgtttccattggcttggtaaaggtgaacttttgaggggttcttattgttagtatttcctgggtttgccacagtcttgctcccagtaccagcattctcagtgacgagcttccttttacccactccagtttctcttctctgtgtactctggatcaaaatagtaactcctttctagagtgctagaacaaaagctggcatcacttgagggcctaaggagaggagagcaaagggagagcagaatgcaaagtagagtgggaaagaaagttggattcgagcagccttgcaggtagctaactacttaggcagaacctgtcactttatgggaactccgtggtaaggaaaaaaattcataagcagactttgcaggcaggatttcaaaaaatcttaggaattctgactcacattaaatagaagaagaatgtcaaaggttgagtggcttgtgagggatgagctttgagtggaccctactttataatattccgtgaagaaatgattagatatatcccaaagacctagaaaaacccttccccttgtagccttttccttgctgttttttttttttgttgttgttgttgttgttactaatgaattattctgaaagtatcccaggaaacgcaatgacaatgagagtggtggaacagatgtgggttctttctggcagtggactatattgtctccccgcctctccactcccagaggacatttggctgaagtaccagagtccaagaaatgtcttgttactaggcagatagtctcatctgcatagtgtggtggttttactccctcacttcagttccactgtattttattttgttttgctgcatgatggtgttagctgtgtaattcccattgggccaattagaattgtgtatctaaatgcacaaaataaagatgaggcatctgaaacccagagaaaataacttgatcaatgtcgcagcgcaaaatagctgaggtgaccctagatccaaattcacttaatttctaaacaaattcttttctcactgtatattatcatagcctcttttataacggatacatgctcatcaggaaagagcttggattatgagtaatttacagttagaatggctcttcctaatcatagctaacctccagtgtactattttatgtctttatgctcacgaggaaataaagtcttagagaatatccaaagagagggattatagtaattatgactattaactggtacctaaatgggagcaatgtgaactacttaaaggaagacacaggaagataattcatctacctccgattcctctaccttggccctatactttctagcccagggagatagtctgaaccaagtgaaaatcagtttttcttctgttactacaggtctgctgaaactataaaagtattaatttgcccccctgtagtttcccattgttacctctctttttatatccattttgtgactattacttttctttttctttttttttgaaatgacgtctcgcccttgttgcccaggctggagtgtgatggcgcaatctcagctcactgcaacctctgcctcctgggttcaaatgattctcctgccttggccccctgagtagctgggaatacaggagcctgccaccacacccagctaatttttttcttgtatttttagtagagatggggtttcaccatgttggccaggctggtctagaattcctgacctcgggtgatccacctgcctcgtccttccaaagtggtgggattacaggtgtgagcccccgcgcccgaccgactattacttttctactataaatcaagacaaaaaggggcttggggtaggcaggggttggagaactggggagcagacagtctcagttaaacctttacttgtatttgctcatggctggagtccagtcgttgtgctcctcccattgtgagctagaatactcacagttgctacttcctgaagaactggaaaacttgtctgccatagtatcccatagcatttggattgtggacataggaggacagctgatgcaacctgaatctgcagggagatagaccatgagacagaaggccggttgttagagtaccttgcatggtaccatcctataatgccaaaccaatcttctcactgtcacctctcatgtttgaataataattggaaagagcaagacttagcagggaataaagttacttttgagctaccaattttactacttaaaaagtggtgaataggtagagatggattccagttgtcctcaccatagtaagctgttgcctccaaaagaaagagaatgaaccaagaagaatatagtggacactgcatagtattggctcaactagattctgagaaaagggactttctgtaaaggctgctacctggtctttgatacagcaactagacatgtattttggggttctaagataaggtttttggctctgagcagcagagagctgagaagcaggacatgaagaattggacttacctgaactatagccaaatggatgtgaccgctaattgtagatggcaggctggcttttgagagaacccagaatgaatagtaaatctcattttcagcagaagagagtctgctatgaggttcacagaaaatagctctagtaacaacagccccattgggcactagattggataccagttcccataggtaaaacaataatattagctattctgcaaacgcaaagcaaaagctaaagaaaatcgctaaccaaccatgacttccctttaaaatacagtctggaaacagaagtccctttattccttccctttgatttcttgcccttttcctgcattgctagataaggaatgcaatggccagaaggaagggtggataatctaaattaagtagcgaatattagagaatgtttacataatggtgttgggcggggggacatttagaatagccccttcagtagcaagattatgctaagtaaagtacttgtctcatcttaagctatttttgttgagacagggactgtgcacagctccctctctaatgccaatccttgcttaattttccctccaacgaagtttcttacctgttcctctttagaataagaaatgctggaggaatggtcagcgttgaaggaagtaagcctataagggaaggcacagaagatgacatcaggctttagaataggtaggcacagaaagactggtatcaagcaagaggtcccatatcctagaggttcaaaacagatgttcactggtagggagaaaagtgggcagatttacctgataggctgattaaacagatacaaatgccatttagatgcttctataactcttgcctatattctgattccttctcaccttagtgtttatagcttttgccccatcaactgttttctctgtacatttcctaataaaatctctgaaacaccccaatctcatttttatagagctaaactttatataagtagagctgtctagtgcctgtgtggtgtgatttcatacaagaaggccttctttcccaagcctatattttccctccttggtagctgatgtctgaaattctgttatctggagacgaatctttgattctacattaagtgataaagcagggacaagtttatttttgtacctaacaaaagtacctttctcatagtggaaaatgcctgtcaaattttttggaattatatttaaacttcaggaccctctaggaaagaaaacaagacttccatttcacacttaaggcaagatcagctaataccataatatgggtggatgccacagtttttttccaactcgtggaaaatttcattaattaatcatagcattgattcctgttaagcctagtaagggacaaaaatgctcgttgcccaccaaaatacattctcccattcttgcttgatgtgtggctgcccagctagggtacatttttcagcttcttttgcagttctgtgcagccaaatgattgttatgatcaataaaatgtgagtagaagtgatgtatgccatttccatgcctgggtcctaagacatagggtatgctctcctttccatactttctcccaccagctgcaactcagatgtaatggctacccagtttcagtatacagatgggagtgattccctatgagatgaaagtacaatgacttggaaggaaatcaagtccctgaatgactaagaaacagaattccctctctgatttgaactttttacattgatactgtcatgtaagaaataattaacactctttttgtttaatccattgaattgttgattctctttcctatagtagccaatttttcttctcataactaattcaactggatgcatccccagaatccttcacgtagcatttcaggtggctgctactaataatttagagttggcatgcaagataaaatttatttaccatcctagcactaaagggataaatcgctgacagcagatcctattttgaaagccgattatgaagaagctagagaacaggagtctctgagaagaaggagtaccatacagaagggaatagatattaaaagagactgagacaatacagaccaaccttaccttctttataaccttcccttaggcctgctctatggttcacaatacaggtgggaaagatgtgctcagagaaattagggccaaccagatggctggatggaaaagaatgtcttacatgaaatagtttcccttggtggcaatgctagggagagagaagatcaataatgaaaaaagtcaaaagaactatccagcaccagcttaggaagaaagcataggtcttgcaaacaagtcagaacaatgtctaagaatttgctatgttaagtttttttcttccaacttttattttaggttcaaggggtacttttgcagcaaaagccaatgggtaaatttccatgggtaaattgtgtgtcatgggctttgatgtacaaatgatttcattacactggtagtgagcatagtacctgataggtagattttttgatcctcactctcctcccatcctatgttaatcttttaacatctttggaaaataagaattggcactagcttatgcattccagtagcccatctacataaaaccagtgagggggcctcatgatatcaagatagtggacttaaaagaaatgggatacgtactgttcatcttgtttagtccctttgtgtttgtttttcagtgtcctaaagtggatattaagcaagctgagagtaatttgagtaccgctttattctgtggtagagttacctagaaaacatatgggttgagggcatgtaatcatgtcccccatatctgtgaaaatggacagtaagaagtggtaaacattgttaggggcagggttccactaggaaatttggataaagagaaatgtaaatttcatattttctactcataggccattttaccattagcagtaatatctaaatactgaaaacagtaattataggaaatcttgggaactaaaagtcaacttaatgatgattataattttcctagacttaacacccattcttttggtatactgacagtccctaatgaggatacaagccattggtctaaaataggcattgcttgtcacaaccaaattcctcatttatgtcaatgtctgctttaactaagttcctttggcttcatatctatatagcctttccaaccagtgaaagtgtcaacattcccacagtcagctgtttcctctataacttcatttacctttgatttgaatttcatttccagcattgtgactttagtttctttcttgagctttcatttttattggccaattccctctttcattatatgtttttgttaaatgtcacttgggtttatcactggcagacaaagaggcaacacaaacacatggtttgttctctgcacatgtactgaatagctgataagtgaccagtcaccaaagactgtgaaagaagtgatgtgattcataattgatcatgatgcacatctgttagttatatagtaatttacatactgaaaacctagcagtgaaatttgtactttatttaatatcacagtcaatataccatggtaactgaaatttaaactgtgttgttggggtacttgtattatttaactaaaccatggtgcaaagtgaggaatatctgagtctttactttgaatattgaccactttagtatgtttgtgaatatatatgtgaaattgttttttttaaacagtgagatgtcaattgtaggctctcatgtttgctgttttaaagtagatgttcgatagagtataatcacatgtagatttcaatagatggccctatctacaatgcactaactgtcatatactacacgtggagtaaacaaaaaagtctattttgctatttcagggatgtcaaggccagtgtcttcaaggggaattctgtagctttgtacataaagaaacccagttacaccaaaacactcattgtctaccagaccttctgggattaattctattcaagatagcaagaaaaattactaagccaaacaaaattttgaattgccaatcagaaatacagtcacaaattggataaatattgtcatggtggtcttttaaaccttactttcagttttttttttttttgtgtgagtttagatcaataacaggacttagaggcttttaccttcaaagagaaagtgacctcatgttcccaatgactagggcctcttgagaggaagtatgcctaataattaaaagcaaatactctagggcatcatggcccaatatggtagctactagccatatatgactattgagtacttaaaatgtggctagtacaaattgagatgtattataaatgtaaaatacatactgaatttatgaattgatttttataattaccacatgttaaaataatattatttggatacagtagtttaaattacatatattattaaactttcaaaaataaaacaaataggagttggaaagctatggcttaccacctgtttttgtttgtcccacaagctaacaatgggttttccatctctaaatgcttaaatttttaaaggaatattttattacatgtgaaaattatatgaaatttaaatttcagtttccatagtacttattgggaaagtaccatgtccattcattttcatattgtctatggctgcttttgtgctataatggcactgctgagtagttgtgacagatagcatatggaatgcaaagtctataccagttattctcacctcagggcaattttacctcctatgggacatctagaaatgtctggaaaatgtttttattgtcacaactgagaataagatgttattggcacctagggagtagaagtcagggatgcagttaaataccctacagtgaaaaggaaagcactccacaacaaagaattatctggcccaaaatgtgaatactgttgaggttgagaaaccctggcctaatctacttattgtctggccctttgaggaaaaaaaatttctaacctcttgtctaaaaacaagtcattttggttgggcgctgtgggtcatgcctgtagtcccagcattttgggaggctgaggcaggtggattgcctgagcttagagagtttgagaccagcctgggcaaaatggagaaaccccatctctatcaaaaatacaaaaaattagctggacatggtggcacacgtatgtggttctaactacttgggagactgaggtggcaggatgacctgagcctgggaggcagaggttacagtgagctgagattgtgccactgcactccaacatgggtgacagagggaagaccccatctcaaaataaataaatgaaataaaaactgttttaaaactaggacttgtcaacagagagtcaaactctataaaatatttgaagagatttattctgagccaagtaaatatgagtgaccaatagctcatgacacagctccaagagacctgagaacatgtacccaaagtagtcaggctacagcttggttttatacattttagggaaacataagacatcaatcaatgcatgtaagatgtacattggttgggtctgaaaatgtgggacaactctaagtgggggcttccaggtcataggaagactcagaggttttctgattaaagtcttgaaatcaatagaagggagtatctgcattaacataaggggcttctgagactaaggctcttatgcagatgaagcctccaggtaggaggcttcagagagaatagattgtaaatgtttcttatcagacttaaaaaggtaccagactcttagttaattctctcctggataagcgaaaagatctggaaagggaagggcattctctacagaatgtaggtttccccacaagagacagctttgcagggccatttaaaaatatgttgaataaatatattttggggcctgctatctgttgtgttcatatcttattgctacaaagagtctactttgtcaatcttaaggtctctgttttaatgttaatgttggtcatttgtgtctaaattccaaagggaggaggatataatgaggcatgcctgaccacccacttccatcatggcctgaattagtctttcaggttaactttagaatgcccttggctgagaggaggggtccattcagttggttggggggcttagaatttcatttttggtttacagaccttatatattcttatttattttacttagttatatttgactattcttatttccttgaaagagtcaagaattgccaagatgaaacacctttggggtatctggacaggttttacctctgtcaacccttgcaagaaaattagaattgacttaccttggggatggagaataggtgacacttgtgaatgaagaaaatattgtagtgaaggccttgtgattgggaaaatcagagggcttggtgagggtacaaatgttggctgttgctgaaaaggcttctgtgatggagagtgaagcaactggggtgcagtggggtggtggcagtggtgccagtggtgccaatggtggtagtagctgctgagtgtcaggcctctgagcccaagcctgcacatatacatccagatggcctgaagcaactgaagaatcacaaaagaagtgaaaatggccgattcctgccttaactgatgacattaccttgtgaaattccttctcctggctcagaagctcccccactgagcaccttgtgaccactacccctgcctgccagagaacaactccctttgattgtaattttccactacctacccaaatcctataaaactgccccatccctatctccctttgctgactttcttttcagactcagcccgcctgcacccaggtgattaaaaagctttattgctcacacaaagcctgtttggtggtctcttcccacggatgcacgtgacatttggtgccataactcagatcaggggacttcccttgggagatcaatcccctgtcctcctgttctttgctccgtgagaaagatccacctatgacctctggtcctcagaccaaccagcccaaggaacatctcaccaattttaaatctggtaagcagcctctttttgctctcttctccaacttctttcactatccctcaacctctttctcctttcaatttctgtgctacccttcaatctctcccttcccttaatttcagtgcctttccttttctggtagagacagaggagacatgttttatgtgtgaacccaaaactctgacgatggtcatggtctcgggaagacagtcttccctcagtgtt

SEQ ID NO: 112 - DNA, 56094 bp, Homo sapiens
aacactgagggaagactgtcttcccgagaccatgaccatcgtcagagttttgggttcacacataaaacatgtctcctctgtctctaccagaaaaggaaaggcactgaaattaagggaagggagagattgaagggtagcacagaaattgaaaggagaaagaggttgagggatagtgaaagaagttggagaagagagcaaaaagaggctgcttaccagatttaaaattggtgagatgttccttgggctggttggtctgaggaccagaggtcataggtggatctttctcacggagcaaagaacaggaggacaggggattgatctcccaagggaagtcccctgatctgagttatggcaccaaatgtcacgtgcatccgtgggaagagaccaccaaacaggctttgtgtgagcaataaagctttttaatcacctgggtgcaggcgggctgagtctgaaaagaaagtcagcaaagggagatagggatggggcagttttataggatttgggtaggtagtggaaaattacaatcaaagggagttgttctctggcaggcaggggtagtggtcacaaggtgctcagtgggggagcttctgagccaggagaaggaatttcacaaggtaatgtcatcagttaaggcaggaatcggccattttcacttcttttgtgattcttcagttgcttcaggccatctggatgtatatgtgcaggcttgggctcagaggcctgacactcagcagctactaccaccattggcaccactggcaccactgccaccaccccactgcaccccagttgcttcactctccatcacagaagccttttcagcaacagccaacatttgtaccctcaccaagccctctgattttcccaatcacaaggccttcactacaatattttcttcattcacaagtgtcacctattctccatccccaaggtaagtcaattctaattttcttgcaagggttgacagaggtaaaacctgtccagataccccaaaggtgtttcatcttggcaattcttgactctttcaaggaaataagaatagtcaaatataactaagtaaaataaataagaatatataaggtctgtaaaccaaaaatgaaattctaagccccccaaccaactgaatggacccctcctctcagccaagggcattctaaagttaacctgaaagactaattcaggccatgatggaagtgggtggtcaggcatgcctcattatatcctcctccctttggaatttagacacaaatgaccaacattaacattaaaacagagaccttaagattgacaaagtagactctttgtagcaataagatatgaacacaacagatagcaggccccaaaatatatttattcaacatatttttaaatggccctgcaaagctgtctcttgtggggaaacctacattctgtagagaatgcccttccctttccagatcttttcgcttatccaggagagaattaactaagagtctggtacctttttaagtctgataagaaacatttacaatctattctctctgaagcctcctacctggaggcttcatctgcataagagccttagtctcagaagccccttatgttaatgcagatactcccttctattgatttcaagactttaatcagaaaacctctgagtcttcctatgacctggaagcccccacttagagttgtcccacattttcagacccaaccaatgtacatcttacatgcattgattgatgtcttatgtttccctaaaatgtataaaaccaagctgtagcctgactactttgggtacatgttctcaggtctcttggagctgtgtcatgagctattggtcactcatatttacttggctcagaataaatctcttcaaatattttatagagtttgactctctgttgacaagtcctagttttaaaacagtttttatttcatttatttattttgagatggggtcttccctctgtcacccatgttggagtgcagtggcacaatctcagctcactgtaacctctgcctcccaggctcaggtcatcctgccacctcagtctcccaagtagttagaaccacatacgtgtgccaccatgtccagctaattttttgtatttttgatagagatggggtttctccattttgcccaggctggtctcaaactctctaagctcaggcaatccacctgcctcagcctcccaaaatgctgggactacaggcatgacccacagcgcccaaccaaaatgacttgtttttagacaagaggttagaaattttttttcctcaaagggccagacaataagtagattaggccagggtttctcaacctcaacagtattcacattttgggccagataattctttgttgtggagtgctttccttttcactgtagggtatttaactgcatccctgacttctactccctaggtgccaataacatcttattctcagttgtgacaataaaaacattttccagacatttctagatgtcccataggaggtaaaattgccctgaggtgagaataactggtatagactttgcattccatatgctatctgtcacaactactcagcagtgccattatagcacaaaagcagccatagacaatatgaaaatgaatggacatggtactttcccaataagtactatggaaactgaaatttaaatttcatataattttcacatgtaataaaatattcctttaaaaatttaagcatttagagatggaaaacccattgttagcttgtgggacaaacaaaaacaggtggtaagccatagctttccaactcctatttgttttatttttgaaagtttaataatatatgtaatttaaactactgtatccaaataatattattttaacatgtggtaattataaaaatcaattcataaattcagtatgtattttacatttataatacatctcaatttgtactagccacattttaagtactcaatagtcatatatggctagtagctaccatattgggccatgatgccctagagtatttgcttttaattattaggcatacttcctctcaagaggccctagtcattgggaacatgaggtcactttctctttgaaggtaaaagcctctaagtcctgttattgatctaaactcacacaaaaaaaaaaaaaactgaaagtaaggtttaaaagaccaccatgacaatatttatccaatttgtgactgtatttctgattggcaattcaaaattttgtttggcttagtaatttttcttgctatcttgaatagaattaatcccagaaggtctggtagacaatgagtgttttggtgtaactgggtttctttatgtacaaagctacagaattccccttgaagacactggccttgacatccctgaaatagcaaaatagacttttttgtttactccacgtgtagtatatgacagttagtgcattgtagatagggccatctattgaaatctacatgtgattatactctatcgaacatctactttaaaacagcaaacatgagagcctacaattgacatctcactgtttaaaaaaaacaatttcacatatatattcacaaacatactaaagtggtcaatattcaaagtaaagactcagatattcctcactttgcaccatggtttagttaaataatacaagtaccccaacaacacagtttaaatttcagttaccatggtatattgactgtgatattaaataaagtacaaatttcactgctaggttttcagtatgtaaattactatataactaacagatgtgcatcatgatcaattatgaatcacatcacttctttcacagtctttggtgactggtcacttatcagctattcagtacatgtgcagagaacaaaccatgtgtttgtgttgcctctttgtctgccagtgataaacccaagtgacatttaacaaaaacatataatgaaagagggaattggccaataaaaatgaaagctcaagaaagaaactaaagtcacaatgctggaaatgaaattcaaatcaaaggtaaatgaagttatagaggaaacagctgactgtgggaatgttgacactttcactggttggaaaggctatatagatatgaagccaaaggaacttagttaaagcagacattgacataaatgaggaatttggttgtgacaagcaatgcctattttagaccaatggcttgtatcctcattagggactgtcagtataccaaaagaatgggtgttaagtctaggaaaattataatcatcattaagttgacttttagttcccaagatttcctataattactgttttcagtatttagatattactgctaatggtaaaatggcctatgagtagaaaatatgaaatttacatttctctttatccaaatttcctagtggaaccctgcccctaacaatgtttaccacttcttactgtccattttcacagatatgggggacatgattacatgccctcaacccatatgttttctaggtaactctaccacagaataaagcggtactcaaattactctcagcttgcttaatatccactttaggacactgaaaaacaaacacaaagggactaaacaagatgaacagtacgtatcccatttcttttaagtccactatcttgatatcatgaggccccctcactggttttatgtagatgggctactggaatgcataagctagtgccaattcttattttccaaagatgttaaaagattaacataggatgggaggagagtgaggatcaaaaaatctacctatcaggtactatgctcactaccagtgtaatgaaatcatttgtacatcaaagcccatgacacacaatttacccatggaaatttacccattggcttttgctgcaaaagtaccccttgaacctaaaataaaagttggaagaaaaaaacttaacatagcaaattcttagacattgttctgacttgtttgcaagacctatgctttcttcctaagctggtgctggatagttcttttgacttttttcattattgatcttctctctccctagcattgccaccaagggaaactatttcatgtaagacattcttttccatccagccatctggttggccctaatttctctgagcacatctttcccacctgtattgtgaaccatagagcaggcctaagggaaggttataaagaaggtaaggttggtctgtattgtctcagtctcttttaatatctattcccttctgtatggtactccttcttctcagagactcctgttctctagcttcttcataatcggctttcaaaataggatctgctgtcagcgatttatccctttagtgctaggatggtaaataaattttatcttgcatgccaactctaaattattagtagcagccacctgaaatgctacgtgaaggattctggggatgcatccagttgaattagttatgagaagaaaaattggctactataggaaagagaatcaacaattcaatggattaaacaaaaagagtgttaattatttcttacatgacagtatcaatgtaaaaagttcaaatcagagagggaattctgtttcttagtcattcagggacttgatttccttccaagtcattgtactttcatctcatagggaatcactcccatctgtatactgaaactgggtagccattacatctgagttgcagctggtgggagaaagtatggaaaggagagcataccctatgtcttaggacccaggcatggaaatggcatacatcacttctactcacattttattgatcataacaatcatttggctgcacagaactgcaaaagaagctgaaaaatgtaccctagctgggcagccacacatcaagcaagaatgggagaatgtattttggtgggcaacgagcatttttgtcccttactaggcttaacaggaatcaatgctatgattaattaatgaaattttccacgagttggaaaaaaactgtggcatccacccatattatggtattagctgatcttgccttaagtgtgaaatggaagtcttgttttctttcctagagggtcctgaagtttaaatataattccaaaaaatttgacaggcattttccactatgagaaaggtacttttgttaggtacaaaaataaacttgtccctgctttatcacttaatgtagaatcaaagattcgtctccagataacagaatttcagacatcagctaccaaggagggaaaatataggcttgggaaagaaggccttcttgtatgaaatcacaccacacaggcactagacagctctacttatataaagtttagctctataaaaatgagattggggtgtttcagagattttattaggaaatgtacagagaaaacagttgatggggcaaaagctataaacactaaggtgagaaggaatcagaatataggcaagagttatagaagcatctaaatggcatttgtatctgtttaatcagcctatcaggtaaatctgcccacttttctccctaccagtgaacatctgttttgaacctctaggatatgggacctcttgcttgataccagtctttctgtgcctacctattctaaagcctgatgtcatcttctgtgccttcccttataggcttacttccttcaacgctgaccattcctccagcatttcttattctaaagaggaacaggtaagaaacttcgttggagggaaaattaagcaaggattggcattagagagggagctgtgcacagtccctgtctcaacaaaaatagcttaagatgagacaagtactttacttagcataatcttgctactgaaggggctattctaaatgtccccccgcccaacaccattatgtaaacattctctaatattcgctacttaatttagattatccacccttccttctggccattgcattccttatctagcaatgcaggaaaagggcaagaaatcaaagggaaggaataaagggacttctgtttccagactgtattttaaagggaagtcatggttggttagcgattttctttagcttttgctttgcgtttgcagaatagctaatattattgttttacctatgggaactggtatccaatctagtgcccaatggggctgttgttactagagctattttctgtgaacctcatagcagactctcttctgctgaaaatgagatttactattcattctgggttctctcaaaagccagcctgccatctacaattagcggtcacatccatttggctatagttcaggtaagtccaattcttcatgtcctgcttctcagctctctgctgctcagagccaaaaaccttatcttagaaccccaaaatacatgtctagttgctgtatcaaagaccaggtagcagcctttacagaaagtcccttttctcagaatctagttgagccaatactatgcagtgtccactatattcttcttggttcattctctttcttttggaggcaacagcttactatggtgaggacaactggaatccatctctacctattcaccactttttaagtagtaaaattggtagctcaaaagtaactttattccctgctaagtcttgctctttccaattattattcaaacatgagaggtgacagtgagaagattggtttggcattataggatggtaccatgcaaggtactctaacaaccggccttctgtctcatggtctatctccctgcagattcaggttgcatcagctgtcctcctatgtccacaatccaaatgctatgggatactatggcagacaagttttccagttcttcaggaagtagcaactgtgagtattctagctcacaatgggaggagcacaacgactggactccagccatgagcaaatacaagtaaaggtttaactgagactgtctgctccccagttctccaacccctgcctaccccaagcccctttttgtcttgatttatagtagaaaagtaatagtcggtcgggcgcgggggctcacacctgtaatcccaccactttggaaggacgaggcaggtggatcacccgaggtcaggaattctagaccagcctggccaacatggtgaaaccccatctctactaaaaatacaagaaaaaaattagctgggtgtggtggcaggctcctgtattcccagctactcagggggccaaggcaggagaatcatttgaacccaggaggcagaggttgcagtgagctgagattgcgccatcacactccagcctgggcaacaagggcgagacgtcatttcaaaaaaaaagaaaaagaaaagtaatagtcacaaaatggatataaaaagagaggtaacaatgggaaactacaggggggcaaattaatacttttatagtttcagcagacctgtagtaacagaagaaaaactgattttcacttggttcagactatctccctgggctagaaagtatagggccaaggtagaggaatcggaggtagatgaattatcttcctgtgtcttcctttaagtagttcacattgctcccatttaggtaccagttaatagtcataattactataatccctctctttggatattctctaagactttatttcctcgtgagcataaagacataaaatagtacactggaggttagctatgattaggaagagccattctaactgtaaattactcataatccaagctctttcctgatgagcatgtatccgttataaaagaggctatgataatatacagtgagaaaagaatttgtttagaaattaagtgaatttggatctagggtcacctcagctattttgcgctgcgacattgatcaagttattttctctgggtttcagatgcctcatctttattttgtgcatttagatacacaattctaattggcccaatgggaattacacagctaacaccatcatgcagcaaaacaaaataaaatacagtggaactgaagtgagggagtaaaaccaccacactatgcagatgagactatctgcctagtaacaagacatttcttggactctggtacttcagccaaatgtcctctgggagtggagaggcggggagacaatatagtccactgccagaaagaacccacatctgttccaccactctcattgtcattgcgtttcctgggatactttcagaataattcattagtaacaacaacaacaacaacaaaaaaaaaaaacagcaaggaaaaggctacaaggggaagggtttttctaggtctttgggatatatctaatcatttcttcacggaatattataaagtagggtccactcaaagctcatccctcacaagccactcaacctttgacattcttcttctatttaatgtgagtcagaattcctaagattttttgaaatcctgcctgcaaagtctgcttatgaatttttttccttaccacggagttcccataaagtgacaggttctgcctaagtagttagctacctgcaaggctgctcgaatccaactttctttcccactctactttgcattctgctctccctttgctctcctctccttaggccctcaagtgatgccagcttttgttctagcactctagaaaggagttactattttgatccagagtacacagagaagagaaactggagtgggtaaaaggaagctcgtcactgagaatgctggtactgggagcaagactgtggcaaacccaggaaatactaacaataagaacccctcaaaagttcacctttaccaagccaatggaaacaatatagctgagtggggtttgaattttgagaactaatgactcctcagctaccatgtaattgccttggtgctccatttgctataattcatgggaaaggtactaaggtccttcaactggttttccttgctacctccacctttttcagaagttggacctatgattagcacacttcctgcctatccattcacagtgaatagaatggctggctaaattttaaaccccatttaaattattccacttcgaaatttgaatgatagatgcttgcctaagtctactggcctcagtaacattaccttttctcatgaccaagggtaaaagagtaaattgataggaggcacaagtttttgtggatgtgggttgggctggcaccaaatccaactacaagcatacagtgaccacttcatacacaccacataaaaaatacaaaaactgaaaaatactatcaaatgctttgacattttctaaatatttctgctgcccctataaaattgccttgtctgacctttcctcactaaccaggagatacggtgtttttcatttcctctcccttcaaattttacaagagaatcaaggaatttgaggaccaaagcaccacaaacacaagagtaagcacagcaaatatgacaaggggactgaagtaagcccctatgggaataggatctgctgaaggaatcaagagggatggacaaaggaacagaagacactcaagaataacttcaggaagtctccttaccgcctcacctgctttccctctgtcctacacatccagccttgcaaagaaataagagtaaagagaaaagtccatgtagcaccatcccagttcagaagcaacccccaagatatgggtcaactttatcacctcaaactctactcatttataatgacaaaattcaactgttaacacataggtaagagttcttcaggcatcggttttaaaggtccatgtactgggacgggtgcggcggctcacacctgtaatcctagcaccttgggaggccaaggctggtggatcacctgaggtcaggagttcaagactagcctggccaacatggtgaaacccagtctctactaaaatacaaaagttagccgggcatgatggcgggtgcctgtaatgccagctgttctggaggctgggacgggagaatcacttgaacctgggagacagtggctgcagtgagccgagatcacaccactgcactccagcctgggtggctgagcaagacactgtctaaaaaaaaaaaaaaaaaagttcatatactgaataaccatctgggcccataacagcttaagactttctggagaaaaaaaaaaaaaccagtttccagtttaatttccaacaaagcagtaggaactcttgcctatagaatactgtgctgggggctgggcacggcgacttatgcccgtaatcccagcactttgggaggccgaggcgggtggatcatttgaggtcaggagttaagagactagcctggccaaaatggtgaaaccctctctctactaaattaaatacaaaaattagcctgctgtcgtactacacgcctttaatcccagctattcgggaggctgaggcacaattgcttgaacctgggtggcagaggttgcagtgagccgatcacaccaccgcactccagcctggagacagagcgagactctgtctcaaaaaaaaaaaaaatactgtgctggttcatttgcctataaagtcaccaatctaatgtttgggtatttgatcattcagaattctagaaacactgaagatcccttcacctactcagggtctgggcctctttcatgaatgcttaattcccacagccttacagtttatacccttctcctctcccacttttgatcctcaagttttttgcttctcacattttttactgggtttgtgcttctcagtatccttgaccaaagcaactgatgctgtaagaaatgagacttcaaaccatttacccacactgggtgattaaggtagtttaaaaaaagaaatgaggccaggcacggtggctcccgcctgtaatcccagaactttgggaggccgaggcaggtgtttcactttaagtcaggagttcgtgaccagcctggccaacatggcaaaaccccgtctctactaaaaatacaaccattagccaggcatggtggctcatgactgtaatcccagctactggtgaggctgaggcaggagaatcgcttgaacccaggaggcagaggttacagtgagccaagatggcaccactgcactccagcctgggcaacaaagcgagactccatctccaaaaaataaattaatttattaatttaaaaagaaaaagaaaaaagaaatgaagaacttacggtaattagtgtggttagggacagtgagttagaaattgtcacatcaaaatacaaagttttcaaaacagtatattttattttacaatagcaaccaactccccagtttgtttcaattgtgacatctagatggcttaagattactttctggtggtcacccatgctgaacaatatttttcaatcttccaaacagcaaagactcaaaagagattctgcatttcacatcagttcacaagttcaagagtcttccatttatcttagcttttggaataaattatctttgaggtagaaggacaatgacgaagccacttaattccttgtgtctgcataaaagcagatttattcatcacaacttcatttatgtgaataaagcagatgatgataaaatgttctcttattcttgtttaatcagtagtggtagtgatgccagaaactgtgaaaggaaggcttttagttactttcttctttccattttccaataatccattccccatccccagctgaagaaaggggtgttactgagtccagctgataccacacattgaaaggtaaacattaatatttcaaatctgatgtctaactaaaaatgtacagaatgaaaactagaaaatttcaaccccagattatcttcaaccttgctccctccaccaatcatactttgacatttatctatttccttctccacttatggatgtaattggcttgctatagaaactacagttcagatgctttgaatgtatgaactacaatgaacaataaagtcctcttcttttgaagcatattttggcttcagctttaagataatcttatgacaagaagggtcacactgattcacttaataaattccattcttacctaacacaaggtttagttgataagcacttggacaaaaataatacttttcaaaaatgtaaagcaaactagtgaggacaaaggattttgtcctcatctcaacaatgatcagctattggaactgcatgaaactgaacaatttaaacctggagctggtaatgttcttaagaccaattcagaacaaaggcaggttgcccttaaaacaggtttgaccttttccttcactcttcctcctgtcccaccctctgtgagtgatttaaaaacggaaaaggtcaaagcccagccaggcctacatttagagaaattttaaaaaaatttttcctttcaattttggccaattatttccaatttttattttattcttaaaacttaagcatggtaaaatgttaagctgttttcatccactgatattattctactataaaaagcccttcttgagcagatttgatgataaaaaggagaacatttctaaggtataattagagaagctgttgcatgagaaatcatgtctccatctccattttgctatgcgttatctgaggattgtttctgaaagagatctatttaggcagtgtatgtatgtgtcagcatgtaaaaagtaaagaactgaaaatagacaaaccttgtaaatgcacttcaaaaccaattgtggctcaagtgtaggtggttccccaaggctggtaccaatgagactggggtttgggaattagttggtcatcatccctcctgctgcccagcagtggtcagtcatttttcatgagggatggactaggaaaatgaagtgtctattataaggagagttcctgtaacttaaggagcaagctcactacaaaacccagctacctgcttatcgtagtggccagagtggtagaagagatacggagtaggaattaaaccacacaatgttatttagggactaagccatgcccctaacaagaaaacaagccaaaaggaaagtattaggcattctctgggaaggcatgcatttttttcccatgtctctggggccaaaaaccttataccaagtacctattggcacccgaatatatttgtagaatgaatgaatacatgaaaaaaaataaacagtaacctttctcctatattctactttccaagccaattaataagcaagtgtcttttcgtcatgattttttttgttttctgtttaggatttaacaaaatggttgagataacagtcacttctgtttgatgaagagtatcacttcattccatttttgtgtttttgttgcatctccaagtcagaataaatgccttttggagcagatatatttcatttagcatttagtatcatcttcatcaatactcgtatgaacgaaaaaataaaaagccctctcttattcccactctacaacgcatgtcaaaggtgatctgtttagtttttccttagtatcgaacatatcacagctactcaatgaagtttcttctcaactaaagaaacacagtctcttagagaatttgttcctgtgtttccaccataagataaatgagataaagtgcactttggtttacgtctttcaagcacttaagaacagcactttattcagttttaataaatttttactaaattggtaaatgcaaaagaatcttttttttattgctcatatgtcttcctgtctctaagccagaccaatgagcaaatacctttaaaactagttgttacatcttgaaccatttaactgtaataaaagcagaatgtttagttaatgaattaaagaacaaaccctgagcccttttatcagtctcctggctttaaactaagccaatgaggaagtgatttgggggattcctgaaactaggaaaaatgtctctttattttgaaagaaacttgcatttttctttctttttttttttttttttaatctcaaaggcaattgagtgggtcttctgggccagacctatttaatttacgaaacatagtaccttgcagagaataggcattgaaatattatttaaacaatcaaaccaaagatgttcttctatcttcagctgtcagtgatctaatgccctcatctctcttatcctcaggacccagaatggtatattccacataaaagatgctttgtttatcaaatgaatcaaaaagcacgcctgaggcatttatttttactcctttacttctgtaggccaggtcaaggtgggtctaattcacttttatcatcagcacttaagaaactggatggaagaccacaacaccttgttttttgcaaaaattttccatctcctcaatcaggccaggaagcatgtatcttctggacaggactttatctctctactcagcttagtacactgccttatattagtccatttgtcccatgttttcatcactgaataaacttgttaaatgacttttggtctggatctcacacctatattacttcatttccttctgtgagcactctataatgataacatcatttttatatcctagggcatgtagttccgagccccacagaaagtaatcaccattcagtaagccaatagttcattcctatctgtatagaactgtaggctttgtaaatctacacatagatctctgttgtaggttcaataatgataataaatgtttgtgcccccagttgttatctctaaggataagagtaatcaatgatcattcagcagatatagcttatatatgggtggcagtttacaaattataaattgattttacacatattttcttctgctacccaagacacaataaagatggtttatctttgcatccccaatgcctagcaatgagattggcacacaatagataactactatagtggcattcttcagacaaccaatcccttgcgtatgcgtattcaaaagataatcattgttattcaaattttcctactttatttgcacaatataataactatcatacaattttataaacctagtacccagcaccaagtgagaaaatcaacagttacatttatatggtgccttagagttcacaaaatgctaacataggtattgccttatttttggctgtggctaaatgaaatatgataaattttcagtgcctttaacagtgagttcacatagtaggcaatcaaaattgatctatttaacaggtatttaaacccttggtttgtataactacttatagaacccttctcactgtggtttaactatacaatgagaattttgtagagacaatacctagcttacagaaagttttattcatacagaaagcatcaaatttttcatttacaagtgctttataatttagaaagcacattcgcaagctgaattaagtgactttcggtctggatctcacatctattacttcatttcctcatactagctctttcctggttacctggaaaaatgtatcagtaataatttaacttaacctcaccagtaaagtcttgattgtttaaaattaagcaatatatcattccttacatctgaatagtatagaggataaactttcctcttattacataggagaattaatcttgtattttacagtacccaaaatagctggtatgtaagaggcacttaatattcattcatccattcattcattcataaatatgtagcccattgacatttgtatcatgctttagtttacaaagcactttaatatgcacctttctgaaattttttgttctatgagaatacttttccccctttggtagctctagcacccagcatggtatctggcacattataggtgaccacaacaagcttagtcccttatgttttcagtatattttaaagtttaaaagcagtttccatgtgttttcgtttctgatacctggaatactgcatttttactcaaaattaccagagcagcaaacacaaattggcctcaaatatacatataatttattcatttatcaaacaattccttgtgtctgcatagtactatatccttttgaaagagcacttttttatgcttgctcctttctttgtatccacaacgcttatcacagtagaatacaagtgctttacagtttacaaagcacattcactattttttttcaggtcacctagatatcaataatcattgcatttttagtgcctagcacagggacaggcacagaaaaggaaactagtagtattcagaaattttctctgaataacaaataatacatcagggggtggtaagctatgaacagcaggccaaatccaattggctcaaaaactaagaatgattttgaccttataaaaacgttgtttaaaaaacaaatatgtaacagaaaccatatggcccacagtctaaagtatttatgatttgaccccttacagaaaaactgtggacccctgatttacataatgcttcacaatttacactgcactttcaaatgttaactgcatgattgccaatacactaattggtttttctcttatgttttacagtgctttcatacacattatcagtcatttaaatcaacttcccacataaacaggaagaaaaaaatcaaggaaagtattaaacatgctcaacagtcccaggttctctcatctttaagcctagagatgggtattaaacccaggagtagcgttggcacagtccaccaaattatttggccactactatgagcagggagttcaggctgtccccttgggacctcgctttgtcccaggcacagtcaccctttccataaccatcactagaaatcccaaaccccagaatcctgctcacctaagctcaaagaaggaagctgttgctggcaggtgcttctcagaagtctggcacatctgtgtatttcttgtctaattcttctcattggcctggagcatctcttcacatttttctctagagagcctggcacttttttttccccaacaacctgaccattttatcttctcagtctagggcttctggggtcaaaagaaaggactgaaatacagtatcacctatatgaatgtctgctcctgagggaagttaacaaaagccagattagatactgactggattttggtgtctctctcaagtggagaagatgtgaatagaaacagaagtttacaaaacactatagcctaacaaataggtaaaagctgtgatttaaagctggctcaagactggcccaggcataatactgtcaatctaaaggtaaccggcaacatcaaaaagtacatctcaaaagaatcaggcttaaagataaacaggagaactggaaatatctaagagtaagaagtgtaaacaatagaaaagaggtagggtttagggttctcatcttgggatttccccaggtcttcaagcttctatccttcctgggttctgggtcatgggcctccagattccggccgttagtcttgagatacctttttcgcttgggtcctctatccatctaggtaggctttgtgacaggggccttccatccttgggttgtaggtcttccagctacaaccctgggctaatcttaggtcgttggccttgtgtcacaagtctcagttcttaggccttccatgtgtcctgtcccaggtcttaagacttctaactcaagccttgagacttccatccaactcaggccttcggtccaattcaggccaccctctgttttcttggctcttgaggcttttgttggtttcaggcctgaggcttctatctatcttggaacatgggctttccatcttagtcctcgggtctcaagtctcaaaccatctgtcttatactttgggccttctatccatatgagccttccaccttctgccctacttgagttctgggttttactgcagtctagggccttgttttggtcttggatcatctcacatggcagcctggcataaggaaccgctccacaatgcttgctctgatagccgacgttctgcacctatcaggcaggggttaggaagcccctctgccacacatgacacacacacacgtacacttgcccacatatgcaaagaaatatttaaggagagattacatgaaatcaaagagagggagatagattcatgaagaggctgaaatactcaaaggtgagtagaaagggaagaagcagagaacaaatacaagccaacagagattaatactgaaatagaaaatcacaaacagcaagagatgctgaggcacgcaggggaggagagagagaatagcccaagagaggcagaaaggaaatgcagaaatgagaaatgtgagataaaaagtagaaacagcagaaaggaggccagactcagaaaaaaggtgaaatttaaaacgaacgagaaggggaaggggtaacaaataatcacagttcacaaagagaaaagagaggtaggcagagaaaggagaggtagacagaacaagaaaaggacaaaaagcacacagcatgtgacccaaaaaggagacatgaaataaagcgtgaaagaagagccacatctaggagagcaaagagaaatagcaacaaaatgaaaaatgagagatatgtctaagacaagacacagaccactcttgtgaacaaaaagagaaaatgaggcaaaggcacacacgaaagaaattagcaagagaaacatggaaatgggtaagacacactttagatagagaacaaagagcaaagacaagaaagaaagagacaaagaaatacacacttgagtgcaagagataagcaaaggcagacattcagaggaagtaagtagtagaagaggcaagatacagtgaggggcacaagaggcatgaaaagcatcacagaaagataaaaaaaatcaaaaagtgtcattagtaattataataaactattgttactacgaatactacttatagtactacaataataacaaccaccaataccaacacagatgctcttctatttataaacttttaccttagggatttcttacatagaaccaaagcatgccaactctgcctgctacctgatagtgctagtggtcacttatattgtgggaaatgaacttatgagtcttcttgggttaccttttacttgacatgtgccaggcactgcaataggtgagcactttacatacatgatttcatttaaccctcacaaacagagaagtctagagactttaagttgtcaaaggtcatatacctaatgagtagcagaggatttaaaacacacaatgtatgcctcttaacatcctgttacaactatttactaggatttctggaagagccaaatgggatgtcacagatgactaagtattttcataaaaggctctttgataggacttgctcaatcccctcctttagcatcacctttccccaactctttagaaaactgacttcattctcacacttttataatggctacttcagagtttagttttctttttacactaatcttaactgacgacagagtctctcacaaacggagatgagaaagggttaccctttcagcagaaagcagaaatggtgttttaagcttctcaacgtttaaggctctaagaatgacagagggcctatacagtgaagacatagaacacacaagcaaaggctaaattcttctgtgatacaactggtaagaagaccataatgtctttgagttgcttcagtgaacccagtcagtaatatggaagactggtcatctttccatctcacatttagccccacttcacattagaccaacacaccccatccaacaccagctcccaaaaaacagctgttataacagttctgaagtgatcctcacaggactgcaacatcaacaacttacttcattcagctatcctcaagtgctagagtgccaggcatgttgatcttcaggtgggaaggctgacttccttcagtgtgttcaaatttcttggacctgctgaagactcagctctctgcactgcttgtaggaagtataatgatttggcagataggaacaatgaagagctataaaaaaacatgagataaaccatgtaaatgccataaatattgagtactgtgctagagttacataagattcaaattaataagcaatagaaaatgtttccacagaactttgaaacctataaagtcaaaacttttaggtctttagagagaaaatttcctcattcaacagaataggaaactggcataaatgggaaaatgtcttgccaaatatcacttgatgagtcactagagacaccactaccagtcatagccttataccttagttaaagaccagaactgccgggcgcggtggctcacgcccataatcccagcactttgggaggttgaggtgggcggatcacctgaggtcaggagtttgagaccagcctgaccaacatggagaaacaccgtctctattaaaaatacaaaattagccgggcgtggtggtgcatgactgtaatcccagctacttgggaggctgaggcaggagaatcgcttgaacccgggaggcagaggttgcagtgagctgagattgcaccattgcactccagcctgggcaacaagagcaaaactccatctcaaaaaaaaaaaaaaaaaaaaagacttccatcctgttttaagtgccaatcagctaggaaagagtccctttaaatgattaataactgagatcacaaaaataatagatatgagagggaaaaacataaggtcttcccaatgtttaaggctcacttcgatgttttaagacccctcaagtttgctttaagtctcctggctcaggactaacaaaacacagccttagagcagcattttcaaaactcacaatattgctctttgagataaaggtgagtcactctggaaggcaaatattctcacaataagaaaattcacataggttgtttaacattgcagctaaaatacaaaaaaaaagaagaagaagaagaagaaaaagaaaattcacatagactactggccctaggagaatttatctaaagattatgagtacaatagatagatcttcctagataactctcaacttagctttctagttcctagactttctaacaatttgttagtaactctctatttctaaatctacagagatttctagtcaattataacatttcaagagttcttacccatgaaaatatttcatgaaatttatagctacccactatttacgaagaatgctgggcaaagcctatacgttcaggatttattgcaccgaatggtcacctttatctgccaattctcactcgctaatcagcctctcccaacactgacctagagaatgtagggtcctggttctttagctcctgcctgatgacagataactttgtgccatttttagtcaggtttccatttgtatttatgcggcttccatcaatcagcaaccatagcataaaaagacacacctctcacttgttgtattatacaccatggcatcccaagccatcctgaagtatgtaaatgattggcaaagttcttctgtaaggctttaagagagactttggggaccacatggaacagaatgatttgcccatgtgatcaatgtcactgatgtgacagttgtccatgttctcctaaaagaacaacttagctgtaagcctctgccacgtgctatagtcccactccaaacacccgaacacatgcaacccgctaccctctttacatcatcactttaaccagttaatctcacacccagttgcttcccaggttagttaggaagctgtttttaccaaatcatatgcagaataatgatgaatacgacctcagtgaaacactaagtgcaatgtatactggaaaacaaaatcaaaattaagactacttattatgcttttagggacagcttacgcaccttgacgtgtggtggttgtttttgagactttatcttcctatctgggaccaggaaagtatcttgacagaacctcctgacctagggttgttgcccagtggtagtgagcttttcccctggaggatcctcatgccccatctccacctagggatcgtcaaagggaatggatcactaacactgtaaaacaacaagcctattcttctgaggaagatctgaaaagagataaaagaaaaagtattgaaatgcagtacactgggaaagtctgttctaatgggcaactagtggttgagttcaaccatatttttacccttttcttcatgtggattgaagagtggacatttacagttgtgcggagctgttatattctggctaccaacttagcaaaaaaaaaaaaaattatcctattcattccagctctattctgtatgctttccctcatttccaagagaaatttagaactgagtaattgccaatattcccatgctgcattttattctccagtctttattactgagcgatcctctacaatgtgggttgttaatacccttgtgttctcagcacaaaatatagtaggggggtcaagaaatcaagaggttgaaactaatggaaggagaaactaatgctttctcaaccaagagagccatgaagccacacagaaaaggtcggatgtggtctaaccctatgagttatgtaagaattctcctccacaatgcctctggcttcctttataaagagctattttaagaactgagaaatccacctctatcaaagtgcctgtcagctagttctgtagcatccccctcttttaatttgtactttaagtagtgccatgccataatattgccaagataaagagaattgtttcctactcaatccacatggtaacatttcttcaacaacctgtataatagggcgccaccaaagttctaggatattcggagaaaccaagaatggtcacaagcacatagaactccagttataacaacagctggccaggcgtggtggctcacgcctgtaatcccagcagtttgggaggtcgaggcgggtgaatcacctgaggtcaggagtttgagaccagcctgaccaacatggagaaaccccgtctctactaaaaatacaaaattagcctggcgtggtcgcgcatgcctgtaatctcagctactcgagaggctgaggcaggagaataacttgaacccaggagacagaggttgcagtgagctgagattgcgccattgcactccagcctgggcaacaagagcgaaactgcgaaaaaaaaaaaatacacgccacaaaaacagttaagcaaatctatgcagaaggaaaaacaaggtacagaaaaccagggattcagtaaattccttatacaggcccccggggctctcctattccactttttaacaatttcaattgtttttcaagctaagaaattttgatttcttaaaacaaggaaatggcagtgataatggaattaggcctaccaaaactgagctaatacagatgaagttagtcttatttgtaaacaaatcctgagaacttaatacccatctgccaaaggaaagtgggaataatttaaaaggccactaatcaaaaggtgttaagttcattaaatctatcttgctgtgtggtgagaaaagaaataatttagtgctttgcatctctcattcttcattggggatcaagtatgcttgcccttacagacctcactggagcccagctctgagggataaatgaaacaggccgaactcattatgtaaagttaaaatgtatgtgtacatgcaaaagaaaaagtataggaattgatgaaaactggctcacgttctgcttttctttctttttaagagactgggtcccgctctgccacctaggctggagtgcagtggctaatgatggctcactgcagccttgaactcctgggctcaagcaatcctgctgcctcagcctccagagtaggtaggactacaggcacgtaccaccatgcccaactaattttattttattgtagagacatgggtcttcaactcctggcctcaagtgatccccccacctcaacctcccaaagccctggaattacaagcaggagccaccatgcccagctgtgttctgctttaaaaaggagagttgtgggaagttcaatccaaagacagaagcactacaacaataaattccccaaactacctttttctccagatagctggcaacccatccaagtagattagctggagcttggccagattctcaaagggaaagatatgattaatttggagcctcttatagctgtttgcagtcctcaggtctcacatgctcagaatgtccttaagaagaaagacagggttcagtaggctaccaaagcaccggtaggataccaaaagagttacaaaaaccccaatgaaaaaaacctaggaagtataaactgaagcattagacataggtatctcctgtctctactttctagcctgcttggtctccctaaagtcctctaatgacaagccctggcagtacacgggaagattagacaagtgaagaaaaagaactacatgaaaatatgggtcaaaccaataccgaccttaagggctgacactaaatttgtggctaatggtcatcctgttgctgaaaatacttcaagattcaaggtggtgtggcaactgctactactgcttagaggtgcaattgtcttgactgtttttaataattggctatctacctttactatagcataggagctcactaaaggggatctaagccaaatttgcagtcttgaaagcactttgcatggtactgtatagtatggtgtgaaaagcacccagtatgttaaacctgagtaccttaaatgaatacaggcttccagatccctgatcagggattactgtatcatgaggaaacctttatgtcaatgtcaaacaggaatatatggaacatcacttattcaacactattctctagctttaaaaaggccaaactgttctatgatgttctcaatataagcagaacaagcttcaaaatctcttgccaacatccttccccatcctaatttaatctaagattagatacttgacttccaaatgcaggcttccagttaaacatggcggttcatacatgtttatgcatttactctactgcttcctaaaactccattaatgagagtaaatgtgcactccatatgcaagcaaatacacctaaagaaattttaaataaacggatcctagctcaaattcatttatacactggcatctaaaagggaacaactattccagtctccccaagtcttcttaagcatatttatggagtatcttgctttagcatcaaagccctctagttttgcctgttactatggtgatgacatactcaaagagcattccctttcccttaacgggaatctaaggctagagaaaatggttacattttggaactgggaatctaaggctagagaaagtggttacattttggaactgatacagaaccatacatttcactagggttcaatattcactgacaagaattttgagaatccgtcatcttgcagaccaacaaaatatcaaagtcttatggagagaataactgagtggcacagccagccatctggttcaaatactccagcatcagacagaattgtcacagctagacgtgatattaataatcacataggccaggcgcagtggctcatgcctgtaatcctagcactttgggaggccaaggcgagtggatcacctgaggtcagaagttcgagaccagcctggccaacacggcaaaactccatctgtactaaaaatacaaacattagctgggggcggggggtggggggcgggtgcctgtaatcccagctacttgggaggctgaggcaggagaattgcttgatcatgggggaaggaggttgcagtgagtcgagatcgtgctacttcactccagcctgggcgaaagagcaaaactccgtctcaaaaaaaaaaaaaaatcacataattcaacattttcattctctaaggaaactgggaacccagaagatgaaactacctcaatgttacacaaatagaaggtaaccaagtgatacttaaacccatgtcttcccacaattcaaaggtcttttaactgtggggtctgtgcatagattctcaggacatatggggagctttctacaaaactttcacaatactctcatttcactgtaaggatagtttagatcagctatatgactacttcataatataggaccacgttgccagattagtggcaaatgttctagttttgttgcctggggattacagaaaagaagagaagcaaacaatatataaatgtgttttgtgccaaatgaaagtgaaatagcattgctatgtgctataatggcaggatttaaagcagtttgaaaacagcagtttggtgaagtgcatcaacacagcatgtgatattacagacacgccactcaaaagaaactataatactataatagtagtgccatatttgcattttagttatctattaactactaatttgtacatctgctatgttttatagttgtattatagatgtaggcaaacagatttcattccaggtttgttcatacactttaacttaacaattattcccataaacctaaatagtacataataatatttttcttttacagaaaacgtttaatcaaatatagcaaaatattaattgtagaatctaagcagtgattatgtaggtgcacactgaataattcttttcttgagagaaaacctccctactatcaaacttattatacagacttgagaaacactgtctcaaactaatatctaatataaaatattaaaattatactcaacataatttcatgttattttaaattgctgattaatatgcaatgcacatgacaatgctgttaatcagggcactttttgtaacagcacaccaactttcttgactaaaattgaaaggttaaaaattatatttgggttacaattgccaaggaagacatctactccttgggtcttaaataggcactttggaaggctagctggaggtcagtaaatgaacctttcctatcccacgtgtgaacatgcctttcccttcctttcccacctccagtgttctcagggtcctttagctcttagaaaaaaacggaaagaagaaatgcatacccaaggaacagcttacctggcgatatcagaataatttaatctgaaaatcaatgtcaaaatgtggattgaagtaaattctggttcttaagataaagtttgtttctgcaacctattttacgtttcaaaactggcagaaacatttagggcagaagggtcatttctagtttcaagaataccctacagctaaactctccctaaacttaaccatagaagcaaatgtcaaacactcactaccgtaatattaacagaaaaatttcccaaccaagccaggtttctcactgtagaaatgggaggtaacagataagcaaggaggtgagactataatgatccatgtggcaatgattagagttggagacgtaggtataaacacatttagtttaatatagatacagatggttatatatatttatagctatgtgcatatacacacgttagaatgcaaatatatatctccttgctcttgtcaactgaaaaggtcttgaaggaatgacactccagtagtaatgagcgcacctagcattcacttcttgatttctaatattactctccaataaaaagtatcaaggctccttgcagaaatacatcattttaggtccaggcaggagatatgcaaatgagtctgaagcatgttgtagttccaaaaataagaaagtgctcaaacaaaaaacccacattcatggggttatatcaaagccaaatgaaagacctcccaatggccaaagctggaacaatttgaacaacagaataaagtaatactgtattataacccagagtataaaatatccctgagatcatactgatataaatgactgaataaacacaatacattgtggagaaaagacatcctgtgcaaaagaattccaaataatttatgtaaatactctgccctcaatgaggtggaaggtaatttcccattccttaagtgctggctgcacatagtgacttcctatgtgaacagtatagtagggaaatggagaaataaagactaattttacgctggagaaacctgacaaatagtacctcagacaggtgattaaggataacataaacagtgataagtcatgttgatagtatgtactcttgataagtgataagaatggcactctacctttgtggtcttcctcctaaacactcataaacccaatctagtcatgagaagaacatcagacaaattccaatagagagacattctatagaatactggaccattagtcctcaaaactgtgaagttcatcaaaaacaaagagtctgagaaactgtcattaccaagaggagcctaaggagacatgactactaaggacacatgcagcgtggtatcttcaatgggatcctggaacacaaaaagaacattaaggaaaaactaaggaaatctgaataaaatatggactctagttaataataatgtatcaatattggtttgttgtgacaaatgtaccaaactaatgtaaaatgttaacactgggaaaaactgggtgtgaagtacacagaaactctatcttcagaatcattctgtaaatctctacactgttctaacattaaaaggttattttttctaaaaatctcccaaccagttgctgaagacttataagacacagtttttaaaaagcaagcaaaatggaacctaagaactggtaagtctatgttccagatttttctacagtacgtaccatcattgtttgcagatctgatctaaagacttactctctttcttttctgtttatatggatttataataggtaattttgatgttaaaatatacaaggcccaaataaccaggtatccgtaatatcaaaaagttattttttaaaaaaacattagcaattaaactttgtttttgtacatcaacagatttcctggaaagacctagtcaatctgctgtaaaaaataagtcgtaagttagtagctaattttcagtcaagggagatctataaggctggaaaactttaataacatatagattgtagagtgattatatcccatcactgttcaatgccaatcacactaacagcatactataaaatatactatgccactagttttcaaagctatgggtaaagtaacatagataattttataatgggacctggtaaagtacagtgatgttccagtcatatccctatttttaaattcttatacgcacttgattatgtaataagagggtattgcttgggtctactgcataacctctcatgtttccgggaacactagaagactagcattctaattggttaaggaaaataatactttaagtctacccataatttaagaagtctagcaccggtcaaatttacattttgtttcagtttctcatcctaacatgaaaaaaaataatcaaaagttatttctaatataaacatcaaaacagtaaaggagaggcttctttaccaaactcatttgtataagatgcagaagaagcccaagctccatgtatcagtactcaatttggaaaggtcaaggaagagctatcaagtaaagcctaagtcaccaacaaaaacatgaccaactcgacagcctaatacacatatatatagtgatatataactgtacatggccactgaagtttaacttgttaaattcagcaggccagctatgtcttaaatacatgagctccaacttgagttggatttttgaaggaaacctgtgtaaaatgctacttgcctacagcccaaaatatggtagtgagaatatcaattttctcccaatccagtctttaagacaaggcagaggaaggcattagctctgtttaactgacacatcattactctttgccatccaaactgataaggtttgggggaagagaagaggcattagctcagttcagatataatcattagtttctttctctttaagctggtaacgtatttttccaggatgctttcacatataagaatattttagcagtcaacaaaggtcaactcttaattcattactttaagacatgaactcccttcaagctgtacatttgataatcagggcacaaacaccctgaaaagaaattatgaatgcctaatcacagcagccctgggtctcacagtcttctgtaatttagggaggtggctagagaaatggaagttacagaaagataaagctgaaagaggatatgagaaaatggtcagaaaacttcctccaatcctacatgttaaggttttataaagggaaaagtcagaaaagaaatgacaataatcatttaaagaaatgccaaaaaagtttccttcattagacttttgaaaattttccaaatcacaaaatgtcattttcagggatttaggtatttgatataagcccctatcttatttcactagcagtctcgagatggtcagattgatggtgatctgaaccaaactcagagccaggactaaagtctaagcatttctgcccaaaaccataatgatttccttctgcatcctccataagaaagcaaattccttgatataaatcctgtctttggttttgctatttattccagcacctggtacaataatatttgttgaactaacacaagaattatctctattttgaagatgcccacatttccagagcatccctttttacaattgctagagatttttcttaagggtggaaattatttcaagcaatgaatttaaatacagcttcaagattcacctttggatgctatctagtataatcaatccacctaaaatcaagccatccttcctcttgacttaaggtacagaatcacctccaaattcattcatttaaaacaaattccaataataattataattgtatgttgacaatgaatgacaatttaattaccaatagaagatttcataagcatagaccagggtttctcaaattggggtgataaccctggggatttgtgaatatattctaatggatccccaagttctacataagttatataaaacacatctttgacaaagacaacgtgaaattggaaaacatatttacatttcaaatatctttgttaagtcagtgttcctcaaaacacatttttttaggatctcagaaaattttgttcctttagaaggtgtttcatcatgaagcattacttgggtttgagaaacaatggcacagaccatgtttccaagaaggttcaagaccatgatgtatataaccctcagtcagccagacaatgttgttaagcatatggagtggggctgggaggcatggaaacaagccctgaggaaatatggatatgaattaaaacgggctataagtgaagccagttcacttatatggttcttgttgctcctgctgtgatgcatgaatgtgcaccagaaaaaaagtttcgaatgttatgttaaacaatattttgtcagctggaaaacattaaggaggctaagcttcttttagctttacgaaaggtgggaggaaagaaggtatataaactacagcataaagtaggcaaggaaggtcaaggttttgacttcacttctccactaccctcttggcaaaaaggttccaaacttaaaaagtatctacgatatgcattatccatggtcatctgttcttgggcagaaatgtagtaaaattgtggaaggagccgaagtattagatttatgccctcaatctctgaactttaaaatactcaagcttatgagatttagcaatcactaatttgccaaccttcgcaaatagccaaacacaatggctatgctctatccctttcatctctttccatggctccaaaagaggtaaaaaacaaatgaaattaaaataaaccaactggactatccagatggctgcaatattaatcctatcttggcttaaagagaaaaagcaaacccacttccttaagtttattctatcaacttcaaatccttgtgggttcccttcctaaaactactacttatgattcacacaaaacagcacttattattttctaaagttatttcaaatgtgctcacattagctcctcaacgataaaatcatctcaggaatgaaattatataggatgatatcattcctacccaggttatcagtgtaacctagcatagagctgggtccacaatattaattctacagttctgctggttaactcacatatgtgtatttatgcatgtatgtatgtatctatttctctctctatatatatatattgcagatgaggtgggaagaaggaaagaaacttactggaccctctgacttttctataggtggcatctaagagaaagaaaatagaataggaaaaagattacttaatagctacgaagtagtacttacagtattctaaagagccagagactcttctttacagctgtccgaggagctagtagggcaaactgctccctgagctgggccgatcttttgacatccttctccgagaaacaatattctttttcagttattacaaagaactgctgttgtgatgactagttatttgcttgagcagttccatattacataatcctgtgccacaaaacaccctgtacactagtggctgggatattattcatttccactaggcagctatctcactgttgaaatttatatccaaaagaatatttaattttggcttatttttcttataaaatagggaactcgtcttatcatttttaagtcctcacctcagtgtggtacttcaaactacttcaaattattactataattaaatgcttcattttatataataattaataaaaaaggtggcatatgctttttaaaagcacctctgcatatgttccctcatttaatcgttttactgcaatcttcttgaaataagtaggggcaggtgctccagatgaagaaattaaaggattataaaatttaggtagtttttctaaaagtgaatgctggtaaagcccacacaaagatactggtcttaagagttccactctagaatatctttgatattaaaatagcaagagtcagtgttctatccacagacccaccaccctcagttaaaatgagagacactggtcaccaggtacatagtataaatggatattttggcttcaaaaaaataatgaccaggttatcgagtccaccctacaatccagatgtctttcttaaaaaaatttttttaataataataagcaatttttctggctgtatcctggcatttggcactttacaataacaatatacaaaggggacaacaagagattcttaaccaggcaatctgctctggaaagaagaatgcagagaaagtgccaaccttccttcctggggagacaattttatagtgtacactggaaacacaaaataaaggatggcaatccagctccctgggtctgacttgccttcagtattttgcacagtaaagcagtaacacaggtgggcaagaatggttcttgtccccagaatctgacaataattgaaactaggatcattaataaatgaaagaaaatgagtgaaggcttatccacctagttcaggcctgcttttcatagtcaacactgcaccaacacaccaaagtggtagggagatcttggactgatgggctgaaaaatgggacaatcagtactgtgtttattaataacacagaaggggctttgggtagtcagcatactcagaagcaatgcgaaaggaagtagaggggttcatgtataatgggtgggaccaaggaaagtgcaactgagaattgtttaagtccaagagaaagggccttgtctggtcaacattacccagcaaagaggcaaaaggggcagggcagagggaagggaagagggagacagcacaatcttacctaatagctgcaaatatggacacctgagattgtgagcaatagtctgtaaaaaggggccaagggcacacaaggggcagagagagggaagacttcgtatataaagcatgacaccatggctacctgtgattttacacactggcgcaatgcaaaagggttgggagtatggaccactgtttgatagacaagtgcatggaatactccaatgcttatactttattatgccatgggaaactaagggtggggtggggcgcttgcttaacaaggtcagggagggagaaaaccattgataactgccattgtgcctattaacagtcccaggagaagttttgagtagtcagcagcccctgcagtaatgcaaaggggatactagggcataatatcccactctaccagaaggagacatatataattgcaaatattcacattaacagtacaaggggccttagtgggtcagtacccccgatgtaagcaacgaggaagcaggagtcttatctaatgatcagtgcccttgataattgttattaatgctattaattgtccaagagctgagattatgagtagttaacacttctcagcagcaatccaaagggtaatgggaggaacatagggtctttttctcctacacaggtccacaaatacaattatgacattaatattaaaagaaaagggttcattcataattaacatgcccctgatgcaaggggaatatgtggagatcaactcttagtctaaaagaagaggtggacaattgcattaatgcatattaagtccaaaagaaggggcacttagtgaatatcatccccctgctctaaagcaaaggtggtacaggaacatgcttagagaattgagtttgtgcacatgaacattccaagtgacagtcttgagtagtgggcactacctgctaaaaacactaagaaagtaggtaggatccttatctagtgcacagatcaggagcaaatgtaattgcacatattaacagtccaaaacaacaggactttggttgatcaggacaccctgttgtactacaaaggaaaggtgatggggtatgaccttaatctactgacaaagacaaaagaaaatttcaattatatgttgatagtccaccagaaggggccttggagggaaacagtataccccacagtaatgcaaaagaggtataatggtcctagaagtgatagggttgtggacaactgcaattattcacattaactgttcaaatgtaaagatcataaggagtgggcacccactattgaaaagaggtggggcatccttgtctagggcacaagaaccaacataaatgcaattatgcatgtcaacaagccaagaaaaggggacttagggggtcagcaaccctggtatactgcaaatggagggtgagaaggtagaactttgtttaattaggatgaaccatgtggtgattacatacattaatgtccaagggacattgttgtggtcaattaaaaccatgtactttggacaaatataagaatcttaaaaagtagtgggtactccttgttgaaaagcaaagggagtccatgagaaggtgcccttatctagtacacaagaatatagacaagccaagcaaagaggcctcagtgatcagcaccccagctatactgcaaagggggtctgagagtaggactttattcaaataggataagccatgtgcagttatgcacataaatttccaagatgcatggttgtggtcacttacaattgtgcaccttgattgtccaaatgtaagggtcttatggagtgagcactccctgctgggaggaaaagaaagattatgcgtagatgggatggggcagaggaggcttccttgtctagtacacagaaacctggacaaatataatcacacacataacaggccaggaaaatgggccttggttatcagcacccctgctgtactgcaaaaggggtctgagagtaaggccttattcagatgagataggccgtgtgcagttacacacattattgaccaaggtgcatggctgcggtcacttagaattgtgcaccttgactgtccaaatgtaaggttcttatggagctggcactccctgccagaagggaaaggaagattgagggtggggtggggcaggggaggcttccatgtcttatacactggaacccagacaaatataatcacatacgttaacaggccaggaagaggggccttggttatcagcacacctactgtactgcaaaaggggtctgagagtaggaccttattcagatgggatgggccatgtgcagttacacacatttatgtccaaggtgcatggttgtggtcacatacaattgtgcaccttgactgtccaaatgtaagggtcttatggagcgggtacttcctgccagaagggaaaggaagattgggggtggagtgtggcaggggaggcttccatgtctattacacaggaactggaacaaatataatcacacacataacaggccaggaaaaggggccttggtgatcagcacccctgctgtactgcaaaaagggtctgagagtaggaccttattcagatgggatgggccatgtgcagttatgcacattcatgtccaaggtgagtgcctatgctcacttacaattgtgcaccttgattgtccaaatgtaagggtatatggagtggacactccctggtggaagggaaaggaagattggaggtggggtgtggcaggggaggctttcatgtctattacacagaaactgggataaatataatcacacacataacaggccaagaaaaagggccttggtgattcagtacccctgctgtactgcaaagggcatctgagagtaggaccttattcagatgggatgggccatgtgcagttacgcacattaatgtccaataatgtccaaggtgcatggctgtggtcacttataattgtgcaccttgattgtccaaatgtaatgatcttatggagggggcactccctgctggaagggaaaggaagactgggagtgggggtgggggcggggggaaggcttccttgtctaatacacaggaacccagacaaatataatcacgcacataacaggccaagaaaaggggccttggtgatcagcacccctgctgtactgcaaaaggggtctgagagtaggaccttattcagatggaatgggcaaagtggttatgcacattaatgtccaaggtgtatgcctgtggtcacttacaactgtgcaccttgattgtccaaacgtaagcgtcttatggagagggcactccctgccggaagggaaaggaagattgggggtggagtgtggcaggggaggcttccatgtctaatacacaggaaccgggacaaacataatcacacgcataccaggccaggaaaaagggccttggtgatcagcacccctgctgtactgcaaaaggggtctgagagtaggattttattcagataggttgagctgtgtgtagttatgcaaatccatgtctaaggtgcatggttgtgttcacttaacaattacgcaccttgactgtccaaatgtgagagtcttatggagtgggcactccctgctggaagggaaaggtgagactgaggtatgtggagaggaccctccttttctagtgcataggatcccagacgattataatcacacacaacatgccaagaaaaggggactgcgttatcagcaacccttctgtattgcaaaaggggtcggagagtaggaccttattcacatggaatgagcagtgtgcgattacgcacataaatgtccaagatgcatgcttgtggtcacttacaattgtgcacctagactctccaaataaaagggtcttatggggtgggcacttcctgctggaagggaaaagtggggatgaggggagcactttccttctctagtgcatagcaacctcgacaaatacaatcacacatattgggaggccaagaaatggggccttaggtgtcaccaaccatgctgtccttcaaaaggaaggatactgatgtaattgtcattaggcacattaacagtttgagaaaggggccttaagtgaatagtaccccatgcaataaagcaaagagggtgtgataggtcagaaacccaagtctaattgaaggaccattgacaactgcaattacatgccatctacagttcgaagagaagggcttaatattgattagcactctctgctttgataagtacaggagtcctgataaaaggcacaactgtatgcaactgaaaatgtgtatataacacctaagattatgcacgctaactttactagtctaagggtcttaagtagtaggtacttccagctgggatgtaaatacagtgggtggggtccttacatggtaaaaaagtacagcagcaaatataagtatgcacattaacagtccaagagagtgaattcaggctagttagaagctcctgcagtaatgcaaatggagcaaggaagcgggattctactctaacataggggcacatcaactactgctaattatgcgcatttaagcagtataagagaagaagcactagctagttagcactcctgctgctttgccaaggaggtgtgagggggatgggattccagggcaattgtcttacttttttttttttttaatgttggccaggctggtctcaaactcctggcagtaagggatcttcccacctcagcctcccaaagtgctgggattacaggtgtgagccaccacacccggcctcagggcaattttgcataatagaaattcaagaaagactttaggaaatcagtacccccttctatgatgctgagaagtcaagatattagcttgatataaaagctagatattagcttgatataaaagactcagttctaatcaattagacatttgaaatgtcttagacaattgaaatcaattaggcaattgaaaatatgcacattaagagtcatggataattagaaatacacattaagagtcccaagagaaggactctgggtttccagcatccctttctataatgtaaaaggggtagaatataggtttaaagggagagaccatgaacattggaattttgcacattcatagtcccagggaaaggtaacataggtaattaatatcccttgctgtaaaacaaggaggataaaatggatctgatctgaaagacattgttgtgatcagttgccatggttcacattaactatcctagtgcaaaggtcttgactagaggtcatccactgctgaacactagggaagtgagtggggtctttagtgcacaggaagagggacaaatgcaagtagcacattaacagtacaaaagaaatgtccttgtgattagcaccctctactgtaatgctaagagggtgtgagcagttgggatcttaatttaatggaaaagaccataattgcaattatgcgcattaacagtcccaagtaccccctgctgtaagacaaaaggaatatgaggggatgagaccccagactaacagcagatagggaaattgcattttgcacatcaataatttctggaggaggggcattaggtaaccagcaccctcttgatgtaaagcaaagatgatgcagggaccttgatataaaagactcagttctaatcaattaggattgtgcacataaactgtcctagtacagaggtcttgagtagtaagggtcccctgctggaatacaaagggagtggaagggttagtgcacaagatcgtggacaaatacaattatgaacatcaatgcacaagaagagtccttgggtgatcagcccacattgtagcgtgcaaataggatacagagtccctttctaatggacaggactctggacaattgcaactgtgcaaattaactgttcaagagctgttattgaataatctgcactcgttagcaacatcccacagaaggtgggatggggtgagaatccatttttattgcacagaaccatgaatatatgcaattatgcatatcaactgtttaagagaaggaaacttgggtagtcagaactcagcagcaatggcaaagaggacatcctagactaatgagtgggactatgggcaattagtgttttacatattaatgcaaggtggtaggtagttcacactatctaggagcaatgataaaggcatacacataagtgggtcttctctgttacgcagaaccatgaataattactattgtatccattaatattccaagggaaggggctctaagaatgagtcagtcccactgctgttatgcaaagatgtttgcaaaggccatagtgtaactaacagaactatggataattgggattttactcaataatttaagaaactcttaaatctcaggtagtcagcgctgcctcaaggcaaatgcaagggcgactggtagtcttcatgattaatgggtgagacaattagcaattactactttgttctttaattgtccaagaacagcaggattctccagaagcacagcaaaaagcgcagtagggtgcctttgtttaataggcaaagctatgacaattgggactgagcattttaactgtccaacaaaagacgggttgtctgcgaccccctgctgaatgcaaatggggttcagagtgctgtctaatccaatgggtaggattattggcaattagaattttactcaatgcaaagagttttaggtggccaacacagtacacaagaaaagatcactactcaaaattgggactgtgactacagaagcaatgacagagaaatggtttctcctttaagggcaggggatcgagaaaatgataagtaactcaaattgtgggcaataatgctctgatagaaagctctcaattgacattccctaacttcaacgtaccgagtaaggaaattctttgtcctgagatcacagacaaatgggattgtatgcattaactgaaaatggtcaaggagtcagtactgaagatcagcaatgccaagggtaaacggaatatcccagtataataggataagcaatggacaacttattttgagcactgaatcaatgaaaattagagtgactttcgagagaagctgggcgggactgaggaactaggactgggactggggctagggctggggggttaggggactggggctggggcagggctggggcggggtgggagtagggctggggctagactaggggtttgctgggagcagggctggggaggaactggatgctaggcaggcaggatacaacgaaaaattgaaatactccaatataataagtctgaatagaggacaccagaccacagcaattcaagtttcctgtctgataagtaggtgattagtcaattagtgcagcatcaaggatgggaacaaagcaaggcctggacctgtgtaaaccttcaaacactcttttttacattaggtcatgaagttaaattttttactgtttctgtgctacagactcttcaaaggaaaatagttaagtcaatttcaaagaaaatgaccagcacatttttaaaacattagaaatgatttgactttgactatctactgccaaaaaaaggttaaggaatttgtaatgagaagctaaaaactttaaggaattttaaggaactcaaaacaaaaactcattaaatgtaattaaagtgaattctacaaataaagcctcttaatacatttctataatagtcacttaagacttaaattcaaacactagcaaaccacaaaatcagactgtatgactgacatccaaaagataaatataaatcaaaatccgaccccagcattagccaaggggtaggtgttcctcttgaggaaggcaggaattcctcttctgccacctgttggccaacgatcatctgtgatccattctggtccttgccacggctcaccaccatgtccacaccaagcaggcctggagcactgcccatggcaacagtgcagtgcagggcagaccagaggggggtaggggggtaggggggtaggggggtggggaggtggggggtggggggtgggggtggggagttgggggggttggggggtggggggggaggtatacttagccttaggtgaggcaccaatacagaggaatggagggaggttcagaccacacagccagatatccagcactgcaagaggcagcactggacaggaggggacaaataagaggggacagaggtggaaaggctaaatgtccttgaaaagaccttgaaaacacctggtgtaccgcccactgggagacatacacgtggcccctccacttctttctcctgactggctaaagacagctgcgaagtgccatgctaattcacccaggtcttcgctgagtagctggacagtgtgtcatcagtctaattccatcttctgctctaattggctgtgatcaattccacccccatttctaattggttgggttatgcagcaatccagcactgtccatcccaccttttctcccgctctgcgtggcactaggcggcaaaacccgccatctttaacaatgcggcaagcccgccatgatgtccacgtgacaaaagccatgatatacatatgacaacgcctgccatattgtccctgcggcaaaacccaacacgaaaagcacacagcaaagacaaagaggcccgccatgttttacactgcggcaagaccttcagccgccatcttttcctgtgtgaccgcacatgtccaccaccatgctaaccacttaacaaagcctcgcccatcatgatgtggccttcccgccacttgaacactgcgacagaactggatccgccattttggacaacctaacaaagcacagcccgccatgctgagcaatgccgcaatgtcaaaatcgccattttaagccctgcaccttagtctttcctaaccttccatttttaactagtcccttgtactgataaaagatgattcttactgcctcccgatacaacaatcacgcaaagctcctaacaagccccaaatcaattcattcagataggtttagctcatgcaatgcacatgacttcctctgcctgacctgctatcatccatcttgcctccctagtttaacttagcacaaacgactagccctaagccgagttatgcggcaagtctaaaatggcggccacttttcctccacaatctgaacacgcccttagcttaactgcagagtcattctctgccaaagcggtaggtacactcacacaccaccaaatgatcagcagcaaaaaaaagtgtagatattccagagagtgcaacaacccacaaaaccaacattttttcatccataaaaagcaccgatgggcgatgaaaaaaaaaaatcaaagcaggtatccgcggccccgatgggccagaaaaacaaaaattaaagcaggtatccgaggccccgatgggcaaggaaaaataaaaaaaaaaaaagcaggtatccgaagccccgatgggccaaaaaaagaaaatttttaaaaagcagatatccgtcaccccgatgggccagagtgttgggggttcagaggggaagggaatcagcaggtatccgataccccgatgggctaaggaaaaaaaaataaaaagcaggtatccgcggccccgatgggcgaataaaaaagaattaaaaggcaggtatccacggccccgttgggcaaagaaaaaataataaaaccaggtatccgcagccccgatgggcaaaatatagaaaagagagtggaagagtaaaaaactgatccacaaaaaacagagatgtcaaccaaaaatgattccaaagaaaaattccttaaatattaaaaattgcctcaaaatattccaaatactttctttaaaaaaatatggaggacgtgtcaagaagacactaggagaaagtatagaatttaaaaaaatattttatggaatttaggtgatttttttaaagaaatacgccataaagggtgttgggggactagaaaatgttctagaaagaaccccaagtgcagagagatcttcagtcaggaagcttccagccccgagagagtaagaaatatggctgcagcagcgaattgcagcgctttaagaactgaagggggggctgagggcggagagagcataagaggcgtggcctagaagattgaaagccggacatctttgtgatttggttggttcaaaatttacccagtaaggacaaaaaagggaaatttcaagaaagcaaagacataccagaaagaacattaactggaagtagacttcatttctagaccaggagtcacaacttcaatgggttttccagttctcatctataacatggggacattgagtaaatcaagcaataattaatgctaaaatcctccataaactgcataataaatgtaaagatgttaattcagcttggttttgagaatgggggaagggataggtagagctttgatgtgttgataaagtatccaaatatatcattcaaaccagaatttgtaactcctccaccaaacttttgaaccaaagaagctagaaaggagtaatacattgaggttagtaccatcttcaagggacttcccattccattatcccatgtaatagataatggaatatgtattgcatagataataataaaggattattcctgttttatacattaaaatagagtcctatagaggttacatcatgtgcccgaggtcacacaccatgattcagagtcaatgtagtttttactccaacactctaccttgtatggctcccaaccataagagaacggaagtgcttacgagtcaattggtgagcaagagagaaaaaggaaagaaagacatttcatagaatggctatttggttcctaaataatcaagaaagagtactgtttgtgacctgtttgtaattttttaactatgactccttaatctttactattttcctatttcctccatgaatctgaggaacccaacattggaccaaccatatgacacagtagtgaagttgaccctctgtcagtaactgataagtggtaggaagaaaaagctcatataaaagccaaagctgccctcagaaacctggctatttcagtaggaagcaattaatctcataaactcttctatgtcattcgagaaacaacagagaaccagaagggagacaatggcaacttaagtattatagagcaacttctagaaagtcaaaggatacattaccctcccactggctgaactggaaagtgtaactatcgacccaaatctatcaggtaagcttgctcttcagtttccagaaaaataataaagtatgcaaattttcttccttaagaaataccttccatcttctaagtgtccttggatcaaacaaaaaaagtaatctgacttgtcattccaaatgagggttattgtattgtaaagtggtgcaatacaatggtacctttgagaaaacaatgcttaacaaagagagaaactacctacagtgacacctatgaagcagctatcagaaagactggattaccaaacctctaatacaactttatctactagaagtttctacaagtgtggaaatgttctatacttttaagaaatttggttggccgggcgcggtggctcatgcttgtaatcccagcactttgggaggccgaggtggctggatcacctgaggtgaggagtttgagaccagcctggccaacatagcgaaaccccgtctctactataaatacaaaaattagccgggcatggtggcaggcacctataatcccagctacttgggaggctgaggcaggagaatcacttgaatccaggaggcggaggttgcagtgaaccgagatggtgccactgcactccagcccgggcgacagagcaagactccatctcaaaaaaagaaaaaagaaatttagttggggaaaaattttctaaagactcaagtagcatcaaatataaaagattgataaatttgactctgaaattaaaaccttttgtttcacaaaaataccttttcaaataaaaaggcaaaaagacaatttataaactggttgtcctgggtttctgtgaccaggccctggttccaggtgggcagccacgctagcagatcactctcattggttgtcattggagttttttaaatggtaactcttaaggctaggcatgcaaaatggtgctgatgtgccgttatggggtgacactcacattggacacaggacatgttcagagctgtggcctacctaaatccactgttgacccttaggctaaagaaactgcaaaagcaagaaatttataatttcaatacaaagaggttccagagtgccattgcaaaaatggaagtagtacagtgttgctatgtttttctcatagagggagatgtgaaattagccaggaatggtgcatttgacaataaacacaaagagatgatttctggacctaaaaaggaagatatggtgcaaggtcattataaaaattgatatgtgaactgttgaataaacaaatacgtaagcatctcttctccacctggtattctaaattttcattgataaatcactacacctcacatgggcccatgtatttgtaatatatttttaatcaaactgtttacattaaaaggaacttctgaaaaatatttgcctaggcctttgccctagagcagtcctgccctcttctgccatttatcaccttcaggttttacttactcccctgccctcactagctttcaattcactttacttcctcctcttcccgacctggcctcaccttcactactgcttggctccattttataaacctgttaggatcagaagtatggaaactgagacactagaaggaaaagtgacttgctcaaagtcaattagctagtaagagttgggctctgatggggatatttcaggcatattttctgtggccatgccatagctgtgttagcatcctcttctttgggctcccaatcacatggcacacaataggaagaaatcaggtcctctttttaaagattcagattattccagttctaggattgtcactatgttcatctgtacatcctctcctctgctaaattaggcccaaaaaaagccggcactgtcgacttagccaccagatggcagcataaaatcaccaaagaagcactgagcctgtctgcaggaaaggagccaaagttgtatacagggcaggaccagaatctgatataaaggggggaaagtctgattcatacaaggtcagtatcagaagaaagggtcaaagaaaagtgctcaaccccctctaatttgaagagcccctccccccactaaacaggagtctgtccttggcttcagggctatgccatttaaagaggactttgataaagccttcaggatctaattagcaggctggtgggggccctccaaatcatcaccagtgaaaagcagttaaagggaccaggacatattatggaaaagaaaataaaagacctggggaagggctctttacaactcaaagggctgtctgcaatgggggaagttgatgaatagtcctgttgtgtgtagttctaataaataaagacgtctgaatactctgagctgtccaaagatggaacagttaacacctccagaactggtgaatgccagtctctgaagacctgcaagccaatagtggattttgtgaggatgctacagagacaatcaacagatagaaaagttgtgctatatgccttgtaagggtcttccaaatagccccaaatcctatgaacctcatcacagtacttgggccattcctctagccctcaaacacactatttatgatatccttcaaaagtgtattaggatgttgggaaaggttttctagtttatcaaaagagaacacggggttatacatattaaagctcagtgagtatatgcttaacaattgtatacatagttcacgtcaacattaaaaatactgtaaatgggctgggtacgttggctcacacctttaatctcagcactttaggaggccaaggcaggaggatcttttgaggccaggagttcgagatcagcctgggcaaaatagagagacctctgtctctacaaaaataaaaaatataaaaattagccaggcgtggtggtgcatacccgtagttctagcttctcaggaggatgaagcaggaggattgattgagcccagtagttcaaggatacagtgggctgtgattgccccactgaactccagactgggtgagaaagcaaacgctacctcaaaaaaaattacaatctattaaaaacatcaccagtggccgggtgcggtggctcatgcctgtaatcccagcactttgggaggccgaggcagacagatcatgaggtcaggaaatcaagaccatcctggtcaatatggtgaaaccccatctctactataaatacaaaaataagctgcacatggtggcacacgcctgtaatcccagctactcgggaggctgaggcaggagaatcgcttgaacccggaaggcggaggttgcagtgagctgagaccgcgccaagcctggtgacagagcaagactccatctcaaaaaaaaaaaaaaaaaatcaccagcaaacactagggagagggaggaattttatttcccaaggtatcacattataatattaaaactgtgcagtttttattaaaaaattacaaggcatacaaaaaacaggaaattatagctaatatatagaaaaaaaggtaattaacaaaaaatggtccctgagaaagtaccaacattaaacttactagacaaggattttaattaattaattaatgtgcttatttattttctcatttttagtttttctagtagttctttttcaaatgtatttttagttcacaaataattgtatatattcatggagtaaaatgtggtattttgatatatgcatgcattgtagaataattaaatcaagctaattactatatatctcagctcacatacttattttgtgatgagaatacttaaaatttacttagcagtttttgaaatgtacaataccttatcactattgtcatcatgctctgcaatatatctcaaaaacttattccttctctctaactaaaatttttatcctttgatcaacacatttttaccctcccttcagattattaaccaccagtctactccctacaagttcaagttttgaaaattacacatacaagtgagataatatagtattcatctttctgtgcctggcttagcataatgtcctccaggttcatatatgttgttgcaaatgacagattttccttctttttaaggctgactagtgttccattgtgtatgtataccacattttctttatacattcatctgttgatggggacttaccttgatttcatatcttgactattgtgaataatgctataataaacataggaggacaaatgtctcttcaacacactgatttcaatttctttgaacaacacccacaagtgggattattggatcataaggtagttgtatttttagtgttttcagaagcctccatgatggttgaactaatttatatttccaccaacactgtataaatgttcccttttctccacaccctcaccaatccttaacttttgtcttcttgaaaatagccattctaacaggtgtgaggcaatattgcattgtggttttgatttgcatttttcttttttttttctttctttcttttttttttttaatttttatttttttgagacagaatctctctctgtcgccaaggctggagtgcagtggtgtgatcacggttcactgcaacctccacttcttgggttcaagcaattctcatgcctcagcctcccaagtagcttggattataggcatctgccaccatgcccagctaatttgtatatttttaatagagacgggggttcaccatgttgaccaggctggtctcaaactcctgagctcaggtgatctgcctgccttggcctcccacagtgtgatctgtaatcacactgggattacagatgtgaaccactgcgcctggccttatttatttatgtttttagacacagtctcattctgttgcccaggctacagaaagtgcagtggtgccatctcggctcattgcaacctctgcctcccgggttcaagtgatcctcctgcctcagcctcctgagcgggtgggattacaggcacccaccaccatgcccagctaatttttgtatttttagtagagaagatgtttcactatattgggcaggctggtcttgaactcctgacctcaagtgatccacccgctttggcctcccaaagtgctgggattataggtgtgagccaccacacccagcctgatgtgcatttttgtgatgattattgatattgagcactttttcatatatctgtttgctatttggtttttgtttgattgttttttgtttgaggcagagtctcactctgtagcccaggccagagtgcagtggcacaatctcggctcactacaaccactgcctcccgggttcaagtgattctcctgcctcagcctcccgagtagctgggattacaggcgtgtgccaccatgcctggctaatttttgtatttttagcagagacggggtttcaccatgcttgccaggctggtatcgaattcctaacctcaagggatctgcccaccttggcctcccaaagtgctgggattacagatgtgagccaccgcacccagcctgttggccatttctaagtcttattttgaaaaatgtctatccaggtcctgtgcccattttttaattgagctatttgttttcttgatattgagttctttgagttctttctgtatactggatattaaccccttactggatgtatggtttacaaatatattctcctattccaaaggttgtctcccactctgttcattgtttccttgcctatgcagaagctttttagttacatgtaatcccatttgtctattttcacttttatttcctctgcttttgtgttcatatctaaaacattattgcccacaccaatatgataaaactttggaaccatgattacagtgtaagagtattctgaatttgaccatgtgtttacttttactggtaagttttatactttcatatcttttcatttcattcattaatatcttgttctttcagattggaaaactttgtttagcatttctaaggcaggccttgtttgatgaattccctcagcttatgtctgggaaagtttttatttctcattcaattctgaaagacagatttgctgattatagtagtcttagttgacagattttttactttagcacttagaatatatcctcacactctttcctggcccgtaaggtttctgctgagaaatctaatggtagccatattaaagcttccttgtatgtgatatgcttcttctgctgctttgagaattctttcttagtttttgaattttgatagtttgattgtaatgtgtcttgatgaactcttctttgggttgaatttaattgcatattcctgagcttcttgtaattcaatattctcttttcccagatgggaactttttggccattatttctttaaataagctgtctgcctctttcttgcactcttcaccatctgtagttttagtatccaaatagtagttttcttggtggtgtcccatagacctgtaggctttcttaatactttttcattttttttctttttcttctctgactggatgatttccaatcatctatatttgcattcagttatttgttattctgcttgatgtaatctgctattgaagcatctttggtattttttacttcagtcatcatactgttcagcttgaaaatttatctggttcttttttcaagttttgaatctctgcttaccttcttgttttgttcatattctgtcttcctgatcttttaaaaatatttgtttttttgtaatttgctgagcttctttagaacaattattttgaatactttgtcaggcaattcatgtacctccaattcttcgtggtcacacactggaaagcttcttgtgtttttctggcaatataatgtttccctgattcttcctcatccttgtagtcctgcaaaggtgtctgcacttttgaagcagcagtcacctctttcagacattatggcctggctttggcaaggaaagccctttacctaaggaggaaaaagggagacatactaggtgcactgtggcactgggtctagaccataggaaaccaaatgcaggggcatagtgtggctctgggtctggtggtgtggcggcagataggggccgagtctagtcagctcaggcatgcctacaacattggcaactgcatggtcctttgtgtcaagagctgtgggagtttcgcaaagattatgagggctgttggggtcctcagctatgtatatgtgacaaacagctagggtctgggactggcagcagtggaggccagagctgaaagtgtacacatgctccactgtggagtctggttgcagcagcagcctgttgtagtctcacacatggtagcaagagcttgggtcatatgccgaagctgggcctgaatgtgagcatagatgtggtggtaggtgctgcaggttgcccatgcctgatcacaagggccagatgcatggtggcaacaggggtcaggctgtctgcatgtgtgtgtttgtgtgtgtgtggcaactgcagggctcaactggaggtgggtaggcatgtgcagcatggtgataaatgcaggacccatggggcaggaccagtggcttatgcatgcaccactacaggaaccagggctggcagcatgcagtagtcctgcagagatcagccttgagtgtatgtggggtcaatttctgaggtgaggggctttggggctctttgcaggcacaggtgcaacagctgcactgggcctctgggccagagcacccatgtaagcaacatcaggggtggctttggaaaggatggttgtcttaggcacctgcggtatatgaaggccactgcagtagtaccctgggctgggacaaccacaacagaagcagttcaggtggctttggggaggagggtggttggttaggcacctaaagacttcaaggctcctgggttgtgtcaccaggctgaggaaactgcagcaatagcaatcctgccctacatggctcctgggaatggggaggggaggtaacgccagcacctaagactatgaaggtgaagaaaactgcaaggccttcagtagcaaaagtggcaggggggttattgctggtgtgctggcatttgtttttctcagtagtaaaagctgctatgttcctctgcaggacaagctgctgggctccacaatttcaaacactgaggaatcctcagcagttaaggctgtggggtctacacagcagctccaggggctgtttgggtcctcagtggagaagtctgctgctttcccatgtcaggtaggccactgggggtcacagtaacttccaccttttggctgattctaaaagagctcatccaggccaggcgcggtggctcacccctgtaatcccagcactttgggaggccgaggcgggtggatcacctgaggtcaggcgttcgagaccagcctggccaacatggtgaaaccctgtctctaccaaaaatacacaaattagccaggcatggtggtgggcacctgtaatcccagctactcaggaggctgaggcaggagaatcgcttgaacctaggaggtggaggttgcagtgagccgagatgacgccattgcactccagcctaggcgatagaccaagactccgtctcaaaaaaaaaaaaaaaaaaaaaaaaaaaccctcatcccttgtctttgttctcagctgtctccagatatctcagctatgcaggttacccccagagatctgggtggggtgaaactgaagctagtcatataggcagtgtcctaaaatactggcaaaactggttctataccttgctctgctttgtcttgcaaggcaaacttaagctagggaggtccctctccatgctgagcagtgtcagcatgaaggatgcagtgatggaggtgaaatgaacttgttcttattaccatttttgtgtggctcttcttgggttttctcttctactgtattgttgtgtcaccttaagtggatcctagcctcttccagagatattttggttcatggatagttgcagaattgttcttcacagggagaggaaggctgaatctcctactctgacatcatgctgacctcactccactagacaaggagtttaaattaaatatttcaaatatgctcaaagacataaaagaaacaatagacaaagaactaaaaaacacagagagaataatgtctcaacaaacagaaattatacattagaaatagcacttataaaaaggaaccaaatagaaattctggagctgaaaatacaataactgaaacaaaaaaattcattccaggcattcaacagaaaatttgagcagccaatagaaagaaacaacttgaataggtcaattgaaattattcagtctaaggggcacaaatacaaataattaagagaaatgaagagaatgtgagggacctatggaacaccatcaagatgccaacacacacattatggaagtttcaggaggggatagagtgaactagcattaaaaaaaagggagaaataatggttaaaaaaacttcccaaatttgataagacacattaatctacacattaaaaaaacctcagtgagccaggccaaccccaacagccccaggctccagaccagctcaccactaggccagcccccacagtcccaatcttcagttctaccccagcaatcagctgttccctgcaactctagtcattaggctgacacccacaaacccatctccaggccagcccctgtggtgccaggtttcaggcttgctccagcaccatgtcagcaatgctggacttaaacaccaggcaggcacccacagacacaggctccaggcctgcccagcaccaggccagtccccatgacctcacactctagctggaccctgtggcttcatagcttcagcagacccagggtccaggcctgtcccagtagacccctgtgctggatttgccactacagacacaagcttaaagattgccccagtgtactcaggtcacaggaaccctcaagtcatccaaacccaggccagccctcacagtcttagcctctaggccagcacctacacacccagcctccaggctgggacaagtggacatgagctctaggctgagcctgacagccccgtgcttaagaccagccccaggatctccaggcacaaagtcagttcccatagacctaggcttcagactagaccctgtgaacccaggctttacaccagccctagcaccaggttagcctaggttgatcccagtggaaacaggctccagaaaacacaagatccaggcttgttccagcagacgcagggtcaaggcccactgtagtagacgccaatggcgggctagatcccatggactgaggcttcaagactatatctgcagacataggatccaggccaggccctgtgggcccaggacccagacctgcactatggactcagggtccaggccagccccagtgccaagccagtgcttgtggactcaggctccaggatcatcccagcacctgcccagcccctgtagatgtaggtctaaggcccaccccatcaagtgctagatcagcctctgtggaccaggcttcaggcttgcctctggagacacaggtctcagcctcagactcatggacccaggctctgggctcatcagtgcagtcccaattaacaggttcacccaagtggatgcaggtccagactcaaccctgcagtttaggagtcaggcctgtctacctactgacccaggcgtaggccagcttgttcaaggactccagcaacaaggttttcttcaaatcacgcctgagagcctgccaagaatatttggatgagctgattggtgaagggctttcccaggcaaagcattctataaaaactgaaacaagtcccaaattgttcaaatccacagacatcaacttaaggcaacaagaaacatgaaacaccaaggagacataacatcaccaaaaaaacacaataatctctcagtaggccgggcacggtggctcacgcctataatctcagcactttgggaggccgaggctggtggatcacgaggtcaggagttcaagaccagcctggccaagatggtgaaaccccatctctactaaaaaaaaaaaaaaaaaaaacaaaaattagccggg

SEQ ID NO: 113 - DNA, 46861 bp, Mus musculus
ggcagaggcagaaaaatcaagaccagcctgggttattacacataaagtaagagagacaagctgggcatggtggtacaagcttgtaatcccaaagcttggcagctagaaatgggtagtgagggtcgtggacagcctcaactacagaagacttcattaaggggctcaaaaagtgggcttacgaccgcctgtaactcgagttccacaggattctatggcttcttctggcttccataactgtactcatgtgcacattcctacacacacaattagaagcaaatcttaaagtgggaacagatctagatatagttcagtggtagtgtgactgtctagcaccacagtgtcctaggttccacaaccaatactggggggaaagggggaaataagcacaattactaaactaaaaatgatgcttaatctacgggatgacaaaagagtgagccgcaactgtggagaaatatggcaaaacgtcaactctaatattagggtttcattttattctctgtgtttgcatttgtgttaaataggtcataatatataaagctgccgaaatgttttaaaaatagcaaacattcctttgtcaccctcatacatatatgaaaaaaatgagatcatattatcctacaacttgtttttaatgtaacaagctatcatatcatcttttacaccaaagagccaaaatatacagacttttaaaacatcctcctattaatggatacacaggttgtttcttatcacttgccacaagaaaagagctgcatagacatcctcttttaggtatccttatttatatactgatgcttctctttctgaaggattgagccgtgaaagtcagactactgagttccagatattggaacttggtactccatatatatttttatttttctaaatatagctacatcaatgcttccaaatggttgcaacaattcatactttattcagcaatgcctagctaaggtactgaaatgtctttttgaccaagtaagcatctaacaaaagaacacagatcaccctataaggccctattataacagatgctcccagaccacaaatttagtaacatactctggtcctcatttggagtacataaaaagggcatagggcaaaaagcgttattataccataattaatgttaccaataagctagttttatcaactactaagtgttgatgagaaagaactgaggccgtttttcgaggcctctggggagctagaataaacactccattttggagacactcactatccgtcaaaccccaattagacaaaggaaaacaaaaggaaacctcaaaacacgatctctcctaggaatgagcctccccagcctgacaggttcatccgtggaggtccggtgatgtgggcactgatcactcatctattgtgggcggaataggggagaaatccggagtgccagccgccgactactcgtcccgctcggcagaccatgcggtcggagtggtgaccgctgcggcgggtcggcgtggtgaccgctacggcggccatctctctgacagcgcgagacccggcactcaccagggcatgttcattaattggccagtttctccactctccttattaagtcatcctctagctgcctggctaatcccgggaaggacgtatacatgtggacgccgccattttataagttacagaagcctggtggtgccgtgggggggggggggggtcgggcgggcggagagcatgcgtcacagccgaacagtccctgtgccgcgcggcgccgcgctgtcaggctgtccctaaatggctgctccagcaacgtgaccgggactgtccgcggtcgcttccgcagatgactgagcgcttgcggttcctctcccggctgcctctgttagcatctttcacgtgctcccgcgtttcttgcccgtctttaatttgttctcttgccaccccctcaccccccaccccccaccccccaccccccccctacccccaccgaaattcctttttcttttttgtttctatagaagaccagcttgtgttttgctcccgagatctctttcggagccccttctgtgtttttagctgccagcattgctgtagctgctataactgcaatctacatgtcacagaggctaggtggcaaagtaaaccacaggcctgggtatgtcccctagtttttgataaagacagaattataccttgtcctattcctattggacacctcacagggccgaagctgacaataactcctttggcttttggatgttcacaccaatactggttaccacacaaattagaaaaggatcttgggttatcaataaaggcagagaactacacttccatttaaaaaagaaagaaaaaagttctcattttacctattgcaccacgaggcacaggggcagaagcgagtgctcagtggttaacagtgcttaatgctctagcaaaggatgcaggttcagtccccggcacatacttctctctacacagatctctctacacaggcaaacatgtatacacacacacacacacacacacacacacacacacacacacgaagtaaatgcatgtgtgtgtgtgtatttaagtaaaaccatgttggaaagttgccgaaggggcctcagtgaatatctgcttgaggaaggctttgctaaggcaacctgggacagctgtcatggagccgagggctgtcctctctccagaaggtagcacattttcccttacactggtttccctctttcccaagacagcaaagccctggcttcttttcattccattacaggcagttctttcctgtgcgagctctcctcagctgtagccagaatttgcctgtttggaatcctttcttcctcctagagtttctctgagatggcaagtttgtgaaaattattacacacacacacacacacacacacacacacccatggccaagacaatcaatttgatatgctcctgtgactataaccactttattgccccccccatttaaatttttaatctagattcccttccccctctctccatgtgctcatggccagcctctagttctctactctctctttctctctctctgcctttccctgcctctgctaccctcttaactcccctccccatgccctgaataaactctattctatactaaaaaataaaattaatctaaatataattacatattctcccccattcccttctccaattcctcctatgttattcctcgccactacacacacacacacacacacacacacacacacacattgcctctcaaatttctggctttttgtatatatgtgatttttctctgggtgcgtatttggtttctacttatctttgttgttgaacaccccaaaagcagggctggagagttggcttggtgtgtaagagtacttaatattctcacaaaggactggggttcaatgcctagcagctgcatgaggcttctcacctcctctgacaccatgctcgagtgtggtacacagacctatatgcaggcaaaacactcacacacataaaaattctaaaaaaaaaaaagtttttataaacttaaaaaaaacaaaagtcaaatataaaagttgattcagggtatctgggagcccaactgtctgcatttccaacttcattctaatgtctgtggcaaaactgttgaaagaagtacctaggaaagtgtgactctagctaatttttaaagatttggcttttcaggcatgcatatcgttgttgctcttctgtttttgagacagggcccccgttattccaggctggcctcgacttattacgtagcagagaatgactgtaaattcccaattctccttccttccccgggcctcactttatcttctacaaacttcttgtgacatactcaggcctttggcaatagactaaaactttctggttttttccctcatcacccctttttgtccatatgggaacaatcttttagttttaggataaaaaccttatactctattctcatctaaaagtatttccttaatttcctttaattttctttatataaatgacctataacttcttacaatattttacatttatttatttttgtgtttgagaaagaccaaggcggggtagaagaagggagagagagagagagagagagagagagagagagagagagagagagagagagaatatatggatgtgtccaccacatagtttccaaggatggagctcagggtgtctgccaggctttgaggtaagctccttatcagctgagccatcttgcagtcaagactcagcccgtgtgtgtgtgtgtgtgtgtgtgtgtgtgtgtgtgtgtgtgtgtgtgttactaaggactgaatccatgattttctaattacatgctaagccattgctctaccactgagccatattgccagccccaagaaaaatgtttttctttctttctttattggtatctcaagatagagtttctctgtgtagccctggctgtcctgaagcttgctctgtagaccagactgggaatcagaaatcctcctgactctgcctactgaatggtgggattaaataaaactattctttaatattctaaatgaaaatcaaagaaaagctgagcaaagtggtgcttgcctaaaattccagaatttgagagagttaggaaggagcatcaggagttcagctcatcttcagcaacacagtaagttccagatcagcctgaattacatgagaccacgtgaaagaggggtggagagcaaagccaaagcaaaccatgaggctgtatatgaaacataggaaacaacatgctatcagtctttgaaacagtcctgtgttttcttacaatttaagttgcactgttgttagaaatttatgtcctgttagaacaggttttcagaaagtgcttttgctaaaggtattgatggcctacttggcttcacaaggtaaccaaccacaggattaaagacttgagtctctgccttcattttgagtctgtctttccgttcatttcaaactcctgcttgactgtgcataggcatattaataacagaaggagtgtcttcctaaattatttcattcatccttagtcatgttgaactccaagagcaaaacctcccaggacagaccttcttccatatgagggcagttatccatgatgcaaggcaaaagtaatcagcttatgcttcaaacatgagccaccctttaaaaaaacaagaactctctcaagacatagtatggtctcaagctcaaagcaattcttctgctgggattataggcatgtgctaccatggccagtcaagatgagggtttctctgggctatcttgcagtaccacaagacacaataattagtcaggctacacctcgaagaaaattacttttttttcataatgagctacaatttatttatttattgaatttggagtattcctcgatatcatccttggcctaagattctttgccatagtccttaaccactacgcaacagcaaccgaccaccttccgtggtttcccctctcgatcgattctacagaggcctacccattcccctagtttcttgttgtcatcaacctttatcaggttgatttggtgctcagcacaaagtgcctccaccagcttgacatacatgggctcatcacagttggatgcgagcacacagagatgggcttggcgcttgtctaactaaggctttggcagcttcgagtatgccacgtgctaggccatcctggatgagggcggtcttgagcacctcttgtagagcagtgttgacgtccattacacctccagcagctatgccttcctcggccatggcggtggattatgggtgacgccgaatcttgaacgcacctgagcttctgcctccgcgcaaattggtggcggcaggggaaaaaagcgaaaattacttattatgggtactccttgttctctattgaaatgtctctcctatttttagtttaaatctcaatactccagcgataggggcagggtcgttgaacccttctatggctcttaccacttgaccacctttgtcatcaggttatgctactctaagttactccatgttatataaaacattattagctcgtgaggtcaaactgccagtggcctattctttaaagaaaactgaacctggatcgtctggaaaagcagcgaatcctcttaactgttgagccatctctccagccccccaaatgtattattatctactctttctgtttgtttgtgtttgttttcaaggcagggtttctctgtggccttggctatactggaactgcctcggtagactatgctggtctcaaactcagagatccatctgcctctaactcccaagtgctgggattaaaggtgtgcacctccactgctcacattccatgggtttatcttaatcacatctcttttattcatattgcaacctcaccagtaccctcagtaacgtcatttaaataaaacaaacaaacaaacctgggactagagacatacctcgatgcttacaaacatttgctactctttcagaaaatccaagtttgattctcagcactatcaggcagttgacaaccacctataacttccgctccaggggctttgctgctctcttctggtctttgagggcacacacagaccatatacataactaaagtcagaaataaaccttaaaaactcaatacttttcaatgatgtaatggggatctaaagagatggctcagaggttaagtatttgccataaaagcatgaggaccagagttcaagtccccaaggcgtgaacccatgtgaagccctcctataattgcagctatgaaaggctcaaacagggatccccagagcaagttgcctaacaagacgtgccatatcagtgagctctcggtttggctaagatcttgcctcagtaaacaaggtagaaaaatgattgaagacattaaacttaggcctatatattcacacacatatacatatgaacctatatacatgtgtatccacatctatggacaaaatgcatatacacacaaaaatggaaaaggcaagggtagagtgggaagatgaacaaatgttttctttgctctctcaaccttggttataaaatacttcctttaaataacagaaacttaaaaaaaaacaaatcaggtatatagctactactgctggacttcagtccatgcccctcccaatacccactcatatctttccttcatcttattcaataagcattcttaagttttctgtaatataaatcaagaatcacaacaatatataactagagagaactctgcggttctgaggattcctcaggttgcataattgtgaccatcaacttgcattgcctgctcctgtgccaagactataacaccggagtatgtaatccggagtatgagctgagaggggaaaaactgatgtggcaagtggaagaacagatatagaatctatgtatttatttacttatttatatataataaaacacttatacttatcacttatatctgtgaccggtagcacatgcttgtaagcacaacactttgtaggcaggaagttcaccataagttcaaggctagtttggtctacatagtgaattccaggtcagcttaaacagtccttggaataaaagaagccacagagatggcttagcagctaagaacacttgctgctacagcagaggcccacattaagttcacactcctctgagacccatccaccatggctctgcttcccaagtgctcgtattaatggaatggatcattacatcttctccaaaacattattatttgtatttacatttgattattacatgccaggagggttttgttttttgttttgtttggttttttttttttttttttttttttttttgggtataattggtactctataagcttcttgtatgtttataggcttctctttctttattcttttcttttttatgaatgaggcaatttattaacccagtattattttttctaatgcttcttgttggcagctgccacctgttcagcgatcctgtccagatgtgtttcctgtccctgaggtgttagcttgcggcccccatctcggcccttttccaccattttcagccctttcagggcttggaggacctggcaagccatactctcagagcctctgctgaagtggctgggcctaacaccgttcctctgccatccttcatagatcttggtcacggaaccaactcctgcactacagttgtgtacagaggtacaggtccggagttgtggaagcagctcgtgggtagaaccagttctcatcatatggggcaagctctttatgtttggctaacttgactgtgtccacccattcccgaactttcagcttcctggactttttgaggaaggctgccagcgctctgacgaacctgatggttaacatcttttacagtgacttcaggcatcgttcagcctccatgctgccagccaggggaaagggtggcatctctttaggttgggaaaattttcttctgattttgttgatatttttccgggacttggagctggggactcttcactttctattactataacttataagttggtatgcctgttttatgaggtgctggagattgttttttgttatcttatataaagtctgtgaagttgcacatgaaagcctgatctttagatcccttagcactgaaattacaggcagtaaagatttgtctagtgtgagtgtaaatcttgaactttggtcatctggaatattaagcatctcaagagtaatctaagagcagtcttaagcaccataattgatcacttcttaggtctggggactaaagacatgcaccacgtccacctggttgaccacactttaagagatagcattgtaaaggggctttctaatattttctagggttaaagtctattgtcttcatggtagggagcatgtcagcattcaagaagacatagtactggagtttgacatctggttccacaggtagtaggaagaaagccaaccaccggccctggcttgggcttctgaaacctcaaagcccactccctagtgacttatgtccttcctaattcttctaaagtagtgccacctcctccccgctcctgatggcttagtgataaaatgtctgaggctgtaggagtcattgttcttacatgatctttggtagattgatttctgtatagggtgagatagtaccactatgctaaggatcacttggccaagtgactgtatgtctcttacatgtggtgtttgtacctttgttgagtagtggatggctgtctccaggtcctctattctatcccactaatttacaagcctacctatgagcagtagcatgttgacgctgtggtgcaacctgttcattcatttgaagctttgtcatgtagctcaatctggtctccaattctctatgtggctatttctgatcatccttgtaactcccaagggctgggattcacaggcataagctacttaccatgtcacctatttttaaaaactatttatgtgaatgtcattagaattttgctgagtatagcgctaaatccatagatgggtttttgatgcaacttagacaatattatgttgattcatgaacttgggagtgtttcttcaaccattttataccagatcaacccctctcccaatatacgttagaattgaaaaaaatatagatttcctggagagactggatgcctgatctacctatagttgtggctccaactttctctctgttcacagagccagtagtgtcattgaacatcccttcctttaaaaaaacaaaccatttttcatgatttattttgatcatttttccttcctccaactcttccccactcatccaaatccatattcattttcttaaaaacaaaacgaaaactgcgctgttttgtctggatggtgttttcttggagtcatttactgcagtctttctgactccttatcttcatagatgcctgagcattgaaagaaagggcttgatgaagacatctcatctaggaccaagtgttctaaagtctcttactctctgcacattggaagaccatttcttaactcccatttctgtttcttgctgctttgtagtgggtccttgtttcttgacccattatcatcatcatcttgttcttccttcttctcctctttgaatttgcatggagaattcctcaagattactattttaccccaggtgcatttttaatcttaatgttaagaatatgcaatgaggcaggcagtggtggcacacacctttaatcccagcacttgggaggtggaggcaggtggatttctaacttcgaggccagcctggtctacagagtgagttccaggacatctggggctatacagagaaaacctgccttgaaaaacaaaacaaacaaacaaacaaagaatatgcaataaattacctagttaagtgtacaggaatggaggtgttttttagaaaaatatttatttaatgtgagtacactgtcggtcactgttcagatacatcagaagaggttagatatcggatcccactacagatgactgtgagccactacgaagttgttgagaattgaactcaggccctctggaagagcagtcagcactcctaaccactgagctatctctccagcccaggaactgagttttagcacatatcccttcatgctttcttgtgataagactaaaaagtgtccccgaaacctgacataccttgatgtacacggtgtgagaaagaatgatgaggtttgcaagaattgggactaagtaaaacacagagactaaatttaactctttaatttgatgattctctctagcatccccacaaaaatgatacactggcttgcataatctgtgaccagtacctcgcaagttctaaattctctttgtacagctcatttagaagttctcgtttatacaaagccatatccatcgtggagccaggtgctcttagctgtgaagagcccttccttgggtcttttttccctaatatgtcctatgtgacttctcactggtgatgcttttggtgtgcttgttactctgatcctgatcgctctgtcaactaaagttagacaaagtaacctttacttctcaattcagataggaatccttttgcactccaagtttggcttcagatgccttggaaagattcatgctgccacctgctggtttattcagtctgtgtgcatcatttatttacttgttaatttgtttttcttttgttgaaacagtttattttgtagcagatatttttccatccctacctgaaccacctcaatagtaagattagtgaattgctggcactttgatcgtccataagcaaaccaattttgtgtcctttattattcatgggacgcctaaagggaacttagaacagactgtgaattatttgtcagcgtgaatcaacgagacaacaatatcctttgattttctaatacccagggtgtctgatctctttcatgtggatattcatagtttgacagttaacaaaatttgacagttcttttaagttagcagtgtctctggggcgagtaagataccaatgagctattattccctcaggctttgctttggcatttaggaattatttttcattactgctagcgagtaacgtacttcagtgcgtttttgtcccaaggtatggagtcaccaggttcccagagaaagactaagatgccaatgacccaaaactatgagcgtaagcccaccaaatcggtcacaactaatactctgataatttaggaaccaaggagccattttgtgaggcatttctaccctttcctctcctcatctgaggtcgccaactaatgcagaagaacttctagtgtccaagacgcggagcgatacatggtttgtccaagtagaagatatattgaaattttgcatagacaggtgtgtgacctaatgtacattatttaatgtttatgtggaagttctacataaacgtttttagctgtaaaataggataatccttcattatcgcgcaaaataatgaaattcacgcgtcatgtcactgagcttacgtacctccatctttattcattttaatttttttataatatagttagacctaaaggtccaataagatgtcagaattgcaatctttgtggccactcctcttctggtctctccgccttcagcgccgcggatcagttaaaggcgtgcaacggcttgctccagccatgtttgctcgtttcccgtggatgtgcggttcttccgtggtttctctccatctaaggagctttgggggaacatttttagttcccctaccaccaagccttatggcttatttaagaaaacatatcaaaattccacgagatttttgacgttttgatatgttctggtaagattttttttttgacatgtcctccatactttttgatatttgtaatattttcagtcaatttttcatttttaaggaatatttctttgttgtgccttttggttgatacttgtgtgtgtatggtggacttacctttctttcattgtttatatattcttgcccatcggggccacggatacctgtgtgtcctccccgccattccatgcccaacggggttttggatacttacctgccttttcattctttttttttcttattatttttttttctaaacttgcccatctgggctgtggatacctgcttttattctttttttcttctccttagcccatcggggccatggatacctgctttttgtaaaaaaaaaaaaaaaaacaaaaaaacctttctcggtccatcgggacctcggatacctgcgtttagtctttttttcccatgcccaacggggcctcggatacctgctgttattatttttttttctttttcttttgcccatcggggctgtggatacctgctttaaattttttttttcacggcccaacggggcgcttggtggatggaaatatggttttgtgagttattgcactacctggaatatctatgcctcttatttgcgtgtactgttgctgctgatcgtttggtgctgtgtgagtgaacctatggcttagaaaaacgactttgctcttaaactgagtgggtgttcagggcgtggagagcccgcgtccgccattatggcttctgcgtgatacggctattctcgagccagttacgccaagaattaggacaccgaggagcacagcggactggataaaagcaaccaattgcgctgcgctagctaaaggctttctttatatgtgcggggttgcgggattcgccttgatttgtggtagcatttgcggggttgtgctagccggaagtagaaagccaaggagtgctcgtattagtgtgcggtgttgcgcggaagccgcagaggactaggggatagggctcagcgtgggtgtggggattgggcagggtgtgtgtgcatatggacccctggcgcggtcccccgtggctttaagggctgctcagaagtctataaaatggcggctcgggggctccacccgaggctcgacagcccaatctttgttctggtgtgtagcaatggattataggacatttaggtcgtacaggaaaagatggcggctcaagttcttggtgcggtataacgcaaagggctttgtgtgtcacatgtcagcttcatgtctgagttagcctggagaggtggcacatgctcttgaatgtgtctaagatggcggaagtcatgtgacctgccctctagtggtttctttcagtgattttttttttggcgggctttagctacttggcgggctttgcccgagggtacacttggtgcattatggtagggtgtggttggtcctaccttgtgccactcgaagctgaggcaaggctaagtggaagtgttggttgccacttgacgtaactcgtcagaaatgggcacaagtgtgaaagtgttggtgtttgcttgacttccagttagaaatgtgcattattgcttggtggccaggatggaattagactgtgatgagtcactgtcccataaggacgtgagtttcgcttggtacttcacgtgtgtctttagtcatcattttttcgaagtgcctgcccaggtcgggagagcgcatgcttgcaattctaacactgaagtgttggatgatgtcggatccgattcgagagaccgaggctgcgggttcttggtcgatgtaaatcattgaaacctcacctattaaaagaaagaaaagtatctaaggccatttcaaggacatttgactcatccgcttgcgttcatagtctcttacagtgctctatacgtggcggtgcaaactaaaactcagcccgttccattcctttgtattgttcagtggctagtctacttacaccttggcctctgatttagccagcactgatctcaagcggttctctaagcctactgggtataagtggtgactttggccagagtcatagtggatcacaaatcactggtgaagaggtagaatcctaccttcttccaaaatctaccccatgactattgctggggttgcattttgatttcaatgaatattttggatgccaacgacacgtctgatagtgtgctttgctagtgtttgaatttaaaaccgaagtgattgttttcaaaatgtatttacgatttgcttacttgttgaattcattttaattacctttagtgaattgttactttggagtccttaaagttttcaataatttttttggcagatgatactcaaattacttggcacttaaatgtactttctttcaaactcatccaccgagctactcttcaaatttttaagtcttataacacagatactgttaatgtaaagtgaacattatgactggatgtcaggagtatttgaggttctataccagttcaggctttgcttttgttgctattgttgatgctatattgactaatggttttacttgtcagcaagagccttgaattgtaatgctctgtgtcctctatcagacttactgttataatagtaatattaaggcctacatttcaactttctgtgtgttcttgcctttatggcatctagattctcctcaagactcagcaaatagtgctgctgctattgctgccccagccccaggcccagccccagcccctgccccagccccagccccagcccctgccccagccccagcccctgcccctgccccagcccctgccccagccccagccccagcccctacccctgcccctgcccctgccccacccaaccaacccaatccagtccagccctgccccagcccagtcctagccccaggcccagatactttcagacctatcccaagcccacttctacttagagaaattcgaatcttcattgattcagtgctaaaatgcagtgtccatcactcagcctataagactgagacagcccatctataccccctccatactgacttctagagtcatggaatttcacttaatgcatagaatcgtattgctaaaatgcagtgcccatcactcagcctataagactgagatagcccatctataccccctccatactgacttacagagtcatggagtttcacttaatgcatgcagtcctattgctaaaatgcagtgcccataactcagcctataagactgagatagcccatttataccccataccccctccatactgacttctagggtcatggaatttcacttaatacatagaatcgtattgctaaaatgcagtgtccatcactcagtctataagactgagatatccctatgtataccccatactccctccatactgacttccagagtcatagaatttcactttgcatacggtcctattgctaaaatgcagtgtccatcactcagtctataagactgagatatccctatgtataccccatactccctccatactgacttccagagtcatagaatttcactttgcatacggtcctattgctaaaatgcagtgcccatcactcagcctataagactgagatagcccatctataccccctccatactgacttccagagtcatggaatttcacttaatgcatgcagtcctattgctaaaatgcagtgcccatcactcagcctataagactgagatagcccatctataccccataccccctccatactgacttccagagtcatggaatttcacttaatgcatgcagtcctattgctaaaatgcagtgcccatcactcagcctataagactgagatagcccatctatacccactccatactgacttccagagtcatggaatttcacttaatgcatgcagtcctattgctaaaatgcagtgcccatcactcagcctataagactgagatagcccatctatacccactccatactgacttccagagtcatggagtttcacttaatgcatgcagtcctattgctaaaatgcagtgcccataactcagcctataagactgagatagcccatttataccccataccccctccatactgacttctagggtcatggaatttcacttaatgcatagaatcgtattgctaaaatgcagtgtccattactcagcctataagactgagatatccctatgtataccccataccccctccatactgacttccagagacatagaatttcactttgcatacggtcctattgctaaaatgcagtgcccatcactcagcctataagactgagatatccctatctataccctctaccccctccatactgacttccagagtcatggaatttcacataatgtatagatttctattgctaaaatgcagtgcccataactcagcctataagactgagatagcccatctataccccctccatactgagttccagagtcatggaatttcacttaatgcatagaatcgtattgctaaaatgcagtgcccatcactcagcctataagactgagcccatctataccccataccccctccatactgacttccagagtcatggaatttcactttgcatacagtcctactttacttgtccatggacaagtaaacaaagaactcttgtccttcatgttaatcaagatacaccaatcaaacaagagttttatatcagagacttgccatggaggtatcatctctcaagtctcctttcctttaaggaaagaaaaccattctgtcattgctgtagtagtcacagtcccaagtttctaagcagtgttcagtcgtcttttctcatgtattaccttgagtactgaataattctgtcagaaatattttgtccattggattagactttagctagtccagccctgtgtgcatttagcaaaggggcaaacacaggtctgttatcagacagttaaagtgctcagtcccaattttcaaggcattggccattaaagggggtagaatactatatactgttggcatgctgtcatgggtgctatcgccccaggtcacatctttctaactgatggagatacatttatttgctcatgatattgtatactagtctcacatgctttcttatttcagccaaaaacctctgcactggaacattttatgtggataatcctgactaggaattgagtcttttctcaaggtcctaatactacccttgctttatgtaaagagggtgctgattacttaatgcctcttacacaattgtgcaaaattgcagttgttcaagtccccttctgttagtaaccaagatcccataccctcataccctaatgggtgacaatcaagggtgccaaccaatgagaccacttctctgttctggtctttctgctgtgctggggaatcaaaccttgagtcttgtgtacgctagtaaagcactgtcatagagctacagccccaccgtgtggtggtttgagagaacagcctcttatgtagcctgggctgggcgggacttacaggcattgccacctgtaatgtaaacatatttgtgcctgttgtgtgcacagctgcatttgtccctcttcctaagcattggataaagaaaccaaactaagtcaagtcattttgttggtaatcaagaagacctttgatctgtcctgtttttaacttccaggctggcctggaacttagcatataacccaggctagccttgagctcaggatctagcctgcgtttaacaagtgttggcatatctggttcctaccactatgccctgcatgcagtctttcatattgtgaatgtgcatatgtcatttcactgtagtaatctgcatctggtgaagacttatttgtattgcagcagtatttaagatccttaacatagtaaatgtgcacagtgttaactctattgtacatattctcatgtccacagttgtgccttttagatcaggactcctgtacttagcaaagcaaagaggctcactaatataaagcttctttcatgagactatagattgaaacgattccaatacggtcaatggtccttcaaggtaagacttctgtctctgatcattcatatcctctttgctttatggaattatgtatgtgctgtgcacttgaaaccccttcctcaaactatttatgtacatactggcaattttagtaggatcaattttactcttaactttgaagtacagaagtggtgttgacctataaggtcccattttgtggcttgctaataataatgactgattgtagtaggccttttctgttcactacagaaggaaacctgaacagcgtaaaactgtaatggccataaacatgtaccttgcatattagtatgcatttactgcacacatctcattccatttggatacgatcctactctcaaacccttttgcagtacagcaagggtcactaatcttttggcttcttcatcttcctggacactggataaggctgtcccctcctttccactctttaatttccaggactattactttaaagacttaatatttgcataaaggatggggtttttaattgataacatgtcccttgaacattaatgtatataacagggacatgatccattcattttaataaaaatacttggccagttaatgtgtaaaattacacttatccacaaccttattacttttcggaccattgtatctcttgcactcctgcaagggataccgtttatctcccaaggtccctgctagtggaccattaatatacagtgaatcttcctttgtctttgccagtaaacaaaggccatactccttcgcctttcatttgcactatatcaggatatgctgatcaacaaggccgcattcttttggactgttatcatatattaaatgtatgcgtatgcactgccacctgctctgtgcacttgaaaggatcccactcacttccttagcaccttcagcaggaagtgataataagctcaagactttcatttggaaagttcacatgtctaagcacttctctaagaactactgtaccctcttctccgctttaaagcagaaagagggttgtacgaagtgctcttcatttggacttaagtgcattaatgcagttagttgtccatcattacctttggagttggattttacatccttgtactcttttgacaccagaggcatattaattatttctgagcacttctcttgtcaatattaatctgtacccttacacatatgacctgtgcggcagcaaaggttctgaaatgcctaccttttgactggggctgctgagtggtagtaactattagtaacctcagcatttggatgattactatgcaaaaatgtcaaggacctgtgtgctctctttgcataccatcaaggctactgagtcccagaattaattgctaagttatgcgtatttataactatgaatgtctggaatattttgtcccctttacattattgcagaggttgctgagcccccgaaactacccggtactgtcaatgagcacaggggctctgacgaatgacctgctctcttccttaaactgattttgggactcttaataggcacaatggcagttctggatggtttattttctactccaacttgagcaaatcccctgctagtttcccaatgatataataaagtacagcagtatgtacacccaacaatgacccggatttcgaccctttttgcattgctttaatatatacaatcctaaatagtcacaatctcacactttatagtgttccttttgcccggcctctagtttgtccattgaccacttttctgaatcactaattctcacaaacccatcattaaggaagagtttgtgccctttctcaattccatcatgccatcccttttgcctctttgtttgaacagtattgactgggcaaagcccttctcttgacttaaagtcaacaacaccagtttactcacttcatatggctacagtgtctcagttgccttctccttgctcccactgaacagagacacctcgaattcttacattattctgggtaatgttaattaccccaaacaccctatgtgtcattaataaattttggtgtatttatacactgaatagcaaaagcaggccaaaactaggtggatgagccttcaatctttaacttgcacttctaaattattccaattccaactgctggcacattctagggccaggaaccattcttgcctacctttattaatgctttattgtgcaaaatattgcaggcaagtagctcagggagttggattgccaccttttacttggggctttcctttacagtatgaactgaaaattgtcttcctgagaaggaagcttagcacttttctttccgttcttcctccaggaaggagccaactgtctgcttaagaaactttaagcccgattttgtatattgctactgtacaggaccaactgccagaaaagttattgataattttattccttaagaaaggcatttggattgcaaggtggattgactgtgagatcattagcttttgtgaagtaaaaatagccatttgtgtcatgtttctgaagactaagcagtgtctcagtgtactgagggtgatgagtctgtggaaagatcagtgcaactattgcagaatgtttaagacaagtatctttgcttggtctttactacaagtttaacaaaacgaaaaagtcaatctttgtgtggcctttagtatgattaactttttggaagatgacctaagccttctaatcattatattttgtctgacattggtcaccagtccttgcttatttttaaaaggtgactggatggattaaatttgagaacatgtcaagtcgcctttgaaaattatataggccatcacatttaattaattcattctatccaccattaaactctggcaataatttgaagtagcttgaaaattcctaaagtgggaatttattttagagatgatagaacctgtttccccactttacattttaaaatatgtctgccaggatctaatcattcctttaaacgtacacttcaaagagagattttcctagtaagaaaagagctttctctagtgtgaagggtgctttgtagccgccgagtacttaggtcttttttgggagctattgtgtatgagtgtatgtatgtgtgtgtgtacatgcatgttgctgcgcgcagtcattcattcacatggtgctcagacaacaatgggagctggttcgtctatcttgtgggtcctggagatcaaagtgagatcatcaggcttggcagcaagtgcctttaccctccgcgtgccatcttgccatcccgctgctgagtgtttgatatgacattgctgatgaaaataatcatcacaacagcagttctcccagcattactgagaaatgatactatttttctgaggaggatgttcaagtaactcatccagtgcaggatcctgcttgaactactgctcctccgttacatcagactctggctgtttagactacagtaagtactaccttgttagctactaagctatctttttctcattcgagtttctttctgtgccacccactgaaaagtcaaagtgactaataagtcactagctcttctcagcttatccatacacaacacatagtatgccaacgaaattgtagaattaacacattgtgtacccaatcgccattatgctggggtacactaaaatgagaagcgatgatattttacaaaatttcttccgtgagatgattatgttatttaagacttaatgtaatataagcacacttgagatcattttaggaaatgtactgcctgtgtgaattgtttaagtattttaggaagtctactggggttgaaatttgacttcttaaagagggaagtgtgcttactttgccttgttggtccagacgactattagtaccatctggttggtttatctgaatgccatctgtttctatctacctcttggaagcatggaaagaatattaagagtgaaagactccatgcattatgcttagctgtacgccaagggtagcaagagatgagcttgtgtaggaattgggaatataaatttgataatttggttctttcaaccatttttactgcatttctgcccagaacagaccactggacggcactaacagcttagacagagaacttcatagcttacaatctttttttttttttttttttttttttttttttttttttttttttttttttacaaaagtgcaaagaaggataagttttatgaacaaattttactatggactactttatgtaccctccttgctcatttttctttttcattaattaatcaattaattttgttttgttctctgttttgttttgtgacagggattctctgtgtagtctggctatcctggaactcaaactcaagagatccgcccgcagagatccgcccgcctctgcctccagtttagagtgttgggattaagggtgggtgccacactggacccctgccagcacttttcaacagatactttcagttaaaacaacaaatacttgactcctgtgtagaaaatggtctagctgaaaaaacatccttgtccataacacttaacatttttttgcatttgccttttgtacgtgcaaatgaccctctagtactttaacccttttaagtccactgtaaattccttcgcagcaggtttcccccaactccaaaggcttagcattgtctggctctctaggtgataatacatctagaactattgagtcttttaggaaactaggaccattgttgtacaagtaactgcttcaaaaggaaacatttgcaaggaaaaaaagctttttgagatgctaaagaatgtgtttggtgcactaagacagttagctaaagcttcggtctcaccttagcaccattggctacccaccccagtacatgcaaagtgacccccccccccaggcttgcctaggcacctagagctttcagcctgcctcctatggacctaaatagagattaggactcagactccagttagtggcctggaggaagctggtactgctgctattcacagtaaacccactatcactgacagttccctattgaaatgatcaagttgtgtgagcaggcagatcattaatcagggccaattctgtcatggcaacctagtcctacatgacctccacggcactgtaaaatacacacttatttgtagtaggacatctggaacatgagcttgtctgtgattgaaatgtccattaggaggtgccatcacacaaaaccatctggaggccatctttggtccccataattgatggaatacaaagagttccccaaattagtgtcctgacccagccctcactgtcagtaatcatgtaatggaaagccaccaactcgccatcaccatcttcaggctgcctgaactgtatacattaagaatgagctttcagccgggcagtggtagctcgagcctttaatcccagcacttgggaggcagaggcaggcggatctctgagttcgaggccagcctggtctacagagtgagttccaggacagccagggctacacagagaaaccctgtcttgaaaaaaaaagaagaatgagctttcttccaagctgtccaatggcttgacccagacttaggagtttgtaaacaaagaaccctgtagaacaagtgaatttgagaatgtacaccttcattaagtggtgggaagtggaagtagtggattttgccagctgattttacaaagccctgtggcagaaccagaccaggtctttgtatgcatactgccatataacctagccactgtccaacctgtgccctctctcccagtccagtgaacctcttctgcctgccccttacttagtcctctggctcatcccaggggaagatggctctatttgtgtagtcataagaaagttttgttaattttaaataaaacaggaaaagagaaagctcacttaagacgagagctggagagatggttctgttagtcttccagaggtcctgagtacaattcccagcaaccacatggtggctcacaaccatctgtaatgacgtctgactccctcttctggcacacaggcatacatgcagatagagtactcaaatatacaaaaagggaaaagaaatgaaaggcctttgaaatgtagacatgctttcaattttaaaggctgttttcacatctcttaagaactaggggttccatgagaacatatcctcaccctgagttcttaccaccaattgaaaacgctgacatgtgcatatgaagattgtattgctagtaatcaaattatcatttgtagagtttagtataattatcatttgttttccagggatgaatttggagtctgttttgtgctcctgcctcaagaagaaggattgcctggatttagaggagtgaagagtgctggagagagcccaaaggtatttccgttacttggttgactgagatagtatcttcccttaaaggtctaatgtgtcaagttatacctcctaagtaaatacctcattattttcatgtggaattttcaacaatttttgtagtctaatgatagccttgtatttcttcacagggacaaacaatccctatgtgagactcaaggactgccagcagcctatacagctacattacatctcagcagaacttctcttcaagtcctcgctactctgaacaaaaagcttacaggccacatggagaaaaaaaggtactttggagaatttgctatttgggggtttctatctgatctccagttcatcagagaatgagggggcaagtcaataaagcactccccatctcctggtcccctggcatagtcagttagccaatgagatccttgccttatgatgaggccttgaaatcatccccaccatgttatgaccaatctgtaacatttctgctctgaaatgcctaaaaggtaggttatcagaggaatgaaggccagtttctgacaccctagtcttttgtacttgatagagtaagtagatatggctgttgtcacattctgtaggcctgtcataattctggtctctgaatatcctcaaactcagaggtccaatgctacaccagtttctagggacatatgcaccataagcactgagccaaacaatgctattcaccttgccagtgttctggcatggtattgtttaaagcacaaattaaaagaagaaaataatttaacccctttattcccagagtatttgaagtacaaggactttaacacaacctataatctaaaggatctctcattggtaggtgacagaataaaagccagaaagaacttggatggagcaattctcatgtctctaagttaacactaagatctacaaatgtgaagggttcactctccaagcccctccccatgatttaacacaactgctggttactacataatgagacaactttcccagtattcttgatttcaagaattggcttttctttcacctcttttccagatctccccccagaattgtgggcttgctgctttgcagtgctggcgacctattccctttgacgatccctaggtggagatggggcatgaggatcctccaggggaatagctcaccaccactgggcaacaggcctagcccagatttcagtgagacgctttcctgaacccagcaaggaagacaaaggctcaaagaatgccaccctacatcaaagtaggtaagttttctgcaacagtgtaataattttaactttgatcttgttttccattaaagtcagccttttacttgagatatatacataaattttatctttttcccacatctgggaaatgtaactaaacagtgcaaatgtttcttctaggagaaaagctgctgcaatagtggcactgaccttcgaggaagccattctgctctatttggttctctctccagaagctaggaaagctttgccagctgtttacatacttcaagatgcactgctaccctactcatgccatataatacacaagtgagtagcttatttacctacctagctatttacgagtacactgttgctgtcctcagacacaccagaagagagcaccagatctcattacagatggttgtgcgccaccatgtggttgctggggattgaactcaggacctctggaagagcaataggtgctcttaaccactgagccatcactaacattactgatgatgaatgcctctaactacaaatggaaacctggctggaattgatacagaagtatctatcattaggcagaatttaaagagccaggatgttctagtacttctttcctggcattcatacagcttcttttgttctttgtagtgccatctaccaaatattacccttccccaaagcagcacagaaaactgggtcttcagcgtgatcaagcaatgtgaacacacaaaaggaaggcagctttataaatgacccgaggatcaacatgcctgactgcagcatcttaaaagcaatagaatgaggtaagtcactagcattgcagtcttctgaggatttgcatttgctggaagatggtgctgggtggagagcatctaatgtgataatgtgaggcagggccatgtacacgatggaagatgaacaggctttcacgttatcaaatggcctcacagcagcaactcaaactattatctgcttaccagttatatcacaagaggaatttagcttctaggttttgttgttgttgttgtttgttttggcttggtgccctaccattcttacagacttaaacattgaaaagctttaaatagtttatttcttatctccatctgtgaagcagccattagacttgtgaaggatgtaaaaaccaagcccccccttttttttaatagaagaggagagtgaagctgacaattaaatatgcagtcgcttatagtgtttgctgcttacagaagcttttaatccatgtaacagaatgttgagatgttcattctgtgtttaaatgtaatatcccctagatgtatgccctttggcaatttagttctgctaagacctgtctgtttgtgaaggtcaaatgaaatcatgaatggaaagtgttgagtacagagcctggcaaatatgccctggagttgcatgactaggccatttggaagagttgacgggtgtgtcctatggtcctatgttaaggaaaccttaagtttaacgttgatagcctggtacagtgtactaatggcaatttttttctttgcccttccctgtttcttgttaccctctttctggtggtctttgcttactatcaatcattagtgtgtattgtgggtgtgtctatttcttgttttatgtatctattttttccttggtctgtgtgtctaattctttgttacatctatttcttccttgctttgtgtgtctatttcttccttgctttgtgtgtctatttcttccttgcattatgtctaattctttgttatatctatttcttccttgctttgtgtctatttcttccttgcagttgtgtctaattctttgttacatctatttcttccttgctttgtgtgtctatttcttccttgcattgtgtctaattctttgttatatctatttcttccttgctttgtgtgtctgtcttccttgctttgtgtctatttcttccttgcagttgtgtctaattctttgttacatctatttcttccttgcttttgtgtgtctttctttcttgcttttgtgtgtctatttcttccttgcagttgtgtctaattctttgttacatctatttcttccttgcttttgtgtgtctatttcttccttgcattgtgtctaattctttggtatatatatttcttcattgctttgtgtgtctatgtctccttgtgttgtctaattcgttgttgcatctatttcttccttgctttgtgtgtctatttcttccttgctttgtgtgtctatgtcttccttgctttgtgtgtctatgtcttccttgttttgtgtatctacttcttccttgtgtgtctaattctttgttacatctatttcttccttcctttgcatgtctccttctttcctttgtgtgtcttttctgtctgcagtgtgtcttacctattcccatgtttctcctgcatgttctttcttgcagagctttgagctttgtttcactttctctggtgcctgtgtggtctgctttgtcttcactagctatggctctctgttttatctatctggttgctatttctcttagcttttctttcactcctgcctttcgtgactcccctttgggtcacatgttgcatgcatccctctctttttcttgtgctcaccccacttgttctttgttcaagttctctttgtcagtccatttcagttttctttctgctgcttctatccttagtgaattcttgtttacatttcttccctgcctttcttgggccactttctctgttttcttttgtatttgtgtctctttgctattggtggatttcttatctcagcatcattctgttgctttgtgtttgcttgtgtttctatcttctactttcctcctttctgttcactttgagcatttcatctctttacaagtctgtgtctctcttgtattctaaagtaatcctttcttggatgtttctttgtatgtacatgtgcgtgtgtgcatgtgtgttatgtgtgtcatgtgtgagaggagcttcatagccccttcccaataggtccagaatgtcacccgtggagccgttcctcacaccagactgccctgagaaataatctaagacaaaatacatcattccgtccggtcaggattcaagtggctctgaagtgaacgcccaagtagaagacagaagttttgcgacttgagatttaaaaggaccaaaatacacagatggcccgtcttgagctggctggacagaatgctgacaacccaaagaagaggaactgtttctacaggacacctgtgacttccaagagcggggaactacgtatgtcataagacacaaaacctgagctaagtccaagcataagacctaaggacccaatcctatatggacagaatatttaagagataaaggcctatggcccagaactctggaaggatatttctatccttctatccccaagaccaagaagggaaattcgaagatgagacctgccccccaaccccagcatccctttccatttcttatatttctatttaagctgtcttcacttgagatgtaatttttcattgttgccattgcccataaaggaatacgtttttagctggatagtattgtgcaagggtctgttttaaactgggtcttagccatttgttaaattgttgatgttttacaacttccatttctcttcacatctgctccacttgagacggaactaaatccagccagtgtatatagcctgactattgaaacttccctaggaataagcatgcatacagatatgcatactgccatcctccctacctcagaagccctaggctgacaagaaaaggaaagcatcaggttgttagggggaaaacaatgtcaggctatctagagaaaatataaagagttgttccagaccaatgagaagaattagacaagcaatatgcagatgtgccaaccctctgagaagcaccagccagtgtcaccttctttctttgggcttaggtgagcagggtatggttttctaataatggtttggggacaaaatgaggtctgaactccctgctcatagtagtggccgagtaatttggtgcatttcaccaaaggaactcctgggtctaatacctacctttaaaattaatgatgagagactctaaggactacttaacgggcttaatctttttcgtgccttcctcttcctctgtaagagggaagttaaatgacacaggatgaaaaagtaacatgctcatagcacattggcaattatacatggttattatctgaaagtgtagagcttttcctataaggcatcagactaagtacctgaagctttgtgggttcatggtcttagttgcatattccttagttgcaaatccttttcaaaaggtaagaaaaaggcacactggtctattgcctgtacttgatcaagccctgatatgaatgccagggaatgtctgagtaacattaatttccttccctgcatattttttgtgctgaatactaaggctgtgatgcttcactgtggtcacccccaggtaacaagatattaccaggtaaccaggaaacgtatgaatacgtaaaccatgaagcctactgtaacttccaagtcagtgctgagtatgtattacatagtagctgaagtctacgcctctgtgtgctataggcacaaagattgctctaggaataacatgctttgtaaaaacaaatatatgaacataacggggcttgaatgaataacagtccatatacttaaggccagtgtgtttcttctgctttggtgaggctcagtaagttatattataccaggtagcagaagagaaaacacatggaaactgattttaaactacaaactaggtcactaatgcaggtgattgattaccctattctgatcaccttctaatttctgaatacccatgttcagcactgggaataacaaagggggacattaccacagaactagaatttacaaaagaatgcattaaataaagcattatacagctatcaattgttccatgtgtgcaaatgaatgactactaactacctctgatgtatccgatattgttttgggtacatgaaatattcatgagtaactgccatgaaataagaatgtttgcattccatactattcataaggaatgagccaatgcttaatttaatcagtcaaaacttgagtgataagggcatgttaatacaagaacatttgcccaggtcacattatggttgtgggtactttcttaactataaagcagttcagtagtataagacaagacaaattttctatagaaataaagctgcctataaaataggcatagtctctacaaaattttcattgtactttttagcccataatgggaagagtacagttaacaagctgggtgtggtagcatgtgctctgagctgaagcaacaggaccacttgagcccagaaattggaggctagcctgggaagaccataaggtcaatctcaaacctggaggctaaatattgtctcccatgtgtatattctctttcatgggtactggagagatacacagacgtacatttcagtgtgtccacacttgagaataatatgtacgttggcattttatgaactcggaggtaccatataaatgtaacaattcattttcttacttggtatcaatttccaggcttttaaaattctgccacatttattatactgtgaaaataaagtaaataagtaactgtgaaccactgaatatatgaagcattcaatacttgatgagtacatactgaatggcagtcatttattacaaaacagtgcccttgctaggcactgggatgcaaagagcattctcattgtcctgtgtatctaaagaaattatgcatgagattaatttataatttgtaaactgccatatatatgtgtatatatgcaatatttgcctggtgtgcaatgactttgcttttatcccaggcatgcacaacagatctgtgtggagctttgtgaagtctacagttctataaagccgggacctaactgttggctttatcagtgaacagtgattactttctaagtttcataatggctgaaacttaatcataatgcttatcacctaacaccacctaataataattttaccatgctatgtgttgagcgaacacatagattgctttctagcattatgtagcacttataggagtgaaatctagaccaaaacttcaattcacttcaatgaggaaatgaaaacagaaaaaaaaaatggatttgtgcaaggcagtgtgctaaatgttacactgagtggactatgctgtctaggatacttcccagctggcttgactgaggaggtggaaaaggttttattaatgacaggaactttttccatccagtttcttaaatgtttgttgaatgctgctgccagagatgaattacaaacaccttgccagtaaaggagttttatagggccagagtgagataatcccagagcatgggtatcagggaacaaaacgggaagaggccagagcatctgatggcatgtactcagtgtggcccagaacctctcgaactagatgtactggctggagggaccaagcatgcagaacacaacacctaatgaaacattgtatataaaatatgctaacctaggtcctaaaactaaaatgtgaggtggacctagtgtagatcactgatcataggagacatggtctcataaagcccaggctggttctaattggtgactgtcacagcttctcaagtgctgagattacagatgtgcttaacccatgcccagcctgaagaatatatctgattactgagtgaataatatttttaaagaattatatattttatgtatatgagtacgctgttgctgtcttcagacacaccagaagagggcaccacatcacattacagatggttgtgagcccccatgtggttgttgggatttgaactcaggaccttcggaagagcagtcagactcttaaccactgagtcatctctccagccttctgagtaaatattttaactataatggctgtttgcgaaacccaaccaaggccaagattccttcaacataaactggagacttcctagctaaggaagctccaaaagtcattttctcattggcctagcttgaagccaggacagacttaaagtctgtcctttaattcattacccattttccttttcttactgttgaagtgtttcaaaggagaatcaagatgaatcgataattctaaacgtatttgttcattgcctggctcagcgtcatgtgagcaagaagaatatactatcacactcatacttttaacttaagtgtgatgaaagtgcagttctaagtactaaaatttctaagtactgaaaagaacaaagacatttaaaggatgcaacccaaagtgtactttacctcagtagtttctgaggggactgcagtcacaccttgagactacagctctcactttagctgggaaaaacatcaaggtgtagaggaggcaagttaaataaaaagttgctcccctcctcatgggcatgcttggtagagtggaaataataaaagaggttctctatttcctcggttccacacattgcagaagatgctactggatgctaagtgcaacacatttgttccaaaagggcactcagtgtgacttacagatgccccggaaagcagagggatgctctttattaaacagaaatattagctcaaacgttttctagactgaagaacactttcctcatttcccacagtttgcctcagaggttgaatacaggaaggttattattcattcatttgctttattggttcgcctgttctacaaggatttgcatgtctcttaggccttcacttggctcctgagacatggaaaaaggaaacatagacatagggaagtgctggatggggggggggggtctcttttctgggtagtggcacgacttagtccttagtccccaagtaatatgcaatgtgagtcctcatcctcatgtcttctccggccactgcaatgagtgggaagctgggctttgtagcaagcctgaccctaaagttacagaagccctccacgctaagaaactcaattttctaggccattttagctatgactgtgaccactactggtcaggagggatgacagccatctaagttccacaatcttaggctactttgcattatcctggggcaaacaagccatttttgagctgcagcaggctttgaaatacattgaccaattttgcctgtgttcgttaaaccttttacctttttacatgctaatgctcacagtaatttagaaatgttctccttactataatatactcaaggtggcttgctatggtaaaataatgccagtggatgaaaataacattaatgtttaacattcttgcataaaatttaagaataataaaattgacaacaatcagaaaactggaggaacgaaagaccaaattgaaagaacttgaaaaagattaaaaatgcctgtgctttgaccctttccatttttctttcactcacagagggtgggacaggaggccgagtgaaggaaagggtccagcctgtctatctggaatctaagttgggactttaatgcagttccacaaaattggtattaattcgctaaatgtttctgaaaatgtattttcatctaaatggctatcagctaagccttgagtcaaatgggaatgaaacagattaagtcaatgtgatctctttatccaagttgccttagagctgaagtcacaatttgctgtaaggaagcttattcattgtagcatacgcatactttcaaagtatctagactttacttagtaacccaatcaggacattcaggcaaaagaaaaggaacagagaagatggagccaggttgaagaggtctgggagttcaaacaaatttttttcattttcattaaaactcaattgggcatcaaaagtgttactaatattagcttttaattagtggaaattggctggattcagtaatatccctttgtatgggtaggaatgggcttacatttctggaatttgcaaaggaaaaaataactgaaagccttcctttcacagttactgccatcaatattgctaccaattaagcacatcctaccatcatctgctttgatcacataaatgaactgtgtaccaatctgttgttgaaagactggagtcatcttcccaccaactgtgaaaaaacacatggaaaacacctggactttgtgaacggatgcggaatacagaacttctgttgactcttgggtgttttgaagacttgaaaaaaaaaactgttgcttaccaacatgtcacaatgagtccgtgtgtgggtgggtggatgggtgggtgggtgggtgggtgggtggttgagtgggtggggtagtttgctgttaaataaaatgctttgttttgaaaacatcatgtgctgtatatgatattttccttaaattttatttaatgtgcatgagttttgtctatgcattaggtttgggtgttatacccgtgtaggccagcagagggtgtcggatcccaaggaaaccaagttacagacgccatcttgtgtgtagccggaatgtaattcagatcccctggaagagcagttagtgctcttaaatcagttcaccttatgctaatacaaggagccaacaaaaccacaaaagcctcatctacaatgtgattggcaagaagagaaagatagacaggtactgcaagcgagtgtgagtgaggcaggtacaagaatctattatggtatcttaaccactgccacattccccttttcctttgcatggagccagaactaggctagcctccaagtccctaagtagccggaatgactctgagctcctgatcctcctgtgttagaattacaggcttgtaccactaagcctgcttttcagatgatagtttctaactcagtggcccttttatcataccagatacctcagttttaattccctatgtaatgaaattggttatgttgccctggccatctggctagcctgaagtccatgtagattaggctggccctaaatccatagagcactgtctgctactgactcaggagtgctcggattaaaggcctacaccaccaggcaggcctagccagttccttgggtaatttgaggtctcataacttagagcctaagttgttcaggagaaagattatgagaacacaaatctaataagatcacgagaagcaaaatattgaggctcaaaagtgggagtactggtaagatgaaatgaaaagaaagaacatggctgtcaagaagtccttgaatagagaaaggggcctctgatagttctaaaattcaaagtgacaaaattgcgtctaggagaaaagataaattctctcaggagagagtttgtactgttagacatggctctgcctagccattgctaaccagtagaagtgctccaacaaaaccgggccttcgtttccatccaatgaatgggccagaaaagcaacaacattttacctgaaatcagttcaccttatgctaatacaaggagccaacaaaaccacaaaagcctcatctacaatgtgattggcaagaagagaaagatagacaggtactgcaagcgagtgtgagtgaggcaggtacaagaatctattatggtaaatcttaacatctttggaaaatagcattggcccaactccaagaagcccatgaaaccttaccatttattactggcaactaaaggattgggacacggggcactcaaacgtatccactgatgagtatttaatagttccaaactatgtctggggtgaactatgaaacactaaacaaaataaaactagcaaatatgacagagacattttgtaaggaataaggggtgctggccagggcgggagggaaattgaaagtggaagagtaagcagaatgcattctatatacctatgaaaaatttctaataaaaaaccctatttaaagccgggcgtggtggcgcacgcctttaatcccagcactccagaggcagaggcaggcggatttctgagttcgaggccagcctggtctacagagtgagttccaggacagccagggctacacagagaaaccctgtctcgaaaaaacaaaaacaaaacaaaagacctgtctgagctggagagatgatggctcaggttaagagcactggatgctcttccagaggtcctgagttcaaatcccagcaaccatatggtggctcacaaccacctgtaatgggatctgatgccctcttctggtgcgtctgaagtcagcaacagtgtacttatgtaaaacaaaatgttttaaaaaatagaaaggaagaaagagagagagagagagagagagagagatgctctcataaacaacgtggaaggccagatgcacacctgaagttgtcctctgactccattatgctctgtgcaaccctcacccacaaacgtgtacacacaccatccacattcatatacaatacgcatcacacaaaagaaggaaggaaggaacgaacgaaaaagagtcaagaggagggctgccagcatccttgccctgatggctagggtcgctgcacgggtcagcagcactggactccctcgtctgactgtcaccctggtcatttagaagccaaacactgcgattcttcaaaggcgggatctgggctaagtaaggatgtggctcagtggtagagggacagccagggcctcgaactcagaaatccgtctgcctctgcctccggagtgctggggattaaaggcgtgcgccaccacgcccggctttaaataggattttttattataaatttttcataggtattgaagaggcacacatgagccccttcatggtttgctagaataaatgctcttggtgatataacttggtttcctcagcctgggttcctcaactagaaacaggcagttaaggtccaaggcatgagttgtgagctgcccgggtcttccaggcaacctgcaagtgacaggttcttgctatgcatgggcatccttattccccctgggtgaggagctttggaaactcaggggcagggagactccttctgaggcttctggaaagagagaatagatgtgaggatcaggtagaagttcccagactgtccctgccatccaagagggaggcaggagctgggctgggtatgggtcacaaagccagcagctgctagcactgagggtccttgcctttctgtcccatggcccctctcccatctgcactgtggttgcagagcctgagccagcacttcccccgactggagaatgacagaggcagagtccactcctcccattccggggcgggaagccaccatgttgcacctgggcccagcagggcctgggaacacgaggagcccacggcacccaaagccctcccctcaacccaggtccttgcgcaaggtcaggagagggcaggcaagtggccattaaaactgccctcccggcacaatggcacagtgaggtgaagctggcacaagaataaagaagaggaagaaatagagctgtagatagaagagacagcaacgtgtaataacatggcgccttcaagggtcaggaagggctattctgcaagtaatctcaggttaattagttcctctgtgctttactcgaaccaaaatttgtctcctatcagggagagaaggtggagtggataagattaaactaagcacacacagagacaattgtttttgcttttgtttttctttcatttttgagtcagggtctcacattgcagtcctggctggcttggaagtctctggcatactgctggaaacccaagcactcaccctaaccaagcactcaccctaaccaagcatgcaccctaaccaagcactcaccctaaccaagcactcaccctaaccaagcactcaccctaaccaagcactcaccctaaccaagcactcaccctaaccaagcactcaccctaaccaagcactcaccctaaccaagcactcaccctaaccaagcactcaccctaaccaagcactcaccctaaccaagcactcaccctaaccaagcactcaccctaaccaagcactcaccctaaccaagcactcaccctaaccaagcactcaccctaaccaagcactcaccctaaccaagcactcaccctaaccaagcactcaccctaaccaagcactcaccctaaccaagcactcaccctaaccaagcactcaccctaaccaagcactcaccctaaccaagcactcaccctaaccaagcactcaccctaaccaagcactcaccctaaccaagcactcaccctaaccaagcactcaccctaaccaagcactcaccctaaccaagcactcaccctaaccaagcactcaccctaaccaagcactcaccctaaccaagcactcaccctaaccaagcactcaccctaaccaagcactcaccctaaccaagcactcaccctaaccaagcactcaccctaaccaagcactcaccctaaccaagcactcaccctaaccaagcactcaccctaaccaagcactcaccctaaccaagcactcaccctaaccaagcactcaccctaaccaagcactcaccctaaccaagcactcaccctaaccaagcactcaccctaaccaagcactcaccctaaccaagcactcaccctaaccaagcactcaccctaaccaagcactcaccctaaccaagcacacaccctaaccaagcactcaccctaaccaagaactcaccctaaccaagcatgcaccctaaccaagcactcaccctaaccaagcacgcaccctaaccaagcactcaccctaaccaagcatgcaccctaaccaagcactcaccctaaccaagcacacactgtaaccaagcactcaccctaaccaagcactcaccctaaccaagcactcaccctaaccaagcactcaccctaaccaagcactcaccctaaccaagcacacaccctaaccaagcgctcaccctaaccaagtactcaccctaaccaagtactcaccctaaccaagcactcaccctaaccaagcactcaccctaaccgagcacacaccctaaccgagcactcaccctaaccgagcactcaccctaacccagcactcaccctaatcaagcactcaccctaaccaagcatacaccctaaccaagcactcaccctaaccaaacactcaccctaaccaagcactcaccctaaccaagcatgcaccctaaccaagcactcaccctaaccaagcatgcaccctaaccaagcactcaccctaaccaagcatgcaccctaaccaagcactcaccctaaccaagcacacactgtaaccaagcactcaccctaaccaagcactcaccctaaccaagcactcaccctaaccaagcactcaccctaaccaagcactcaccctaaccaagcactcaccctaactaagcatgcaccctaaccaagcactcaccctaaccaagcatgcaccctaaccaagcactcaccctaaccaagcatgcaccctaaccaagcactcactctaaccaaacactcaccctaaccaagcactaccctaaccaagcactcaccctaaccaagcatgcaccctaaccaagcactcactctaaccaaacactcaccctaaccaagcactaccctaaccaagcactcaccctaagctcagttccaatagaaagaataactaaaagaattctgtagacaagggagggctttctaggtttaaaattaatttactggtccctaaaaaacaaacaaacaaaggggctggagaaatggctcattggttaagaatgctggctgctcttccggaccggaccgtggttgtggttcaattcccagcacccacatggcagctcacaactgtctgtaagtccagttccagggtatctgacaccctcatacagacttacattcaggcaaaacaccaatgcactaaataaatacatacatacacaccgaacaacaaaagactacaggtctgaaaaaagccagtaggcattgcaagcctggaggtggtggaccatggatcagaattcaaggctgggctgggctacatgagagcctttaaaagtaagtaaataaacaaggccttattctctattcccactagggaaatgaagcaaactataattggatatccctcgcatctacctacttggaatagctatctagaacctaggaaccagctggtgttggaggcaagggcctgtaaccgcggcacttgggagatttagagcaagaagatgaagaattgggtctatcctgggcaatgtcatgagactctgtctcaaaaaaaaaaagaaagaaagaggagagagagagagagagagagagagagagagagagagagaggaagaagaagaggaggaggaggaggaggaggggggaggggaggaggggaggggagaggagaggaggggagaggagaagaaaaagaaaggaaggaaggaaagaaagaaggacaggagagctggaaagatggctcagtggttaccaagaacatttgctactcttctggagcccctgaatttgttttttgtttttttaaaggtttatttattttatttatattagtacactgttgctgtcttcagatataccagaagagggcaccagatcccattacagacggttgtaagccaccatgtggttgctgggaattgaactcaggacctttagaagtacagtcagtgctcttaactactgagccgtctctccagctcctgaatttgttttttgtttgtttgcttgtttgtacgttttgagacagggtcttgtagcccaggctggtctcaaattctctttgtagataggatgaccttgaatttctgacacttctgccttgacctcagtgctgtgactacaagcacacccctcacctggtttatgcaggttccggatggaacacagggcttcaggaatggcagagaagcaagttacctgactcttgctcagccattttgaggctataggaggagggggacaccaggcagtgagtccccatgtcaaaaaataagtcgagccaggcagagagggacgtgcttttaatcccagcacttggcaagcagaggcaggtcgatcactgtgagtttgagaccagcctgggctatactatatagtgagccagccagggctaccctggaaaactctatctcaagaacaaatcaatactgtactctcctcgaccttggccagagaagtttcttctgcaaggaggagcagctaatgcagactcagagctggcctgagactgagcaacaattgcatgcttagctccaaacaaggtgtctatagcaacccacacactgcccaaggcccatggaacatcgtggaagcagggctggaaagaacatgagagctaaagatggggaggcaagctgtgaaaatgctggctgccgccctcacaagcgtactgcggctgtggctacctgcatacgattccgacaagattagccaacattccagcaagcactgctaactggactcacagggttgttattattattatattattattattattttaaaaggagacctcattaaggttataggaagacagcttcgggatgtgtagggagtgggggagaagtacgagtgaatgcatgtatgaaattgccaaggaataaataaatattaaatatagggaaaacccaacacttggaaggtggaggcaggaagggcaaggtcagcgttggctacggagcaaactcaaagccagctgtactgcatgagactgcgtctcaaaagaacaaaggtggaagaagagctcagcagttagcagcacatgttgctcttgctgagaggacctgagtttgctagcaagcacctaagtcaggtagctcacaagcctctgtcactccatctccagggggccaatgcctcagacacacatatttaaaaacaattgtgagcagggtgtggtgccgcatgcgcatgcctttaatcccagcactcaggaggcagaggcaggcggatttctgagttcaagtccagcctgatctacagagtgagttccaggacagccaggactacacagagaaaccctgtcttgaaaaaccaaaaaaacaaaacaaaacaaaaaaacaattgtgtgtgtgtgtgtgtgtgtgtgtgtgtgtgtgtgtatgtgtgtgtgtgtgaaacaaaacgaaacaaaacaaaacaaaacaaccctactttcatatttttaccactggtagtaaaatccaacactaaaaggaattcctggcataagaaatcttgaggatgaaaagtcaatttaagggtatgtttgaacatagcactctgataaagacaccatccacccatttgtctaaagtgagttagtcttcccaatcaaatcctcacttatgccaatgcctgccttaaatgttttctatgtgtagtctcctcaattaccatcaacattcaaaccatcactttcccctataattccatttaccttggactttcacttccagccttattctaatttcttgggctttcatgtttattcgtcaactttcattttcattatacaaggacctgataagtttttattgataaaagttttattatttgctatgaattgaatgcggctatgccctcatgtgtgtgtgtgtttaaatagtaagctcagatgtttacttaaaaacaaaacaaaacaaaacaaaacaaaaacatgtgttttctagccaagttggtcaggaactgactgtgtagcccaagctagtcttgaactagctgcaatccctttctgcctctgcctttaaagtgctaacaagtgtgagccacctgcccagctataactactattttttaatgtgagcactttctgttctcacagaggacctggtttgatttccaacacccacattgtggctcataaccatctataactccagttccagggatcctagcaaaccctcttctgacattggtgcccaacaggcatacacatgattcacaaacatgcaaacaagcagaacactcatacacgtaaaatctaaaataataataaagtagacctatagagtatatataattccaaatggatttcagtagaagaccctacttacattgcacagaaaaagctgtctggctgcttcaggcatgccaatatcagcacatgtaaacaagcttccaactttgtttttgagtaatcaactcattattcaccagatctgaggctatttctattcaacagcacaagaaaagaagggagaagcaggaggatctctgtgagtttgaggccagcctggtctacagagctagttccaagacaccagggctgttacatagagaaatgctgtctcaaaaatgaacacacacacacacacacacacacacacacacacacacaagcgcaagaaagaaaccattcgaatttgactgcatatgtacataaaacctttaaataaaagacgtaatttcaaatcaaatgaggtcttaagaatggagcctaaacctgtctgtctctttaccagacgcagggcagccagaaggcagccattcacaatccaggaagacaggaagggataacaccagaacccaacctccattttagagaggtctagcctcttgagctatgacacactatttgttctctaactacccaaagttgtattttactatgctaattagctgattaagacattaggtaaaggtgttctacaaagaaactgtaaataaaagacatactctgtgccttagcctatctcatgattccttttctggatgtcttcataaccaccttaacctctacgaagatacagagacacaggtagcactacagtgctgtatttgtttaagcccccaacaaacttggtggcttaaagcaacacagatctataaccttataattttagaagtcagaagttcagtgtgagacacctagttgaaattgaaattattatttgaaattaaattgaaattattccttctgtaagttttagagaattcatttccctgccctttttagcttcaaatttcttagctagtaattgccttcctctatgtctatagccggatgtagagtctttgtcaatcttttatccctgccatttcaatgaaacaacaccttaccttctaggggaatctttttatctcaaggtcgattgattagaaacctcagtttcttcctccaatgtaatatagtatattagtatattctggggagtcagtgtttgtctgcctactaacacaggtaagaatttgcataggtattacaaaatcagtactttgcaaatctttcttctcttccgaattgaaaactgaacattaatccaaacatggcggcagaagcctttaaaatcggcactgtcccactgaaggcagtggcaggcagagctttgcgagtttgaggttatttactgagaccttgtctcagaaataaggcattaaaaaaaaaacaaaaaacaaaattcaccccaaatccgcatcaaaaccaaagctgattgttaatttccctcctttctaaactggattcattccttagtgccattgtttgctcgtctgaacacactgaataaacactaccgggagggattttccgtgcctatagtaaataagaatatgatttttcagatacgaaccactgagaattgttttgccttgcccgccacccccaccccgaaaatactccttgtcccagatagtagaaacttaatgggttttcaaagcactcagattattttcgaatttcaacgataccagagatcgggtcattatgtacctcggaaataaacggaacgcagtaccaaaattttaggtctcaacttccaaggcttctcaaagaaagttatcgcagacttagttactcgttcttggttacttcacacgctaccagtaatttttccacttttctgaatctgtgccccccccccacattctttcatcaactttaatccaaacgcgtacaatcagaaaaccccactaaagcggaggtagaatcccattggtttttagcataatcacatggcgggaaaattgttaccaaaaaaaaaaaaaaagagcaaaaatcttacctgaaaaagacacgtgcggtgaggtagtattgctgaatttggcttgagcaatattaaaatattaagactattccaaagagtttttcggacacgaggctttccctgatgtgagtgtgtggattctagaccctgctacaagtcacgcccttaactttcttttccgctctagactgcagtttattacccacgccaggcttattgaacgctttgcatatctacctgtaacattttagccaaccatctctacgctatcccagacattttcatcacctctgctctgcccagcagacattttagtcgacctctaggggttggttataaggcagggattttagcgatctccccaggtccctggcggcggcaggcattttagtgatagcccaggtccccggtggcaggcattttagcgatagcccaggtccccggtggcaggcattttagcgatcttccagatccccagtggcagacattttagtgatagcccaggtccccggtggcaggcattttagtgatagcccaggtccccggtggcaggcattttagcgatcttccagatccccagtggcagacattttagtgatagcccaggtccccggtggcaggcattttagtgatagcccaggtccccggtggcaggcattttagcgatcttccagatccccagtggcagacattttagtgatagcccagatccccggtggcaggcattttagtgacctcccagatccctggtggcaggcattttagtgatagcccaagtcccccgtggcagacattttagtgacctcccagtaagcggtggcaggcattttagcgacctcccagatccccggtggcaggcattttagtgatagcccagatcctcgacggcaggcattttagtgacctcccagatccccggtggcaggcattttagtgacctaccaggtccccggtggcaggcattttagtgatagcccaagtcccccgtggcagacattttagtgacctcccagtaagcggtggcaggcattttagcgacctcccagatccccggtggcaggcattttagtgatagcccagatcctcgacggcaggcattttagtgacctcccagatccccggtggcaggcattttagtgacctaccaggtccccggtggcaggcattttagtgacctcccaggtccccggtggcaggcattttagtgatagcccagatacccggtggcaggcattttagtgatagcccaagtaccccgtggcagacattttagtgacctcccagtacccggtggcaggcattttagtgatagcccaggtccccggtggtaggcattttagtaaagtctcccagtcccaggcatccatttgagccattagtccgggaacgtggcatgtatgttagctatctttccaggtccctgaccggtagtctaaccacctgtaagggacagacattttaaattttggctccaggacccagcagacattttagttat

SEQ ID NO: 114 - DNA, 46861 bp, Mus musculus
ataactaaaatgtctgctgggtcctggagccaaaatttaaaatgtctgtcccttacaggtggttagactaccggtcagggacctggaaagatagctaacatacatgccacgttcccggactaatggctcaaatggatgcctgggactgggagactttactaaaatgcctaccaccggggacctgggctatcactaaaatgcctgccaccgggtactgggaggtcactaaaatgtctgccacggggtacttgggctatcactaaaatgcctgccaccgggtatctgggctatcactaaaatgcctgccaccggggacctgggaggtcactaaaatgcctgccaccggggacctggtaggtcactaaaatgcctgccaccggggatctgggaggtcactaaaatgcctgccgtcgaggatctgggctatcactaaaatgcctgccaccggggatctgggaggtcgctaaaatgcctgccaccgcttactgggaggtcactaaaatgtctgccacgggggacttgggctatcactaaaatgcctgccaccggggacctggtaggtcactaaaatgcctgccaccggggatctgggaggtcactaaaatgcctgccgtcgaggatctgggctatcactaaaatgcctgccaccggggatctgggaggtcgctaaaatgcctgccaccgcttactgggaggtcactaaaatgtctgccacgggggacttgggctatcactaaaatgcctgccaccagggatctgggaggtcactaaaatgcctgccaccggggatctgggctatcactaaaatgtctgccactggggatctggaagatcgctaaaatgcctgccaccggggacctgggctatcactaaaatgcctgccaccggggacctgggctatcactaaaatgtctgccactggggatctggaagatcgctaaaatgcctgccaccggggacctgggctatcactaaaatgcctgccaccggggacctgggctatcactaaaatgtctgccactggggatctggaagatcgctaaaatgcctgccaccggggacctgggctatcgctaaaatgcctgccaccggggacctgggctatcactaaaatgcctgccgccgccagggacctggggagatcgctaaaatccctgccttataaccaacccctagaggtcgactaaaatgtctgctgggcagagcagaggtgatgaaaatgtctgggatagcgtagagatggttggctaaaatgttacaggtagatatgcaaagcgttcaataagcctggcgtgggtaataaactgcagtctagagcggaaaagaaagttaagggcgtgacttgtagcagggtctagaatccacacactcacatcagggaaagcctcgtgtccgaaaaactctttggaatagtcttaatattttaatattgctcaagccaaattcagcaatactacctcaccgcacgtgtctttttcaggtaagatttttgctctttttttttttttttggtaacaattttcccgccatgtgattatgctaaaaaccaatgggattctacctccgctttagtggggttttctgattgtacgcgtttggattaaagttgatgaaagaatgtggggggggggcacagattcagaaaagtggaaaaattactggtagcgtgtgaagtaaccaagaacgagtaactaagtctgcgataactttctttgagaagccttggaagttgagacctaaaattttggtactgcgttccgtttatttccgaggtacataatgacccgatctctggtatcgttgaaattcgaaaataatctgagtgctttgaaaacccattaagtttctactatctgggacaaggagtattttcggggtgggggtggcgggcaaggcaaaacaattctcagtggttcgtatctgaaaaatcatattcttatttactataggcacggaaaatccctcccggtagtgtttattcagtgtgttcagacgagcaaacaatggcactaaggaatgaatccagtttagaaaggagggaaattaacaatcagctttggttttgatgcggatttggggtgaattttgttttttgttttttttttaatgccttatttctgagacaaggtctcagtaaataacctcaaactcgcaaagctctgcctgccactgccttcagtgggacagtgccgattttaaaggcttctgccgccatgtttggattaatgttcagttttcaattcggaagagaagaaagatttgcaaagtactgattttgtaatacctatgcaaattcttacctgtgttagtaggcagacaaacactgactccccagaatatactaatatactatattacattggaggaagaaactgaggtttctaatcaatcgaccttgagataaaaagattcccctagaaggtaaggtgttgtttcattgaaatggcagggataaaagattgacaaagactctacatccggctatagacatagaggaaggcaattactagctaagaaatttgaagctaaaaagggcagggaaatgaattctctaaaacttacagaaggaataatttcaatttaatttcaaataataatttcaatttcaactaggtgtctcacactgaacttctgacttctaaaattataaggttatagatctgtgttgctttaagccaccaagtttgttgggggcttaaacaaatacagcactgtagtgctacctgtgtctctgtatcttcgtagaggttaaggtggttatgaagacatccagaaaaggaatcatgagataggctaaggcacagagtatgtcttttatttacagtttctttgtagaacacctttacctaatgtcttaatcagctaattagcatagtaaaatacaactttgggtagttagagaacaaatagtgtgtcatagctcaagaggctagacctctctaaaatggaggttgggttctggtgttatcccttcctgtcttcctggattgtgaatggctgccttctggctgccctgcgtctggtaaagagacagacaggtttaggctccattcttaagacctcatttgatttgaaattacgtcttttatttaaaggttttatgtacatatgcagtcaaattcgaatggtttctttcttgcgcttgtgtgtgtgtgtgtgtgtgtgtgtgtgtgtgtgtgtgttcatttttgagacagcatttctctatgtaacagccctggtgtcttggaactagctctgtagaccaggctggcctcaaactcacagagatcctcctgcttctcccttcttttcttgtgctgttgaatagaaatagcctcagatctggtgaataatgagttgattactcaaaaacaaagttggaagcttgtttacatgtgctgatattggcatgcctgaagcagccagacagctttttctgtgcaatgtaagtagggtcttctactgaaatccatttggaattatatatactctataggtctactttattattattttagattttacgtgtatgagtgttctgcttgtttgcatgtttgtgaatcatgtgtatgcctgttgggcaccaatgtcagaagagggtttgctaggatccctggaactggagttatagatggttatgagccacaatgtgggtgttggaaatcaaaccaggtcctctgtgagaacagaaagtgctcacattaaaaaatagtagttatagctgggcaggtggctcacacttgttagcactttaaaggcagaggcagaaagggattgcagctagttcaagactagcttgggctacacagtcagttcctgaccaacttggctagaaaacacatgtttttgttttgttttgttttgttttgtttttaagtaaacatctgagcttactatttaaacacacacacacatgagggcatagccgcattcaattcatagcaaataataaaacttttatcaataaaaacttatcaggtccttgtataatgaaaatgaaagttgacgaataaacatgaaagcccaagaaattagaataaggctggaagtgaaagtccaaggtaaatggaattataggggaaagtgatggtttgaatgttgatggtaattgaggagactacacatagaaaacatttaaggcaggcattggcataagtgaggatttgattgggaagactaactcactttagacaaatgggtggatggtgtctttatcagagtgctatgttcaaacatacccttaaattgacttttcatcctcaagatttcttatgccaggaattccttttagtgttggattttactaccagtggtaaaaatatgaaagtagggttgttttgttttgttttgtttcgttttgtttcacacacacacacatacacacacacacacacacacacacacacacacacacaattgtttttttgttttgttttgtttttttggtttttcaagacagggtttctctgtgtagtcctggctgtcctggaactcactctgtagatcaggctggacttgaactcagaaatccgcctgcctctgcctcctgagtgctgggattaaaggcatgcgcatgcggcaccacaccctgctcacaattgtttttaaatatgtgtgtctgaggcattggccccctggagatggagtgacagaggcttgtgagctacctgacttaggtgcttgctagcaaactcaggtcctctcagcaagagcaacatgtgctgctaactgctgagctcttcttccacctttgttcttttgagacgcagtctcatgcagtacagctggctttgagtttgctccgtagccaacgctgaccttgcccttcctgcctccaccttccaagtgttgggttttccctatatttaatatttatttattccttggcaatttcatacatgcattcactcgtacttctcccccactccctacacatcccgaagctgtcttcctataaccttaatgaggtctccttttaaaataataataataatataataataataacaaccctgtgagtccagttagcagtgcttgctggaatgttggctaatcttgtcggaatcgtatgcaggtagccacagccgcagtacgcttgtgagggcggcagccagcattttcacagcttgcctccccatctttagctctcatgttctttccagccctgcttccacgatgttccatgggccttgggcagtgtgtgggttgctatagacaccttgtttggagctaagcatgcaattgttgctcagtctcaggccagctctgagtctgcattagctgctcctccttgcagaagaaacttctctggccaaggtcgaggagagtacagtattgatttgttcttgagatagagttttccagggtagccctggctggctcactatatagtatagcccaggctggtctcaaactcacagtgatcgacctgcctctgcttgccaagtgctgggattaaaagcacgtccctctctgcctggctcgacttattttttgacatggggactcactgcctggtgtccccctcctcctatagcctcaaaatggctgagcaagagtcaggtaacttgcttctctgccattcctgaagccctgtgttccatccggaacctgcataaaccaggtgaggggtgtgcttgtagtcacagcactgaggtcaaggcagaagtgtcagaaattcaaggtcatcctatctacaaagagaatttgagaccagcctgggctacaagaccctgtctcaaaacgtacaaacaagcaaacaaacaaaaaacaaattcaggagctggagagacggctcagtagttaagagcactgactgtacttctaaaggtcctgagttcaattcccagcaaccacatggtggcttacaaccgtctgtaatgggatctggtgccctcttctggtatatctgaagacagcaacagtgtactaatataaataaaataaataaacctttaaaaaaacaaaaaacaaattcaggggctccagaagagtagcaaatgttcttggtaaccactgagccatctttccagctctcctgtccttctttctttccttccttcctttctttttcttctcctctcccctcctctcctctcccctcccctcctcccctcccccctcctcctcctcctcctcctcttcttcttcctctctctctctctctctctctctctctctctctctctctcctctttctttctttttttttttgagacagagtctcatgacattgcccaggatagacccaattcttcatcttcttgctctaaatctcccaagtgccgcggttacaggcccttgcctccaacaccagctggttcctaggttctagatagctattccaagtaggtagatgcgagggatatccaattatagtttgcttcatttccctagtgggaatagagaataaggccttgtttatttacttacttttaaaggctctcatgtagcccagcccagccttgaattctgatccatggtccaccacctccaggcttgcaatgcctactggcttttttcagacctgtagtcttttgttgttcggtgtgtatgtatgtatttatttagtgcattggtgttttgcctgaatgtaagtctgtatgagggtgtcagataccctggaactggacttacagacagttgtgagctgccatgtgggtgctgggaattgaaccacaaccacggtccggtccggaagagcagccagcattcttaaccaatgagccatttctccagcccctttgtttgtttgttttttagggaccagtaaattaattttaaacctagaaagccctcccttgtctacagaattcttttagttattctttctattggaactgagcttagggtgagtgcttggttagggtagtgcttggttagggtgagtgtttggttagagtgagtgcttggttagggtgcatgcttggttagggtgagtgcttggttagggtagtgcttggttagggtgagtgtttggttagagtgagtgcttggttagggtgcatgcttggttagggtgagtgcttggttagggtgcatgcttggttagggtgagtgcttggttagggtgcatgcttagttagggtgagtgcttggttagggtgagtgcttggttagggtgagtgcttggttagggtgagtgcttggttagggtgagtgcttggttagggtgagtgcttggttacagtgtgtgcttggttagggtgagtgcttggttagggtgcatgcttggttagggtgagtgcttggttagggtgcatgcttggttagggtgagtgcttggttagggtgcatgcttggttagggtgagtgcttggttagggtgagtgtttggttagggtgagtgcttggttagggtgtatgcttggttagggtgagtgcttgattagggtgagtgctgggttagggtgagtgctcggttagggtgagtgctcggttagggtgtgtgctcggttagggtgagtgcttggttagggtgagtgcttggttagggtgagtacttggttagggtgagtacttggttagggtgagcgcttggttagggtgtgtgcttggttagggtgagtgcttggttagggtgagtgcttggttagggtgagtgcttggttagggtgagtgcttggttagggtgagtgcttggttacagtgtgtgcttggttagggtgagtgcttggttagggtgcatgcttggttagggtgagtgcttggttagggtgcgtgcttggttagggtgagtgcttggttagggtgcatgcttggttagggtgagttcttggttagggtgagtgcttggttagggtgtgtgcttggttagggtgagtgcttggttagggtgagtgcttggttagggtgagtgcttggttagggtgagtgcttggttagggtgagtgcttggttagggtgagtgcttggttagggtgagtgcttggttagggtgagtgcttggttagggtgagtgcttggttagggtgagtgcttggttagggtgagtgcttggttagggtgagtgcttggttagggtgagtgcttggttagggtgagtgcttggttagggtgagtgcttggttagggtgagtgcttggttagggtgagtgcttggttagggtgagtgcttggttagggtgagtgcttggttagggtgagtgcttggttagggtgagtgcttggttagggtgagtgcttggttagggtgagtgcttggttagggtgagtgcttggttagggtgagtgcttggttagggtgagtgcttggttagggtgagtgcttggttagggtgagtgcttggttagggtgagtgcttggttagggtgagtgcttggttagggtgagtgcttggttagggtgagtgcttggttagggtgagtgcttggttagggtgagtgcttggttagggtgagtgcttggttagggtgagtgcttggttagggtgagtgcttggttagggtgagtgcttggttagggtgagtgcttggttagggtgagtgcttggttagggtgagtgcttggttagggtgagtgcttggttagggtgagtgcttggttagggtgagtgcttggttagggtgagtgcttggttagggtgagtgcttggttagggtgagtgcttggttagggtgagtgcttggttagggtgagtgcttggttagggtgcatgcttggttagggtgagtgcttggttagggtgagtgcttgggtttccagcagtatgccagagacttccaagccagccaggactgcaatgtgagaccctgactcaaaaatgaaagaaaaacaaaagcaaaaacaattgtctctgtgtgtgcttagtttaatcttatccactccaccttctctccctgataggagacaaattttggttcgagtaaagcacagaggaactaattaacctgagattacttgcagaatagcccttcctgacccttgaaggcgccatgttattacacgttgctgtctcttctatctacagctctatttcttcctcttctttattcttgtgccagcttcacctcactgtgccattgtgccgggagggcagttttaatggccacttgcctgccctctcctgaccttgcgcaaggacctgggttgaggggagggctttgggtgccgtgggctcctcgtgttcccaggccctgctgggcccaggtgcaacatggtggcttcccgccccggaatgggaggagtggactctgcctctgtcattctccagtcgggggaagtgctggctcaggctctgcaaccacagtgcagatgggagaggggccatgggacagaaaggcaaggaccctcagtgctagcagctgctggctttgtgacccatacccagcccagctcctgcctccctcttggatggcagggacagtctgggaacttctacctgatcctcacatctattctctctttccagaagcctcagaaggagtctccctgcccctgagtttccaaagctcctcacccagggggaataaggatgcccatgcatagcaagaacctgtcacttgcaggttgcctggaagacccgggcagctcacaactcatgccttggaccttaactgcctgtttctagttgaggaacccaggctgaggaaaccaagttatatcaccaagagcatttattctagcaaaccatgaaggggctcatgtgtgcctcttcaatacctatgaaaaatttataataaaaaatcctatttaaagccgggcgtggtggcgcacgcctttaatccccagcactccggaggcagaggcagacggatttctgagttcgaggccctggctgtccctctaccactgagccacatccttacttagcccagatcccgcctttgaagaatcgcagtgtttggcttctaaatgaccagggtgacagtcagacgagggagtccagtgctgctgacccgtgcagcgaccctagccatcagggcaaggatgctggcagccctcctcttgactctttttcgttcgttccttccttccttcttttgtgtgatgcgtattgtatatgaatgtggatggtgtgtgtacacgtttgtgggtgagggttgcacagagcataatggagtcagaggacaacttcaggtgtgcatctggccttccacgttgtttatgagagcatctctctctctctctctctctctctctttcttcctttctattttttaaaacattttgttttacataagtacactgttgctgacttcagacgcaccagaagagggcatcagatcccattacaggtggttgtgagccaccatatggttgctgggatttgaactcaggacctctggaagagcatccagtgctcttaacctgagccatcatctctccagctcagacaggtcttttgttttgtttttgttttttcgagacagggtttctctgtgtagccctggctgtcctggaactcactctgtagaccaggctggcctcgaactcagaaatccgcctgcctctgcctctggagtgctgggattaaaggcgtgcgccaccacgcccggctttaaatagggttttttattagaaatttttcataggtatatagaatgcattctgcttactcttccactttcaatttccctcccgccctggccagcaccccttattccttacaaaatgtctctgtcatatttgctagttttattttgtttagtgtttcatagttcaccccagacatagtttggaactattaaatactcatcagtggatacgtttgagtgccccgtgtcccaatcctttagttgccagtaataaatggtaaggtttcatgggcttcttggagttgggccaatgctattttccaaagatgttaagatttaccataatagattcttgtacctgcctcactcacactcgcttgcagtacctgtctatctttctcttcttgccaatcacattgtagatgaggcttttgtggttttgttggctccttgtattagcataaggtgaactgatttcaggtaaaatgttgttgcttttctggcccattcattggatggaaacgaaggcccggttttgttggagcacttctactggttagcaatggctaggcagagccatgtctaacagtacaaactctctcctgagagaatttatcttttctcctagacgcaattttgtcactttgaattttagaactatcagaggcccctttctctattcaaggacttcttgacagccatgttctttcttttcatttcatcttaccagtactcccacttttgagcctcaatattttgcttctcgtgatcttattagatttgtgttctcataatctttctcctgaacaacttaggctctaagttatgagacctcaaattacccaaggaactggctaggcctgcctggtggtgtaggcctttaatccgagcactcctgagtcagtagcagacagtgctctatggatttagggccagcctaatctacatggacttcaggctagccagatggccagggcaacataaccaatttcattacatagggaattaaaactgaggtatctggtatgataaaagggccactgagttagaaactatcatctgaaaagcaggcttagtggtacaagcctgtaattctaacacaggaggatcaggagctcagagtcattccggctacttagggacttggaggctagcctagttctggctccatgcaaaggaaaaggggaatgtggcagtggttaagataccataatagattcttgtacctgcctcactcacactcgcttgcagtacctgtctatctttctcttcttgccaatcacattgtagatgaggcttttgtggttttgttggctccttgtattagcataaggtgaactgatttaagagcactaactgctcttccaggggatctgaattacattccggctacacacaagatggcgtctgtaacttggtttccttgggatccgacaccctctgctggcctacacgggtataacacccaaacctaatgcatagacaaaactcatgcacattaaataaaatttaaggaaaatatcatatacagcacatgatgttttcaaaacaaagcattttatttaacagcaaactaccccacccactcaaccacccacccacccacccacccacccatccacccacccacacacggactcattgtgacatgttggtaagcaacagttttttttttcaagtcttcaaaacacccaagagtcaacagaagttctgtattccgcatccgttcacaaagtccaggtgttttccatgtgttttttcacagttggtgggaagatgactccagtctttcaacaacagattggtacacagttcatttatgtgatcaaagcagatgatggtaggatgtgcttaattggtagcaatattgatggcagtaactgtgaaaggaaggctttcagttattttttcctttgcaaattccagaaatgtaagcccattcctacccatacaaagggatattactgaatccagccaatttccactaattaaaagctaatattagtaacacttttgatgcccaattgagttttaatgaaaatgaaaaaaatttgtttgaactcccagacctcttcaacctggctccatcttctctgttccttttcttttgcctgaatgtcctgattgggttactaagtaaagtctagatactttgaaagtatgcgtatgctacaatgaataagcttccttacagcaaattgtgacttcagctctaaggcaacttggataaagagatcacattgacttaatctgtttcattcccatttgactcaaggcttagctgatagccatttagatgaaaatacattttcagaaacatttagcgaattaataccaattttgtggaactgcattaaagtcccaacttagattccagatagacaggctggaccctttccttcactcggcctcctgtcccaccctctgtgagtgaaagaaaaatggaaagggtcaaagcacaggcatttttaatctttttcaagttctttcaatttggtctttcgttcctccagttttctgattgttgtcaattttattattcttaaattttatgcaagaatgttaaacattaatgttattttcatccactggcattattttaccatagcaagccaccttgagtatattatagtaaggagaacatttctaaattactgtgagcattagcatgtaaaaaggtaaaaggtttaacgaacacaggcaaaattggtcaatgtatttcaaagcctgctgcagctcaaaaatggcttgtttgccccaggataatgcaaagtagcctaagattgtggaacttagatggctgtcatccctcctgaccagtagtggtcacagtcatagctaaaatggcctagaaaattgagtttcttagcgtggagggcttctgtaactttagggtcaggcttgctacaaagcccagcttcccactcattgcagtggccggagaagacatgaggatgaggactcacattgcatattacttggggactaaggactaagtcgtgccactacccagaaaagagaccccccccccccatccagcacttccctatgtctatgtttcctttttccatgtctcaggagccaagtgaaggcctaagagacatgcaaatccttgtagaacaggcgaaccaataaagcaaatgaatgaataataaccttcctgtattcaacctctgaggcaaactgtgggaaatgaggaaagtgttcttcagtctagaaaacgtttgagctaatatttctgtttaataaagagcatccctctgctttccggggcatctgtaagtcacactgagtgcccttttggaacaaatgtgttgcacttagcatccagtagcatcttctgcaatgtgtggaaccgaggaaatagagaacctcttttattatttccactctaccaagcatgcccatgaggaggggagcaactttttatttaacttgcctcctctacaccttgatgtttttcccagctaaagtgagagctgtagtctcaaggtgtgactgcagtcccctcagaaactactgaggtaaagtacactttgggttgcatcctttaaatgtctttgttcttttcagtacttagaaattttagtacttagaactgcactttcatcacacttaagttaaaagtatgagtgtgatagtatattcttcttgctcacatgacgctgagccaggcaatgaacaaatacgtttagaattatcgattcatcttgattctcctttgaaacacttcaacagtaagaaaaggaaaatgggtaatgaattaaaggacagactttaagtctgtcctggcttcaagctaggccaatgagaaaatgacttttggagcttccttagctaggaagtctccagtttatgttgaaggaatcttggccttggttgggtttcgcaaacagccattatagttaaaatatttactcagaaggctggagagatgactcagtggttaagagtctgactgctcttccgaaggtcctgagttcaaatcccaacaaccacatgggggctcacaaccatctgtaatgtgatgtggtgccctcttctggtgtgtctgaagacagcaacagcgtactcatatacataaaatatataattctttaaaaatattattcactcagtaatcagatatattcttcaggctgggcatgggttaagcacatctgtaatctcagcacttgagaagctgtgacagtcaccaattagaaccagcctgggctttatgagaccatgtctcctatgatcagtgatctacactaggtccacctcacattttagttttaggacctaggttagcatattttatatacaatgtttcattaggtgttgtgttctgcatgcttggtccctccagccagtacatctagttcgagaggttctgggccacactgagtacatgccatcagatgctctggcctcttcccgttttgttccctgatacccatgctctgggattatctcactctggccctataaaactcctttactggcaaggtgtttgtaattcatctctggcagcagcattcaacaaacatttaagaaactggatggaaaaagttcctgtcattaataaaaccttttccacctcctcagtcaagccagctgggaagtatcctagacagcatagtccactcagtgtaacatttagcacactgccttgcacaaatccattttttttttctgttttcatttcctcattgaagtgaattgaagttttggtctagatttcactcctataagtgctacataatgctagaaagcaatctatgtgttcgctcaacacatagcatggtaaaattattattaggtggtgttaggtgataagcattatgattaagtttcagccattatgaaacttagaaagtaatcactgttcactgataaagccaacagttaggtcccggctttatagaactgtagacttcacaaagctccacacagatctgttgtgcatgcctgggataaaagcaaagtcattgcacaccaggcaaatattgcatatatacacatatatatggcagtttacaaattataaattaatctcatgcataatttctttagatacacaggacaatgagaatgctctttgcatcccagtgcctagcaagggcactgttttgtaataaatgactgccattcagtatgtactcatcaagtattgaatgcttcatatattcagtggttcacagttacttatttactttattttcacagtataataaatgtggcagaattttaaaagcctggaaattgataccaagtaagaaaatgaattgttacatttatatggtacctccgagttcataaaatgccaacgtacatattattctcaagtgtggacacactgaaatgtacgtctgtgtatctctccagtacccatgaaagagaatatacacatgggagacaatatttagcctccaggtttgagattgaccttatggtcttcccaggctagcctccaatttctgggctcaagtggtcctgttgcttcagctcagagcacatgctaccacacccagcttgttaactgtactcttcccattatgggctaaaaagtacaatgaaaattttgtagagactatgcctattttataggcagctttatttctatagaaaatttgtcttgtcttatactactgaactgctttatagttaagaaagtacccacaaccataatgtgacctgggcaaatgttcttgtattaacatgcccttatcactcaagttttgactgattaaattaagcattggctcattccttatgaatagtatggaatgcaaacattcttatttcatggcagttactcatgaatatttcatgtacccaaaacaatatcggatacatcagaggtagttagtagtcattcatttgcacacatggaacaattgatagctgtataatgctttatttaatgcattcttttgtaaattctagttctgtggtaatgtccccctttgttattcccagtgctgaacatgggtattcagaaattagaaggtgatcagaatagggtaatcaatcacctgcattagtgacctagtttgtagtttaaaatcagtttccatgtgttttctcttctgctacctggtataatataacttactgagcctcaccaaagcagaagaaacacactggccttaagtatatggactgttattcattcaagccccgttatgttcatatatttgtttttacaaagcatgttattcctagagcaatctttgtgcctatagcacacagaggcgtagacttcagctactatgtaatacatactcagcactgacttggaagttacagtaggcttcatggtttacgtattcatacgtttcctggttacctggtaatatcttgttacctgggggtgaccacagtgaagcatcacagccttagtattcagcacaaaaaatatgcagggaaggaaattaatgttactcagacattccctggcattcatatcagggcttgatcaagtacaggcaatagaccagtgtgcctttttcttaccttttgaaaaggatttgcaactaaggaatatgcaactaagaccatgaacccacaaagcttcaggtacttagtctgatgccttataggaaaagctctacactttcagataataaccatgtataattgccaatgtgctatgagcatgttactttttcatcctgtgtcatttaacttccctcttacagaggaagaggaaggcacgaaaaagattaagcccgttaagtagtccttagagtctctcatcattaattttaaaggtaggtattagacccaggagttcctttggtgaaatgcaccaaattactcggccactactatgagcagggagttcagacctcattttgtccccaaaccattattagaaaaccataccctgctcacctaagcccaaagaaagaaggtgacactggctggtgcttctcagagggttggcacatctgcatattgcttgtctaattcttctcattggtctggaacaactctttatattttctctagatagcctgacattgttttccccctaacaacctgatgctttccttttcttgtcagcctagggcttctgaggtagggaggatggcagtatgcatatctgtatgcatgcttattcctagggaagtttcaatagtcaggctatatacactggctggatttagttccgtctcaagtggagcagatgtgaagagaaatggaagttgtaaaacatcaacaatttaacaaatggctaagacccagtttaaaacagacccttgcacaatactatccagctaaaaacgtattcctttatgggcaatggcaacaatgaaaaattacatctcaagtgaagacagcttaaatagaaatataagaaatggaaagggatgctggggttggggggcaggtctcatcttcgaatttcccttcttggtcttggggatagaaggatagaaatatccttccagagttctgggccataggcctttatctcttaaatattctgtccatataggattgggtccttaggtcttatgcttggacttagctcaggttttgtgtcttatgacatacgtagttccccgctcttggaagtcacaggtgtcctgtagaaacagttcctcttctttgggttgtcagcattctgtccagccagctcaagacgggccatctgtgtattttggtccttttaaatctcaagtcgcaaaacttctgtcttctacttgggcgttcacttcagagccacttgaatcctgaccggacggaatgatgtattttgtcttagattatttctcagggcagtctggtgtgaggaacggctccacgggtgacattctggacctattgggaaggggctatgaagctcctctcacacatgacacacataacacacatgcacacacgcacatgtacatacaaagaaacatccaagaaaggattactttagaatacaagagagacacagacttgtaaagagatgaaatgctcaaagtgaacagaaaggaggaaagtagaagatagaaacacaagcaaacacaaagcaacagaatgatgctgagataagaaatccaccaatagcaaagagacacaaatacaaaagaaaacagagaaagtggcccaagaaaggcagggaagaaatgtaaacaagaattcactaaggatagaagcagcagaaagaaaactgaaatggactgacaaagagaacttgaacaaagaacaagtggggtgagcacaagaaaaagagagggatgcatgcaacatgtgacccaaaggggagtcacgaaaggcaggagtgaaagaaaagctaagagaaatagcaaccagatagataaaacagagagccatagctagtgaagacaaagcagaccacacaggcaccagagaaagtgaaacaaagctcaaagctctgcaagaaagaacatgcaggagaaacatgggaataggtaagacacactgcagacagaaaagacacacaaaggaaagaaggagacatgcaaaggaaggaagaaatagatgtaacaaagaattagacacacaaggaagaagtagatacacaaaacaaggaagacatagacacacaaagcaaggaagacatagacacacaaagcaaggaagaaatagacacacaaagcaaggaagaaatagatgcaacaacgaattagacaacacaaggagacatagacacacaaagcaatgaagaaatatatataccaaagaattagacacaatgcaaggaagaaatagacacacaaaagcaaggaagaaatagatgtaacaaagaattagacacaactgcaaggaagaaatagacacacaaaagcaagaaagaaagacacacaaaagcaaggaagaaatagatgtaacaaagaattagacacaactgcaaggaagaaatagacacaaagcaaggaagacagacacacaaagcaaggaagaaatagatataacaaagaattagacacaatgcaaggaagaaatagacacacaaagcaaggaagaaatagatgtaacaaagaattagacacaactgcaaggaagaaatagacacaaagcaaggaagaaatagatataacaaagaattagacataatgcaaggaagaaatagacacacaaagcaaggaagaaatagacacacaaagcaaggaagaaatagatgtaacaaagaattagacacacagaccaaggaaaaaatagatacataaaacaagaaatagacacacccacaatacacactaatgattgatagtaagcaaagaccaccagaaagagggtaacaagaaacagggaagggcaaagaaaaaaattgccattagtacactgtaccaggctatcaacgttaaacttaaggtttccttaacataggaccataggacacacccgtcaactcttccaaatggcctagtcatgcaactccagggcatatttgccaggctctgtactcaacactttccattcatgatttcatttgaccttcacaaacagacaggtcttagcagaactaaattgccaaagggcatacatctaggggatattacatttaaacacagaatgaacatctcaacattctgttacatggattaaaagcttctgtaagcagcaaacactataagcgactgcatatttaattgtcagcttcactctcctcttctattaaaaaaaagggggggcttggtttttacatccttcacaagtctaatggctgcttcacagatggagataagaaataaactatttaaagcttttcaatgtttaagtctgtaagaatggtagggcaccaagccaaaacaaacaacaacaacaacaaaacctagaagctaaattcctcttgtgatataactggtaagcagataatagtttgagttgctgctgtgaggccatttgataacgtgaaagcctgttcatcttccatcgtgtacatggccctgcctcacattatcacattagatgctctccacccagcaccatcttccagcaaatgcaaatcctcagaagactgcaatgctagtgacttacctcattctattgcttttaagatgctgcagtcaggcatgttgatcctcgggtcatttataaagctgccttccttttgtgtgttcacattgcttgatcacgctgaagacccagttttctgtgctgctttggggaagggtaatatttggtagatggcactacaaagaacaaaagaagctgtatgaatgccaggaaagaagtactagaacatcctggctctttaaattctgcctaatgatagatacttctgtatcaattccagccaggtttccatttgtagttagaggcattcatcatcagtaatgttagtgatggctcagtggttaagagcacctattgctcttccagaggtcctgagttcaatccccagcaaccacatggtggcgcacaaccatctgtaatgagatctggtgctctcttctggtgtgtctgaggacagcaacagtgtactcgtaaatagctaggtaggtaaataagctactcacttgtgtattatatggcatgagtagggtagcagtgcatcttgaagtatgtaaacagctggcaaagctttcctagcttctggagagagaaccaaatagagcagaatggcttcctcgaaggtcagtgccactattgcagcagcttttctcctagaagaaacatttgcactgtttagttacatttcccagatgtgggaaaaagataaaatttatgtatatatctcaagtaaaaggctgactttaatggaaaacaagatcaaagttaaaattattacactgttgcagaaaacttacctactttgatgtagggtggcattctttgagcctttgtcttccttgctgggttcaggaaagcgtctcactgaaatctgggctaggcctgttgcccagtggtggtgagctattcccctggaggatcctcatgccccatctccacctagggatcgtcaaagggaataggtcgccagcactgcaaagcagcaagcccacaattctggggggagatctggaaaagaggtgaaagaaaagccaattcttgaaatcaagaatactgggaaagttgtctcattatgtagtaaccagcagttgtgttaaatcatggggaggggcttggagagtgaacccttcacatttgtagatcttagtgttaacttagagacatgagaattgctccatccaagttctttctggcttttattctgtcacctaccaatgagagatcctttagattataggttgtgttaaagtccttgtacttcaaatactctgggaataaaggggttaaattattttcttcttttaatttgtgctttaaacaataccatgccagaacactggcaaggtgaatagcattgtttggctcagtgcttatggtgcatatgtccctagaaactggtgtagcattggacctctgagtttgaggatattcagagaccagaattatgacaggcctacagaatgtgacaacagccatatctacttactctatcaagtacaaaagactagggtgtcagaaactggccttcattcctctgataacctaccttttaggcatttcagagcagaaatgttacagattggtcataacatggtggggatgatttcaaggcctcatcataaggcaaggatctcattggctaactgactatgccaggggaccaggagatggggagtgctttattgacttgccccctcattctctgatgaactggagatcagatagaaacccccaaatagcaaattctccaaagtacctttttttctccatgtggcctgtaagctttttgttcagagtagcgaggacttgaagagaagttctgctgagatgtaatgtagctgtataggctgctggcagtccttgagtctcacatagggattgtttgtccctgtgaagaaatacaaggctatcattagactacaaaaattgttgaaaattccacatgaaaataatgaggtatttacttaggaggtataacttgacacattagacctttaagggaagatactatctcagtcaaccaagtaacggaaatacctttgggctctctccagcactcttcactcctctaaatccaggcaatccttcttcttgaggcaggagcacaaaacagactccaaattcatccctggaaaacaaatgataattatactaaactctacaaatgataatttgattactagcaatacaatcttcatatgcacatgtcagcgttttcaattggtggtaagaactcagggtgaggatatgttctcatggaacccctagttcttaagagatgtgaaaacagcctttaaaattgaaagcatgtctacatttcaaaggcctttcatttcttttccctttttgtatatttgagtactctatctgcatgtatgcctgtgtgccagaagagggagtcagacgtcattacagatggttgtgagccaccatgtggttgctgggaattgtactcaggacctctggaagactaacagaaccatctctccagctctcgtcttaagtgagctttctcttttcctgttttatttaaaattaacaaaactttcttatgactacacaaatagagccatcttcccctgggatgagccagaggactaagtaaggggcaggcagaagaggttcactggactgggagagagggcacaggttggacagtggctaggttatatggcagtatgcatacaaagacctggtctggttctgccacagggctttgtaaaatcagctggcaaaatccactacttccacttcccaccacttaatgaaggtgtacattctcaaattcacttgttctacagggttctttgtttacaaactcctaagtctgggtcaagccattggacagcttggaagaaagctcattcttctttttttttcaagacagggtttctctgtgtagccctggctgtcctggaactcactctgtagaccaggctggcctcgaactcagagatccgcctgcctctgcctcccaagtgctgggattaaaggctcgagctaccactgcccggctgaaagctcattcttaatgtatacagttcaggcagcctgaagatggtgatggcgagttggtggctttccattacatgattactgacagtgagggctgggtcaggacactaatttggggaactctttgtattccatcaattatggggaccaaagatggcctccagatggttttgtgtgatggcacctcctaatggacatttcaatcacagacaagctcatgttccagatgtcctactacaaataagtgtgtattttacagtgccgtggaggtcatgtaggactaggttgccatgacagaattggccctgattaatgatctgcctgctcacacaacttgatcatttcaatagggaactgtcagtgatagtgggtttactgtgaatagcagcagtaccagcttcctccaggccactaactggagtctgagtcctaatctctatttaggtccataggaggcaggctgaaagctctaggtgcctaggcaagcctgggggggggggtcactttgcatgtactggggtgggtagccaatggtgctaaggtgagaccgaagctttagctaactgtcttagtgcaccaaacacattctttagcatctcaaaaagctttttttccttgcaaatgtttccttttgaagcagttacttgtacaacaatggtcctagtttcctaaaagactcaatagttctagatgtattatcacctagagagccagacaatgctaagcctttggagttgggggaaacctgctgcgaaggaatttacagtggacttaaaagggttaaagtactagagggtcatttgcacgtacaaaaggcaaatgcaaaaaaatgttaagtgttatggacaaggatgttttttcagctagaccattttctacacaggagtcaagtatttgttgttttaactgaaagtatctgttgaaaagtgctggcaggggtccagtgtggcacccacccttaatcccaacactctaaactggaggcagaggcgggcggatctctgcgggcggatctcttgagtttgagttccaggatagccagactacacagagaatccctgtcacaaaacaaaacagagaacaaaacaaaattaattgattaattaatgaaaaagaaaaatgagcaaggagggtacataaagtagtccatagtaaaatttgttcataaaacttatccttctttgcacttttgtaaaaaaaaaaaaaaaaaaaaaaaaaaaaaaaaaaaaaaaaaaaaaaaaagattgtaagctatgaagttctctgtctaagctgttagtgccgtccagtggtctgttctgggcagaaatgcagtaaaaatggttgaaagaaccaaattatcaaatttatattcccaattcctacacaagctcatctcttgctacccttggcgtacagctaagcataatgcatggagtctttcactcttaatattctttccatgcttccaagaggtagatagaaacagatggcattcagataaaccaaccagatggtactaatagtcgtctggaccaacaaggcaaagtaagcacacttccctctttaagaagtcaaatttcaaccccagtagacttcctaaaatacttaaacaattcacacaggcagtacatttcctaaaatgatctcaagtgtgcttatattacattaagtcttaaataacataatcatctcacggaagaaattttgtaaaatatcatcgcttctcattttagtgtaccccagcataatggcgattgggtacacaatgtgttaattctacaatttcgttggcatactatgtgttgtgtatggataagctgagaagagctagtgacttattagtcactttgacttttcagtgggtggcacagaaagaaactcgaatgagaaaaagatagcttagtagctaacaaggtagtacttactgtagtctaaacagccagagtctgatgtaacggaggagcagtagttcaagcaggatcctgcactggatgagttacttgaacatcctcctcagaaaaatagtatcatttctcagtaatgctgggagaactgctgttgtgatgattattttcatcagcaatgtcatatcaaacactcagcagcgggatggcaagatggcacgcggagggtaaaggcacttgctgccaagcctgatgatctcactttgatctccaggacccacaagatagacgaaccagctcccattgttgtctgagcaccatgtgaatgaatgactgcgcgcagcaacatgcatgtacacacacacatacatacactcatacacaatagctcccaaaaaagacctaagtactcggcggctacaaagcacccttcacactagagaaagctcttttcttactaggaaaatctctctttgaagtgtacgtttaaaggaatgattagatcctggcagacatattttaaaatgtaaagtggggaaacaggttctatcatctctaaaataaattcccactttaggaattttcaagctacttcaaattattgccagagtttaatggtggatagaatgaattaattaaatgtgatggcctatataattttcaaaggcgacttgacatgttctcaaatttaatccatccagtcaccttttaaaaataagcaaggactggtgaccaatgtcagacaaaatataatgattagaaggcttaggtcatcttccaaaaagttaatcatactaaaggccacacaaagattgactttttcgttttgttaaacttgtagtaaagaccaagcaaagatacttgtcttaaacattctgcaatagttgcactgatctttccacagactcatcaccctcagtacactgagacactgcttagtcttcagaaacatgacacaaatggctatttttacttcacaaaagctaatgatctcacagtcaatccaccttgcaatccaaatgcctttcttaaggaataaaattatcaataacttttctggcagttggtcctgtacagtagcaatatacaaaatcgggcttaaagtttcttaagcagacagttggctccttcctggaggaagaacggaaagaaaagtgctaagcttccttctcaggaagacaattttcagttcatactgtaaaggaaagccccaagtaaaaggtggcaatccaactccctgagctacttgcctgcaatattttgcacaataaagcattaataaaggtaggcaagaatggttcctggccctagaatgtgccagcagttggaattggaataatttagaagtgcaagttaaagattgaaggctcatccacctagttttggcctgcttttgctattcagtgtataaatacaccaaaatttattaatgacacatagggtgtttggggtaattaacattacccagaataatgtaagaattcgaggtgtctctgttcagtgggagcaaggagaaggcaactgagacactgtagccatatgaagtgagtaaactggtgttgttgactttaagtcaagagaagggctttgcccagtcaatactgttcaaacaaagaggcaaaagggatggcatgatggaattgagaaagggcacaaactcttccttaatgatgggtttgtgagaattagtgattcagaaaagtggtcaatggacaaactagaggccgggcaaaaggaacactataaagtgtgagattgtgactatttaggattgtatatattaaagcaatgcaaaaagggtcgaaatccgggtcattgttgggtgtacatactgctgtactttattatatcattgggaaactagcaggggatttgctcaagttggagtagaaaataaaccatccagaactgccattgtgcctattaagagtcccaaaatcagtttaaggaagagagcaggtcattcgtcagagcccctgtgctcattgacagtaccgggtagtttcgggggctcagcaacctctgcaataatgtaaaggggacaaaatattccagacattcatagttataaatacgcataacttagcaattaattctgggactcagtagccttgatggtatgcaaagagagcacacaggtccttgacatttttgcatagtaatcatccaaatgctgaggttactaatagttactaccactcagcagccccagtcaaaaggtaggcatttcagaacctttgctgccgcacaggtcatatgtgtaagggtacagattaatattgacaagagaagtgctcagaaataattaatatgcctctggtgtcaaaagagtacaaggatgtaaaatccaactccaaaggtaatgatggacaactaactgcattaatgcacttaagtccaaatgaagagcacttcgtacaaccctctttctgctttaaagcggagaagagggtacagtagttcttagagaagtgcttagacatgtgaactttccaaatgaaagtcttgagcttattatcacttcctgctgaaggtgctaaggaagtgagtgggatcctttcaagtgcacagagcaggtggcagtgcatacgcatacatttaatatatgataacagtccaaaagaatgcggccttgttgatcagcatatcctgatatagtgcaaatgaaaggcgaaggagtatggcctttgtttactggcaaagacaaaggaagattcactgtatattaatggtccactagcagggaccttgggagataaacggtatcccttgcaggagtgcaagagatacaatggtccgaaaagtaataaggttgtggataagtgtaattttacacattaactggccaagtatttttattaaaatgaatggatcatgtccctgttatatacattaatgttcaagggacatgttatcaattaaaaaccccatcctttatgcaaatattaagtctttaaagtaatagtcctggaaattaaagagtggaaaggaggggacagccttatccagtgtccaggaagatgaagaagccaaaagattagtgacccttgctgtactgcaaaagggtttgagagtaggatcgtatccaaatggaatgagatgtgtgcagtaaatgcatactaatatgcaaggtacatgtttatggccattacagttttacgctgttcaggtttccttctgtagtgaacagaaaaggcctactacaatcagtcattattattagcaagccacaaaatgggaccttataggtcaacaccacttctgtacttcaaagttaagagtaaaattgatcctactaaaattgccagtatgtacataaatagtttgaggaaggggtttcaagtgcacagcacatacataattccataaagcaaagaggatatgaatgatcagagacagaagtcttaccttgaaggaccattgaccgtattggaatcgtttcaatctatagtctcatgaaagaagctttatattagtgagcctctttgctttgctaagtacaggagtcctgatctaaaaggcacaactgtggacatgagaatatgtacaatagagttaacactgtgcacatttactatgttaaggatcttaaatactgctgcaatacaaataagtcttcaccagatgcagattactacagtgaaatgacatatgcacattcacaatatgaaagactgcatgcagggcatagtggtaggaaccagatatgccaacacttgttaaacgcaggctagatcctgagctcaaggctagcctgggttatatgctaagttccaggccagcctggaagttaaaaacaggacagatcaaaggtcttcttgattaccaacaaaatgacttgacttagtttggtttctttatccaatgcttaggaagagggacaaatgcagctgtgcacacaacaggcacaaatatgtttacattacaggtggcaatgcctgtaagtcccgcccagcccaggctacataagaggctgttctctcaaaccaccacacggtggggctgtagctctatgacagtgctttactagcgtacacaagactcaaggtttgattccccagcacagcagaaagaccagaacagagaagtggtctcattggttggcacccttgattgtcacccattagggtatgagggtatgggatcttggttactaacagaaggggacttgaacaactgcaattttgcacaattgtgtaagaggcattaagtaatcagcaccctctttacataaagcaagggtagtattaggaccttgagaaaagactcaattcctagtcaggattatccacataaaatgttccagtgcagaggtttttggctgaaataagaaagcatgtgagactagtatacaatatcatgagcaaataaatgtatctccatcagttagaaagatgtgacctggggcgatagcacccatgacagcatgccaacagtatatagtattctaccccctttaatggccaatgccttgaaaattgggactgagcactttaactgtctgataacagacctgtgtttgcccctttgctaaatgcacacagggctggactagctaaagtctaatccaatggacaaaatatttctgacagaattattcagtactcaaggtaatacatgagaaaagacgactgaacactgcttagaaacttgggactgtgactactacagcaatgacagaatggttttctttccttaaaggaaaggagacttgagagatgatacctccatggcaagtctctgatataaaactcttgtttgattggtgtatcttgattaacatgaaggacaagagttctttgtttacttgtccatggacaagtaaagtaggactgtatgcaaagtgaaattccatgactctggaagtcagtatggagggggtatggggtatagatgggctcagtcttataggctgagtgatgggcactgcattttagcaatacgattctatgcattaagtgaaattccatgactctggaactcagtatggagggggtatagatgggctatctcagtcttataggctgagttatgggcactgcattttagcaatagaaatctatacattatgtgaaattccatgactctggaagtcagtatggagggggtagagggtatagatagggatatctcagtcttataggctgagtgatgggcactgcattttagcaataggaccgtatgcaaagtgaaattctatgtctctggaagtcagtatggagggggtatggggtatacatagggatatctcagtcttataggctgagtaatggacactgcattttagcaatacgattctatgcattaagtgaaattccatgaccctagaagtcagtatggagggggtatggggtataaatgggctatctcagtcttataggctgagttatgggcactgcattttagcaataggactgcatgcattaagtgaaactccatgactctggaagtcagtatggagtgggtatagatgggctatctcagtcttataggctgagtgatgggcactgcattttagcaataggactgcatgcattaagtgaaattccatgactctggaagtcagtatggagtgggtatagatgggctatctcagtcttataggctgagtgatgggcactgcattttagcaataggactgcatgcattaagtgaaattccatgactctggaagtcagtatggagggggtatggggtatagatgggctatctcagtcttataggctgagtgatgggcactgcattttagcaataggactgcatgcattaagtgaaattccatgactctggaagtcagtatggagggggtatagatgggctatctcagtcttataggctgagtgatgggcactgcattttagcaataggaccgtatgcaaagtgaaattctatgactctggaagtcagtatggagggagtatggggtatacatagggatatctcagtcttatagactgagtgatggacactgcattttagcaataggaccgtatgcaaagtgaaattctatgactctggaagtcagtatggagggagtatggggtatacatagggatatctcagtcttatagactgagtgatggacactgcattttagcaatacgattctatgtattaagtgaaattccatgaccctagaagtcagtatggagggggtatggggtataaatgggctatctcagtcttataggctgagttatgggcactgcattttagcaataggactgcatgcattaagtgaaactccatgactctgtaagtcagtatggagggggtatagatgggctatctcagtcttataggctgagtgatgggcactgcattttagcaatacgattctatgcattaagtgaaattccatgactctagaagtcagtatggagggggtatagatgggctgtctcagtcttataggctgagtgatggacactgcattttagcactgaatcaatgaagattcgaatttctctaagtagaagtgggcttgggataggtctgaaagtatctgggcctggggctaggactgggctggggcagggctggactggattgggttggttgggtggggcaggggcaggggcaggggtaggggctggggctggggctggggcaggggctggggcaggggcaggggctggggctggggcaggggctggggctggggctggggcaggggctggggctgggcctggggctggggcagcaatagcagcagcactatttgctgagtcttgaggagaatctagatgccataaaggcaagaacacacagaaagttgaaatgtaggccttaatattactattataacagtaagtctgatagaggacacagagcattacaattcaaggctcttgctgacaagtaaaaccattagtcaatatagcatcaacaatagcaacaaaagcaaagcctgaactggtatagaacctcaaatactcctgacatccagtcataatgttcactttacattaacagtatctgtgttataagacttaaaaatttgaagagtagctcggtggatgagtttgaaagaaagtacatttaagtgccaagtaatttgagtatcatctgccaaaaaaattattgaaaactttaaggactccaaagtaacaattcactaaaggtaattaaaatgaattcaacaagtaagcaaatcgtaaatacattttgaaaacaatcacttcggttttaaattcaaacactagcaaagcacactatcagacgtgtcgttggcatccaaaatattcattgaaatcaaaatgcaaccccagcaatagtcatggggtagattttggaagaaggtaggattctacctcttcaccagtgatttgtgatccactatgactctggccaaagtcaccacttatacccagtaggcttagagaaccgcttgagatcagtgctggctaaatcagaggccaaggtgtaagtagactagccactgaacaatacaaaggaatggaacgggctgagttttagtttgcaccgccacgtatagagcactgtaagagactatgaacgcaagcggatgagtcaaatgtccttgaaatggccttagatacttttctttcttttaataggtgaggtttcaatgatttacatcgaccaagaacccgcagcctcggtctctcgaatcggatccgacatcatccaacacttcagtgttagaattgcaagcatgcgctctcccgacctgggcaggcacttcgaaaaaatgatgactaaagacacacgtgaagtaccaagcgaaactcacgtccttatgggacagtgactcatcacagtctaattccatcctggccaccaagcaataatgcacatttctaactggaagtcaagcaaacaccaacactttcacacttgtgcccatttctgacgagttacgtcaagtggcaaccaacacttccacttagccttgcctcagcttcgagtggcacaaggtaggaccaaccacaccctaccataatgcaccaagtgtaccctcgggcaaagcccgccaagtagctaaagcccgccaaaaaaaaaatcactgaaagaaaccactagagggcaggtcacatgacttccgccatcttagacacattcaagagcatgtgccacctctccaggctaactcagacatgaagctgacatgtgacacacaaagccctttgcgttataccgcaccaagaacttgagccgccatcttttcctgtacgacctaaatgtcctataatccattgctacacaccagaacaaagattgggctgtcgagcctcgggtggagcccccgagccgccattttatagacttctgagcagcccttaaagccacgggggaccgcgccaggggtccatatgcacacacaccctgcccaatccccacacccacgctgagccctatcccctagtcctctgcggcttccgcgcaacaccgcacactaatacgagcactccttggctttctacttccggctagcacaaccccgcaaatgctaccacaaatcaaggcgaatcccgcaaccccgcacatataaagaaagcctttagctagcgcagcgcaattggttgcttttatccagtccgctgtgctcctcggtgtcctaattcttggcgtaactggctcgagaatagccgtatcacgcagaagccataatggcggacgcgggctctccacgccctgaacacccactcagtttaagagcaaagtcgtttttctaagccataggttcactcacacagcaccaaacgatcagcagcaacagtacacgcaaataagaggcatagatattccaggtagtgcaataactcacaaaaccatatttccatccaccaagcgccccgttgggccgtgaaaaaaaaaatttaaagcaggtatccacagccccgatgggcaaaagaaaaagaaaaaaaaataataacagcaggtatccgaggccccgttgggcatgggaaaaaaagactaaacgcaggtatccgaggtcccgatggaccgagaaaggtttttttgtttttttttttttttttacaaaaagcaggtatccatggccccgatgggctaaggagaagaaaaaaagaataaaagcaggtatccacagcccagatgggcaagtttagaaaaaaaaataataagaaaaaaaaagaatgaaaaggcaggtaagtatccaaaaccccgttgggcatggaatggcggggaggacacacaggtatccgtggccccgatgggcaagaatatataaacaatgaaagaaaggtaagtccaccatacacacacaagtatcaaccaaaaggcacaacaaagaaatattccttaaaaatgaaaaattgactgaaaatattacaaatatcaaaaagtatggaggacatgtcaaaaaaaaaatcttaccagaacatatcaaaacgtcaaaaatctcgtggaattttgatatgttttcttaaataagccataaggcttggtggtaggggaactaaaaatgttcccccaaagctccttagatggagagaaaccacggaagaaccgcacatccacgggaaacgagcaaacatggctggagcaagccgttgcacgcctttaactgatccgcggcgctgaaggcggagagaccagaagaggagtggccacaaagattgcaattctgacatcttattggacctttaggtctaactatattataaaaaaattaaaatgaataaagatggaggtacgtaagctcagtgacatgacgcgtgaatttcattattttgcgcgataatgaaggattatcctattttacagctaaaaacgtttatgtagaacttccacataaacattaaataatgtacattaggtcacacacctgtctatgcaaaatttcaatatatcttctacttggacaaaccatgtatcgctccgcgtcttggacactagaagttcttctgcattagttggcgacctcagatgaggagaggaaagggtagaaatgcctcacaaaatggctccttggttcctaaattatcagagtattagttgtgaccgatttggtgggcttacgctcatagttttgggtcattggcatcttagtctttctctgggaacctggtgactccataccttgggacaaaaacgcactgaagtacgttactcgctagcagtaatgaaaaataattcctaaatgccaaagcaaagcctgagggaataatagctcattggtatcttactcgccccagagacactgctaacttaaaagaactgtcaaattttgttaactgtcaaactatgaatatccacatgaaagagatcagacaccctgggtattagaaaatcaaaggatattgttgtctcgttgattcacgctgacaaataattcacagtctgttctaagttccctttaggcgtcccatgaataataaaggacacaaaattggtttgcttatggacgatcaaagtgccagcaattcactaatcttactattgaggtggttcaggtagggatggaaaaatatctgctacaaaataaactgtttcaacaaaagaaaaacaaattaacaagtaaataaatgatgcacacagactgaataaaccagcaggtggcagcatgaatctttccaaggcatctgaagccaaacttggagtgcaaaaggattcctatctgaattgagaagtaaaggttactttgtctaactttagttgacagagcgatcaggatcagagtaacaagcacaccaaaagcatcaccagtgagaagtcacataggacatattagggaaaaaagacccaaggaagggctcttcacagctaagagcacctggctccacgatggatatggctttgtataaacgagaacttctaaatgagctgtacaaagagaatttagaacttgcgaggtactggtcacagattatgcaagccagtgtatcatttttgtggggatgctagagagaatcatcaaattaaagagttaaatttagtctctgtgttttacttagtcccaattcttgcaaacctcatcattctttctcacaccgtgtacatcaaggtatgtcaggtttcggggacactttttagtcttatcacaagaaagcatgaagggatatgtgctaaaactcagttcctgggctggagagatagctcagtggttaggagtgctgactgctcttccagagggcctgagttcaattctcaacaacttcgtagtggctcacagtcatctgtagtgggatccgatatctaacctcttctgatgtatctgaacagtgaccgacagtgtactcacattaaataaatatttttctaaaaaacacctccattcctgtacacttaactaggtaatttattgcatattctttgtttgtttgtttgttttgtttttcaaggcaggttttctctgtatagccccagatgtcctggaactcactctgtagaccaggctggcctcgaagttagaaatccacctgcctccacctcccaagtgctgggattaaaggtgtgtgccaccactgcctgcctcattgcatattcttaacattaagattaaaaatgcacctggggtaaaatagtaatcttgaggaattctccatgcaaattcaaagaggagaagaaggaagaacaagatgatgatgataatgggtcaagaaacaaggacccactacaaagcagcaagaaacagaaatgggagttaagaaatggtcttccaatgtgcagagagtaagagactttagaacacttggtcctagatgagatgtcttcatcaagccctttctttcaatgctcaggcatctatgaagataaggagtcagaaagactgcagtaaatgactccaagaaaacaccatccagacaaaacagcgcagttttcgttttgtttttaagaaaatgaatatggatttggatgagtggggaagagttggaggaaggaaaaatgatcaaaataaatcatgaaaaatggtttgtttttttaaaggaagggatgttcaatgacactactggctctgtgaacagagagaaagttggagccacaactataggtagatcaggcatccagtctctccaggaaatctatatttttttcaattctaacgtatattgggagaggggttgatctggtataaaatggttgaagaaacactcccaagttcatgaatcaacataatattgtctaagttgcatcaaaaacccatctatggatttagcgctatactcagcaaaattctaatgacattcacataaatagtttttaaaaataggtgacatggtaagtagcttatgcctgtgaatcccagcccttgggagttacaaggatgatcagaaatagccacatagagaattggagaccagattgagctacatgacaaagcttcaaatgaatgaacaggttgcaccacagcgtcaacatgctactgctcataggtaggcttgtaaattagtgggatagaatagaggacctggagacagccatccactactcaacaaaggtacaaacaccacatgtaagagacatacagtcacttggccaagtgatccttagcatagtggtactatctcaccctatacagaaatcaatctaccaaagatcatgtaagaacaatgactcctacagcctcagacattttatcactaagccatcaggagcggggaggaggtggcactactttagaagaattaggaaggacataagtcactagggagtgggctttgaggtttcagaagcccaagccagggccggtggttggctttcttcctactacctgtggaaccagatgtcaaactccagtactatgtcttcttgaatgctgacatgctccctaccatgaagacaatagactttaaccctagaaaatattagaaagcccctttacaatgctatctcttaaagtgtggtcaaccaggtggacgtggtgcatgtctttagtccccagacctaagaagtgatcaattatggtgcttaagactgctcttagattactcttgagatgcttaatattccagatgaccaaagttcaagatttacactcacactagacaaatctttactgcctgtaatttcagtgctaagggatctaaagatcaggctttcatgtgcaacttcacagactttatataagataacaaaaaacaatctccagcacctcataaaacaggcataccaacttataagttatagtaatagaaagtgaagagtccccagctccaagtcccggaaaaatatcaacaaaatcagaagaaaattttcccaacctaaagagatgccaccctttcccctggctggcagcatggaggctgaacgatgcctgaagtcactgtaaaagatgttaaccatcaggttcgtcagagcgctggcagccttcctcaaaaagtccaggaagctgaaagttcgggaatgggtggacacagtcaagttagccaaacataaagagcttgccccatatgatgagaactggttctacccacgagctgcttccacaactccggacctgtacctctgtacacaactgtagtgcaggagttggttccgtgaccaagatctatgaaggatggcagaggaacggtgttaggcccagccacttcagcagaggctctgagagtatggcttgccaggtcctccaagccctgaaagggctgaaaatggtggaaaagggccgagatgggggccgcaagctaacacctcagggacaggaaacacatctggacaggatcgctgaacaggtggcagctgccaacaagaagcattagaaaaaataatactgggttaataaattgcctcattcataaaaaagaaaagaataaagaaagagaagcctataaacatacaagaagcttatagagtaccaattatacccaaaaaaaaaaaaaaaaaaaaaaaaaaaaccaaacaaaacaaaaaacaaaaccctcctggcatgtaataatcaaatgtaaatacaaataataatgttttggagaagatgtaatgatccattccattaatacgagcacttgggaagcagagccatggtggatgggtctcagaggagtgtgaacttaatgtgggcctctgctgtagcagcaagtgttcttagctgctaagccatctctgtggcttcttttattccaaggactgtttaagctgacctggaattcactatgtagaccaaactagccttgaacttatggtgaacttcctgcctacaaagtgttgtgcttacaagcatgtgctaccggtcacagatataagtgataagtataagtgttttattatatataaataagtaaataaatacatagattctatatctgttcttccacttgccacatcagtttttcccctctcagctcatactccggattacatactccggtgttatagtcttggcacaggagcaggcaatgcaagttgatggtcacaattatgcaacctgaggaatcctcagaaccgcagagttctctctagttatatattgttgtgattcttgatttatattacagaaaacttaagaatgcttattgaataagatgaaggaaagatatgagtgggtattgggaggggcatggactgaagtccagcagtagtagctatatacctgatttgtttttttttaagtttctgttatttaaaggaagtattttataaccaaggttgagagagcaaagaaaacatttgttcatcttcccactctacccttgccttttccatttttgtgtgtatatgcattttgtccatagatgtggatacacatgtatataggttcatatgtatatgtgtgtgaatatataggcctaagtttaatgtcttcaatcatttttctaccttgtttactgaggcaagatcttagccaaaccgagagctcactgatatggcacgtcttgttaggcaacttgctctggggatccctgtttgagcctttcatagctgcaattataggagggcttcacatgggttcacgccttggggacttgaactctggtcctcatgcttttatggcaaatacttaacctctgagccatctctttagatccccattacatcattgaaaagtattgagtttttaaggtttatttctgactttagttatgtatatggtctgtgtgtgccctcaaagaccagaagagagcagcaaagcccctggagcggaagttataggtggttgtcaactgcctgatagtgctgagaatcaaacttggattttctgaaagagtagcaaatgtttgtaagcatcgaggtatgtctctagtcccaggtttgtttgtttgttttatttaaatgacgttactgagggtactggtgaggttgcaatatgaataaaagagatgtgattaagataaacccatggaatgtgagcagtggaggtgcacacctttaatcccagcacttgggagttagaggcagatggatctctgagtttgagaccagcatagtctaccgaggcagttccagtatagccaaggccacagagaaaccctgccttgaaaacaaacacaaacaaacagaaagagtagataataatacatttggggggctggagagatggctcaacagttaagaggattcgctgcttttccagacgatccaggttcagttttctttaaagaataggccactggcagtttgacctcacgagctaataatgttttatataacatggagtaacttagagtagcataacctgatgacaaaggtggtcaagtggtaagagccatagaagggttcaacgaccctgcccctatcgctggagtattgagatttaaactaaaaataggagagacatttcaatagagaacaaggagtacccataataagtaattttcgcttttttcccctgccgccaccaatttgcgcggaggcagaagctcaggtgcgttcaagattcggcgtcacccataatccaccgccatggccgaggaaggcatagctgctggaggtgtaatggacgtcaacactgctctacaagaggtgctcaagaccgccctcatccaggatggcctagcacgtggcatactcgaagctgccaaagccttagttagacaagcgccaagcccatctctgtgtgctcgcatccaactgtgatgagcccatgtatgtcaagctggtggaggcactttgtgctgagcaccaaatcaacctgataaaggttgatgacaacaagaaactaggggaatgggtaggcctctgtagaatcgatcgagaggggaaaccacggaaggtggtcggttgctgttgcgtagtggttaaggactatggcaaagaatcttaggccaaggatgatatcgaggaatactccaaattcaataaataaataaattgtagctcattatgaaaaaaaagtaattttcttcgaggtgtagcctgactaattattgtgtcttgtggtactgcaagatagcccagagaaaccctcatcttgactggccatggtagcacatgcctataatcccagcagaagaattgctttgagcttgagaccatactatgtcttgagagagttcttgtttttttaaagggtggctcatgtttgaagcataagctgattacttttgccttgcatcatggataactgccctcatatggaagaaggtctgtcctgggaggttttgctcttggagttcaacatgactaaggatgaatgaaataatttaggaagacactccttctgttattaatatgcctatgcacagtcaagcaggagtttgaaatgaacggaaagacagactcaaaatgaaggcagagactcaagtctttaatcctgtggttggttaccttgtgaagccaagtaggccatcaatacctttagcaaaagcactttctgaaaacctgttctaacaggacataaatttctaacaacagtgcaacttaaattgtaagaaaacacaggactgtttcaaagactgatagcatgttgtttcctatgtttcatatacagcctcatggtttgctttggctttgctctccacccctctttcacgtggtctcatgtaattcaggctgatctggaacttactgtgttgctgaagatgagctgaactcctgatgctccttcctaactctctcaaattctggaattttaggcaagcaccactttgctcagcttttctttgattttcatttagaatattaaagaatagttttatttaatcccaccattcagtaggcagagtcaggaggatttctgattcccagtctggtctacagagcaagcttcaggacagccagggctacacagagaaactctatcttgagataccaataaagaaagaaagaaaaacatttttcttggggctggcaatatggctcagtggtagagcaatggcttagcatgtaattagaaaatcatggattcagtccttagtaacacacacacacacacacacacacacacacacacacacacacacacacgggctgagtcttgactgcaagatggctcagctgataaggagcttacctcaaagcctggcagacaccctgagctccatccttggaaactatgtggtggacacatccatatattctctctctctctctctctctctctctctctctctctctctctctctctctcccttcttctaccccgccttggtctttctcaaacacaaaaataaataaatgtaaaatattgtaagaagttataggtcatttatataaagaaaattaaaggaaattaaggaaatacttttagatgagaatagagtataaggtttttatcctaaaactaaaagattgttcccatatggacaaaaaggggtgatgagggaaaaaaccagaaagttttagtctattgccaaaggcctgagtatgtcacaagaagtttgtagaagataaagtgaggcccggggaaggaaggagaattgggaatttacagtcattctctgctacgtaataagtcgaggccagcctggaataacgggggccctgtctcaaaaacagaagagcaacaacgatatgcatgcctgaaaagccaaatctttaaaaattagctagagtcacactttcctaggtacttctttcaacagttttgccacagacattagaatgaagttggaaatgcagacagttgggctcccagataccctgaatcaacttttatatttgacttttgttttttttaagtttataaaaacttttttttttttagaatttttatgtgtgtgagtgttttgcctgcatataggtctgtgtaccacactcgagcatggtgtcagaggaggtgagaagcctcatgcagctgctaggcattgaaccccagtcctttgtgagaatattaagtactcttacacaccaagccaactctccagccctgcttttggggtgttcaacaacaaagataagtagaaaccaaatacgcacccagagaaaaatcacatatatacaaaaagccagaaatttgagaggcaatgtgtgtgtgtgtgtgtgtgtgtgtgtgtgtgtgtagtggcgaggaataacataggaggaattggagaagggaatgggggagaatatgtaattatatttagattaattttattttttagtatagaatagagtttattcagggcatggggaggggagttaagagggtagcagaggcagggaaaggcagagagagagaaagagagagtagagaactagaggctggccatgagcacatggagagagggggaagggaatctagattaaaaatttaaatggggggggcaataaagtggttatagtcacaggagcatatcaaattgattgtcttggccatgggtgtgtgtgtgtgtgtgtgtgtgtgtgtgtaataattttcacaaacttgccatctcagagaaactctaggaggaagaaaggattccaaacaggcaaattctggctacagctgaggagagctcgcacaggaaagaactgcctgtaatggaatgaaaagaagccagggctttgctgtcttgggaaagagggaaaccagtgtaagggaaaatgtgctaccttctggagagaggacagccctcggctccatgacagctgtcccaggttgccttagcaaagccttcctcaagcagatattcactgaggccccttcggcaactttccaacatggttttacttaaatacacacacacacatgcatttacttcgtgtgtgtgtgtgtgtgtgtgtgtgtgtgtgtgtgtgtgtatacatgtttgcctgtgtagagagatctgtgtagagagaagtatgtgccggggactgaacctgcatcctttgctagagcattaagcactgttaaccactgagcactcgcttctgcccctgtgcctcgtggtgcaataggtaaaatgagaacttttttctttcttttttaaatggaagtgtagttctctgcctttattgataacccaagatccttttctaatttgtgtggtaaccagtattggtgtgaacatccaaaagccaaaggagttattgtcagcttcggccctgtgaggtgtccaataggaataggacaaggtataattctgtctttatcaaaaactaggggacatacccaggcctgtggtttactttgccacctagcctctgtgacatgtagattgcagttatagcagctacagcaatgctggcagctaaaaacacagaaggggctccgaaagagatctcgggagcaaaacacaagctggtcttctatagaaacaaaaaagaaaaaggaatttcggtgggggtagggggggggtggggggtggggggtggggggtgagggggtggcaagagaacaaattaaagacgggcaagaaacgcgggagcacgtgaaagatgctaacagaggcagccgggagaggaaccgcaagcgctcagtcatctgcggaagcgaccgcggacagtcccggtcacgttgctggagcagccatttagggacagcctgacagcgcggcgccgcgcggcacagggactgttcggctgtgacgcatgctctccgcccgcccgacccccccccccccccacggcaccaccaggcttctgtaacttataaaatggcggcgtccacatgtatacgtccttcccgggattagccaggcagctagaggatgacttaataaggagagtggagaaactggccaattaatgaacatgccctggtgagtgccgggtctcgcgctgtcagagagatggccgccgtagcggtcaccacgccgacccgccgcagcggtcaccactccgaccgcatggtctgccgagcgggacgagtagtcggcggctggcactccggatttctcccctattccgcccacaatagatgagtgatcagtgcccacatcaccggacctccacggatgaacctgtcaggctggggaggctcattcctaggagagatcgtgttttgaggtttccttttgttttcctttgtctaattggggtttgacggatagtgagtgtctccaaaatggagtgtttattctagctccccagaggcctcgaaaaacggcctcagttctttctcatcaacacttagtagttgataaaactagcttattggtaacattaattatggtataataacgctttttgccctatgccctttttatgtactccaaatgaggaccagagtatgttactaaatttgtggtctgggagcatctgttataatagggccttatagggtgatctgtgttcttttgttagatgcttacttggtcaaaaagacatttcagtaccttagctaggcattgctgaataaagtatgaattgttgcaaccatttggaagcattgatgtagctatatttagaaaaataaaaatatatatggagtaccaagttccaatatctggaactcagtagtctgactttcacggctcaatccttcagaaagagaagcatcagtatataaataaggatacctaaaagaggatgtctatgcagctcttttcttgtggcaagtgataagaaacaacctgtgtatccattaataggaggatgttttaaaagtctgtatattttggctctttggtgtaaaagatgatatgatagcttgttacattaaaaacaagttgtaggataatatgatctcatttttttcatatatgtatgagggtgacaaaggaatgtttgctatttttaaaacatttcggcagctttatatattatgacctatttaacacaaatgcaaacacagagaataaaatgaaaccctaatattagagttgacgttttgccatatttctccacagttgcggctcactcttttgtcatcccgtagattaagcatcatttttagtttagtaattgtgcttatttccccctttccccccagtattggttgtggaacctaggacactgtggtgctagacagtcacactaccactgaactatatctagatctgttcccactttaagatttgcttctaattgtgtgtgtaggaatgtgcacatgagtacagttatggaagccagaagaagccatagaatcctgtggaactcgagttacaggcggtcgtaagcccactttttgagccccttaatgaagtcttctgtagttgaggctgtccacgaccctcactacccatttctagctgccaagctttgggattacaagcttgtaccaccatgcccagcttgtctctcttactttatgtgtaataacccaggctggtcttgatttttctgcctctgcc

SEQ ID NO: 115 - DNA, 20 bp, Homo sapiens
gggggcaccgggtgcccgca

SEQ ID NO: 116 - DNA, 44 bp, Homo sapiens
gtcgtgtgctttggactcatcgacatgattcggcggcggctgga

SEQ ID NO: 117 - DNA, 45 bp, Homo sapiens
ggtaaacacctttaagtttcacttgtcaggatttttaggtctcaa

SEQ ID NO: 118 - DNA, 40 bp, Homo sapiens
tgctttctccttagctgttttagtctcctctgcgcgccag

SEQ ID NO: 119 - DNA, 25 bp, Homo sapiens
agagaatgtctgagctgaaaggggg

SEQ ID NO: 120 - DNA, 42 bp, Homo sapiens
aaatacaaagttttcaaaacagtatattttattttacaatag

SEQ ID NO: 121 - DNA, 27 bp, Homo sapiens
tatttttcaatcttccaaacagcaaag

SEQ ID NO: 122 - DNA, 47 bp, Homo sapiens
attccccatccccagctgaagaaaggggtgttactgagtccagctga

SEQ ID NO: 123 - DNA, 63 bp, Homo sapiens
acatccataagtggagaaggaaatagataaatgtcaaagtatgattggtggagggagcaaggt

SEQ ID NO: 124 - DNA, 115 bp, Homo sapiens
taaagcaaactagtgaggacaaaggattttgtcctcatctcaacaatgatcagctattggaactgcatgaaactgaacaatttaaacctggagctggtaatgttcttaagaccaa

SEQ ID NO: 125 - DNA, 46 bp, Homo sapiens
ttttccgtttttaaatcactcacagagggtgggacaggaggaagag

SEQ ID NO: 126 - DNA, 50 bp, Homo sapiens
aagttttaagaataaaataaaaattggaaataattggccaaaattgaaag

SEQ ID NO: 127 - DNA, 37 bp, Homo sapiens
tcagcatgtaaaaagtaaagaactgaaaatagacaaa

SEQ ID NO: 128 - DNA, 41 bp, Homo sapiens
agtgtaggtggttccccaaggctggtaccaatgagactggg

SEQ ID NO: 129 - DNA, 50 bp, Homo sapiens
ttcctagtccatccctcatgaaaaatgactgaccactgctgggcagcagg

SEQ ID NO: 130 - DNA, 37 bp, Homo sapiens
tagggactaagccatgcccctaacaagaaaacaagcc

SEQ ID NO: 131 - DNA, 50 bp, Homo sapiens
gtacttggtataaggtttttggccccagagacatgggaaaaaaatgcatg

SEQ ID NO: 132 - DNA, 44 bp, Homo sapiens
aataaaaagccctctcttattcccactctacaacgcatgtcaaa

SEQ ID NO: 133 - DNA, 48 bp, Homo sapiens
gatatgttcgatactaaggaaaaactaaacagatcacctttgacatgc

SEQ ID NO: 134 - DNA, 53 bp, Homo sapiens
ttccttagtatcgaacatatcacagctactcaatgaagtttcttctcaactaa

SEQ ID NO: 135 - DNA, 44 bp, Homo sapiens
accttgttttttgcaaaaattttccatctcctcaatcaggccag

SEQ ID NO: 136 - DNA, 42 bp, Homo sapiens
tattgtctctacaaaattctcattgtatagttaaaccacagt

SEQ ID NO: 137 - DNA, 38 bp, Homo sapiens
caaattggcctcaaatatacatataatttattcattta

SEQ ID NO: 138 - DNA, 40 bp, Homo sapiens
tgctaggcactaaaaatgcaatgattattgatatctaggt

SEQ ID NO: 139 - DNA, 131 bp, Homo sapiens
tggccactactatgagcagggagttcaggctgtccccttgggacctcgctttgtcccaggcacagtcaccctttccataaccatcactagaaatcccaaaccccagaatcctgctcacctaagctcaaaga

SEQ ID NO: 140 - DNA, 46 bp, Homo sapiens
ttttttttccccaacaacctgaccattttatcttctcagtctaggg

SEQ ID NO: 141 - DNA, 45 bp, Homo sapiens
agattagatactgactggattttggtgtctctctcaagtggagaa

SEQ ID NO: 142 - DNA, 36 bp, Homo sapiens
tcttttgagatgtactttttgatgttgccggttacc

SEQ ID NO: 143 - DNA, 59 bp, Homo sapiens
aacgtcggctatcagagcaagcattgtggagcggttccttatgccaggctgccatgtga

SEQ ID NO: 144 - DNA, 36 bp, Homo sapiens
atgtgggcaagtgtacgtgtgtgtgtgtcatgtgtg

SEQ ID NO: 145 - DNA, 90 bp, Homo sapiens
atgcaaagaaatatttaaggagagattacatgaaatcaaagagagggagatagattcatgaagaggctgaaatactcaaaggtgagtaga

SEQ ID NO: 146 - DNA, 71 bp, Homo sapiens
aagcagagaacaaatacaagccaacagagattaatactgaaatagaaaatcacaaacagcaagagatgctg

SEQ ID NO: 147 - DNA, 173 bp, Homo sapiens
ggagagagagaatagcccaagagaggcagaaaggaaatgcagaaatgagaaatgtgagataaaaagtagaaacagcagaaaggaggccagactcagaaaaaaggtgaaatttaaaacgaacgagaaggggaaggggtaacaaataatcacagttcacaaagagaaaagagagg

SEQ ID NO: 148 - DNA, 90 bp, Homo sapiens
cacacagcatgtgacccaaaaaggagacatgaaataaagcgtgaaagaagagccacatctaggagagcaaagagaaatagcaacaaaatg

SEQ ID NO: 149 - DNA, 97 bp, Homo sapiens
atgggtaagacacactttagatagagaacaaagagcaaagacaagaaagaaagagacaaagaaatacacacttgagtgcaagagataagcaaaggca

SEQ ID NO: 150 - DNA, 52 bp, Homo sapiens
gtatttctttgtctctttctttcttgtctttgctctttgttctctatctaaa

SEQ ID NO: 151 - DNA, 88 bp, Homo sapiens
gacattcagaggaagtaagtagtagaagaggcaagatacagtgaggggcacaagaggcatgaaaagcatcacagaaagataaaaaaaa

SEQ ID NO: 152 - DNA, 49 bp, Homo sapiens
ttttttttatctttctgtgatgcttttcatgcctcttgtgcccctcact

SEQ ID NO: 153 - DNA, 95 bp, Homo sapiens
gcagtgcctggcacatgtcaagtaaaaggtaacccaagaagactcataagttcatttcccacaatataagtgaccactagcactatcaggtagca

SEQ ID NO: 154 - DNA, 64 bp, Homo sapiens
agtctctagacttctctgtttgtgagggttaaatgaaatcatgtatgtaaagtgctcacctatt

SEQ ID NO: 155 - DNA, 155 bp, Homo sapiens
taaaacaccatttctgctttctgctgaaagggtaaccctttctcatctccgtttgtgagagactctgtcgtcagttaagattagtgtaaaaagaaaactaaactctgaagtagccattataaaagtgtgagaatgaagtcagttttctaaagagt

SEQ ID NO: 156 - DNA, 40 bp, Homo sapiens
agtgccaggcatgttgatcttcaggtgggaaggctgactt

SEQ ID NO: 157 - DNA, 41 bp, Homo sapiens
tcctgcctgatgacagataactttgtgccatttttagtcag

SEQ ID NO: 158 - DNA, 47 bp, Homo sapiens
gctgattgatggaagccgcataaatacaaatggaaacctgactaaaa

SEQ ID NO: 159 - DNA, 46 bp, Homo sapiens
ttgacgtgtggtggttgtttttgagactttatcttcctatctggga

SEQ ID NO: 160 - DNA, 48 bp, Homo sapiens
caaccctaggtcaggaggttctgtcaagatactttcctggtcccagat

SEQ ID NO: 161 - DNA, 53 bp, Homo sapiens
gcttgttgttttacagtgttagtgatccattccctttgacgatccctaggtgg

SEQ ID NO: 162 - DNA, 66 bp, Homo sapiens
gatcactaacactgtaaaacaacaagcctattcttctgaggaagatctgaaaagagataaaagaaa

SEQ ID NO: 163 - DNA, 55 bp, Homo sapiens
aagtattgaaatgcagtacactgggaaagtctgttctaatgggcaactagtggtt

SEQ ID NO: 164 - DNA, 23 bp, Homo sapiens
tattcattccagctctattctgt

SEQ ID NO: 165 - DNA, 364 bp, Homo sapiens
agctggccaggcgtggtggctcacgcctgtaatcccagcagtttgggaggtcgaggcgggtgaatcacctgaggtcaggagtttgagaccagcctgaccaacatggagaaaccccgtctctactaaaaatacaaaattagcctggcgtggtcgcgcatgcctgtaatctcagctactcgagaggctgaggcaggagaataacttgaacccaggagacagaggttgcagtgagctgagattgcgccattgcactccagcctgggcaacaagagcgaaactgcgaaaaaaaaaaaatacacgccacaaaaacagttaagcaaatctatgcagaaggaaaaacaaggtacagaaaaccagggattca

SEQ ID NO: 166 - DNA, 4020 bp, Homo sapiens
gtcatcagcatgtaagctaattatctcgggcaagatgtaggcttctattgtcttgttgctttagcgcttacgccccgcctctggtggctgcctaaaacctggcgccgggctaaaacaaacgcgaggcagcccccgagcctccactcaagccaattaaggaggactcggtccactccgttacgtgtacatccaacaagatcggcgttaaggtaacaccagaatatttggcaaagggagaaaaaaaaagcagcgaggcttcgccttccccctctcccttttttttcctcctcttccttcctcctccagccgccgccgaatcatgtcgatgagtccaaagcacacgactccgttctcagtgtctgacatcttgagtcccctggaggaaagctacaagaaagtgggcatggagggcggcggcctcggggctccgctggcggcgtacaggcagggccaggcggcaccgccaacagcggccatgcagcagcacgccgtggggcaccacggcgccgtcaccgccgcctaccacatgacggcggcgggggtgccccagctctcgcactccgccgtggggggctactgcaacggcaacctgggcaacatgagcgagctgccgccgtaccaggacaccatgaggaacagcgcctctggccccggatggtacggcgccaacccagacccgcgcttccccgccagtaagtgaggccgccccactgcggggccgcgggctgagctcaggaggtgcggcgagagccgtccagaaggcgcggcgccggcaggctgcgcgctgggcatcagggagggcggcccggcagcggcgccagggacttgggtgcgggagctggggatgcttccccctgctcggctgggggtccaagaacaggcacttggtagcgctggggtcctgcggtcagatgcgggtactcggcgtctcctaggcgcggtggactggcagctctgctcggcgcagaagacctcggggagccaagggaagcgaccccgagctcaaggagcaggggcgagcagagcgcggagaggctagaccgggccaggagggaggctgccctgttgggaggcactcgagcgcccggcccggccctctctccagcggagtctgggcaggtgggaggactcgcagttccagaggggactctaagggtccgagcaggtgccctcactggggcctgacaggagagaagccaagaggcaaagcgtctgggggctccagcttttggaagtcaacaccccctctcctaacctctccaaactggggtctaccgtaggaccccagctcccggcctgagcccagttcgccgcctgtggccagctaatcctaatgctctgacccgggctgggcacgaaaggagcagaagcggcctttcccccactgcgtcttttggttcgaaagagggaactgagactgagggagggcagccagggttggggctgtgagcgctccagtacagccccctcgacggtacggcctggggcaggcgctggcagttccccgcggatgggcctcttgggccccagcgctaggctgcctgggtcaggagggcgccgtcggttggggcgggccgggcgggccaatggcgcggaaaacaggggtggcctggctcggcctggccccggccgacgctgtgcgtttgtcgcttacagtctcccgcttcatgggcccggcgagcggcatgaacatgagcggcatgggcggcctgggctcgctgggggacgtgagcaagaacatggccccgctgccaagcgcgccgcgcaggaagcgccgggtgctcttctcgcaggcgcaggtgtacgagctggagcgacgcttcaagcaacagaagtacctgtcggcgccggagcgcgagcacctggccagcatgatccacctgacgcccacgcaggtcaagatctggttccagaaccaccgctacaaaatgaagcgccaggccaaggacaaggcggcgcagcagcaactgcagcaggacagcggcggcggcgggggcggcgggggcaccgggtgcccgcagcagcaacaggctcagcagcagtcgccgcgacgcgtggcggtgccggtcctggtgaaagacggcaaaccgtgccaggcgggtgcccccgcgccgggcgccgccagcctacaaggccacgcgcagcagcaggcgcagcaccaggcgcaggccgcgcaggcggcggcagcggccatctccgtgggcagcggtggcgccggccttggcgcacacccgggccaccagccaggcagcgcaggccagtctccggacctggcgcaccacgccgccagccccgcggcgctgcagggccaggtatccagcctgtcccacctgaactcctcgggctcggactacggcaccatgtcctgctccaccttgctatacggtcggacctggtgagaggacgccgggccggccctagcccagcgctctgcctcaccgcttccctcctgcccgccacacagaccaccatccaccgctgctccacgcgcttcgacttttcttaacaacctggccgcgtttagaccaaggaacaaaaaaaccacaaaggccaaactgctggacgtctttctttttttccccccctaaaatttgtgggtttttttttttaaaaaaagaaaatgaaaaacaaccaagcgcatccaatctcaaggaatctttaagcagagaagggcataaaacagctttggggtgtctttttttggtgattcaaatgggttttccacgctagggcggggcacagattggagagggctctgtgctgacatggctctggactctaaagaccaaacttcactctgggcacactctgccagcaaagaggactcgcttgtaaataccaggatttttttttttttttgaagggaggacgggagctggggagaggaaagagtcttcaacataacccacttgtcactgacacaaaggaagtgccccctccccggcaccctctggccgcctaggctcagcggcgaccgccctccgcgaaaatagtttgtttaatgtgaacttgtagctgtaaaacgctgtcaaaagttggactaaatgcctagtttttagtaatctgtacattttgttgtaaaaagaaaaaccactcccagtccccagcccttcacattttttatgggcattgacaaatctgtgtatattatttggcagtttggtatttgcggcgtcagtctttttctgttgtaacttatgtagatatttggcttaaatatagttcctaagaagcttctaataaattatacaaattaaaaagattctttttctgattaaaaccctcctttttgttttgttttgatttggctttaaatggctttgaggggcgggggcttgggaggatcttgtctttggtctgatgagattcaaattgtttgggtttgagctcaaaggattctgaaccggttaaggaggtaaggaggccaggcccagagtccttgccccacaggaagagggagttttgttctgcctcagaaattgtgtggaaacaaatcttgagcagtcctgagactgcagtggaggaccgaaataccaaactacttccaccaagagggagagggagagaggaagagaaagagaccaaataattcattttctgagtcagacttctgttgataggagtctcagaactgtctactgtggtctcacaaagctgagccaaagttttaaaacagtgagagaggacacccattttaaatcagtctgagtgagttatggttttcagtgaatggatcacctctgtagatttgaacatcaaacctttatttctaatcagtggctgagctccttcacagaattcgatgggaggctgttttcgaaagtaaggaagtcattcaggggttttgtttctgtcctaaaacagggacccctctaggggaccagcagcagacgccttcagcccctgctgcttttggctcctttggcctccaacggggtaacactgggtgacaggcctgaggacatcccaggaaggactttgggagctgagatttcactctttgttgtactgggttttatc

SEQ ID NO: 167 - DNA, 4044 bp, Homo sapiens
gcccgaggagttcaggtgggacaggctggatacctggccctgcagcgccgcggggctggcggcgtggtgcgccaggtccggagactggcctgcgctgcctggctggtggcccgggtgtgcgccaaggccggcgccaccgctgcccacggagatggccgctgccgccgcctgcgcggcctgcgcctggtgctgcgcctgctgctgcgcgtggccttgtaggctggcggcgcccggcgcgggggcacccgcctggcacggtttgccgtctttcaccaggaccggcaccgccacgcgtcgcggcgactgctgctgagcctgttgctgctgcgggcacccggtgcccccgccgcccccgccgccgccgctgtcctgctgcagttgctgctgcgccgccttgtccttggcctggcgcttcattttgtagcggtggttctggaaccagatcttgacctgcgtgggcgtcaggtggatcatgctggccaggtgctcgcgctccggcgccgacaggtacttctgttgcttgaagcgtcgctccagctcgtacacctgcgcctgcgagaagagcacccggcgcttcctgcgcggcgcgcttggcagcggggccatgttcttgctcacgtcccccagcgagcccaggccgcccatgccgctcatgttcatgccgctcgccgggcccatgaagcgggagactgtaagcgacaaacgcacagcgtcggccggggccaggccgagccaggccacccctgttttccgcgccattggcccgcccggcccgccccaaccgacggcgccctcctgacccaggcagcctagcgctggggcccaagaggcccatccgcggggaactgccagcgcctgccccaggccgtaccgtcgagggggctgtactggagcgctcacagccccaaccctggctgccctccctcagtctcagttccctctttcgaaccaaaagacgcagtgggggaaaggccgcttctgctcctttcgtgcccagcccgggtcagagcattaggattagctggccacaggcggcgaactgggctcaggccgggagctggggtcctacggtagaccccagtttggagaggttaggagagggggtgttgacttccaaaagctggagcccccagacgctttgcctcttggcttctctcctgtcaggccccagtgagggcacctgctcggacccttagagtcccctctggaactgcgagtcctcccacctgcccagactccgctggagagagggccgggccgggcgctcgagtgcctcccaacagggcagcctccctcctggcccggtctagcctctccgcgctctgctcgcccctgctccttgagctcggggtcgcttcccttggctccccgaggtcttctgcgccgagcagagctgccagtccaccgcgcctaggagacgccgagtacccgcatctgaccgcaggaccccagcgctaccaagtgcctgttcttggacccccagccgagcagggggaagcatccccagctcccgcacccaagtccctggcgccgctgccgggccgccctccctgatgcccagcgcgcagcctgccggcgccgcgccttctggacggctctcgccgcacctcctgagctcagcccgcggccccgcagtggggcggcctcacttactggcggggaagcgcgggtctgggttggcgccgtaccatccggggccagaggcgctgttcctcatggtgtcctggtacggcggcagctcgctcatgttgcccaggttgccgttgcagtagccccccacggcggagtgcgagagctggggcacccccgccgccgtcatgtggtaggcggcggtgacggcgccgtggtgccccacggcgtgctgctgcatggccgctgttggcggtgccgcctggccctgcctgtacgccgccagcggagccccgaggccgccgccctccatgcccactttcttgtagctttcctccaggggactcaagatgtcagacactgagaacggagtcgtgtgctttggactcatcgacatgattcggcggcggctggaggaggaaggaagaggaggaaaaaaaagggagagggggaaggcgaagcctcgctgctttttttttctccctttgccaaatattctggtgttaccttaacgccgatcttgttggatgtacacgtaacggagtggaccgagtcctccttaattggcttgagtggaggctcgggggctgcctcgcgtttgttttagcccggcgccaggttttaggcagccaccagaggcggggcgtaagcgctaaagcaacaagacaatagaagcctacatcttgcccgagataattagcttacatgctgatgacaaggtaaacacctttaagtttcacttgtcaggatttttaggtctcaaagagagagagagagaggcagagacgagacccaaagcatttcccccctcccttggacacccccacccccattttttgtggggtaccagcggagcgcggggaggaggtggaggggaggggaaggaggagggaaccgagagcggggagggcaggaggtggggtgggggagtaacagaggaggagagatggttgagaggaaggaaggtgaatgctgctttgcaaccaacttgcggagttacaaagtggaaccactttccaattcggtcggggttccccgggcacggacaggtctttaggaggagggggctgagggacagggtgggggtttcacctgagcctgccggggctgctcctccctcccgccgcggcctcccagccccgcgccttcccactgcctccggaccacatcgggcttcgctgcgctgagccccagtcgccaacaaatgagcgagcgagtctggggacgaaccctggggccgcactgttggtctacgtgtctgtcagtctgtctgcctctcttctgccgccgtcagagggacacctctgctccccgccccctttccccctaccggagagaatccgagcgggcggagggggcgctgagtaggggatcgactgcctcccggaggctgtcccggatccccgagccacaacccgcccccgcagctcaggggtttttcagtgggccacccccgctaacacgcctcccccaaggtcttccccccccccccccacccccggccgagcaaacacagcactggcccccagagctgggaggatgggaaggggtctcacgggagggtccgtcactgaagttgccccacctcgaacaaacctggtgtccctgaccctcgcccatctcccagacacgcggggatctggggctggagctgactttccgaggacatcacagccccagcacccgagcccagagccacgctgttttcccctctgatgcttcagggagcgcgcgagcagggagcggcgtgagtgcccgtctgtctgttgccgggcggaactgagcctgaaccccggcggctggagcgctggccaggagggggcgaatgccgaggtgcgggcagctcagcgggcgggaggctgggccgaggctcgcctccgcccgcagctcagccatgcaaaagtgctcttgcttcccgggaataaccaaatatctttgtttaaagtggtggcgtaaatggccagtcgctttgtggccacgctggatattagtagatgaggatcattctgcttcaattgggcgcctctcatccgacgagcaagaaactgcttaggaggaagagggtttcctgtctgcgcgttcccaggcttcaagtgtgggccccgcgccttgagggtccttgggcgcctggcgagggggagctgtgggctgcgctccccagcggaatcgggggtgtcccccgcgttgctccggccaggccggggcctgcagccgagtcgactaccgagtggagcactgaacggcgcggattttgagaccgactccggtttttgtccttggattttaaacgtttttatcattgtttttgttttgctttctccttagctgttttagtctcctctgcgcgccaggggctgggagggcggagcgctccccggccggccccggcaggtgcctccaagacacccgcgctgg

SEQ ID NO: 168 - DNA, 4045 bp, Homo sapiens
cgcccccgccgccgccgctgtcctgctgcagttgctgctgcgccgccttgtccttggcctggcgcttcattttgtagcggtggttctggaaccagatcttgacctgcgtgggcgtcaggtggatcatgctggccaggtgctcgcgctccggcgccgacaggtacttctgttgcttgaagcgtcgctccagctcgtacacctgcgcctgcgagaagagcacccggcgcttcctgcgcggcgcgcttggcagcggggccatgttcttgctcacgtcccccagcgagcccaggccgcccatgccgctcatgttcatgccgctcgccgggcccatgaagcgggagactgtaagcgacaaacgcacagcgtcggccggggccaggccgagccaggccacccctgttttccgcgccattggcccgcccggcccgccccaaccgacggcgccctcctgacccaggcagcctagcgctggggcccaagaggcccatccgcggggaactgccagcgcctgccccaggccgtaccgtcgagggggctgtactggagcgctcacagccccaaccctggctgccctccctcagtctcagttccctctttcgaaccaaaagacgcagtgggggaaaggccgcttctgctcctttcgtgcccagcccgggtcagagcattaggattagctggccacaggcggcgaactgggctcaggccgggagctggggtcctacggtagaccccagtttggagaggttaggagagggggtgttgacttccaaaagctggagcccccagacgctttgcctcttggcttctctcctgtcaggccccagtgagggcacctgctcggacccttagagtcccctctggaactgcgagtcctcccacctgcccagactccgctggagagagggccgggccgggcgctcgagtgcctcccaacagggcagcctccctcctggcccggtctagcctctccgcgctctgctcgcccctgctccttgagctcggggtcgcttcccttggctccccgaggtcttctgcgccgagcagagctgccagtccaccgcgcctaggagacgccgagtacccgcatctgaccgcaggaccccagcgctaccaagtgcctgttcttggacccccagccgagcagggggaagcatccccagctcccgcacccaagtccctggcgccgctgccgggccgccctccctgatgcccagcgcgcagcctgccggcgccgcgccttctggacggctctcgccgcacctcctgagctcagcccgcggccccgcagtggggcggcctcacttactggcggggaagcgcgggtctgggttggcgccgtaccatccggggccagaggcgctgttcctcatggtgtcctggtacggcggcagctcgctcatgttgcccaggttgccgttgcagtagccccccacggcggagtgcgagagctggggcacccccgccgccgtcatgtggtaggcggcggtgacggcgccgtggtgccccacggcgtgctgctgcatggccgctgttggcggtgccgcctggccctgcctgtacgccgccagcggagccccgaggccgccgccctccatgcccactttcttgtagctttcctccaggggactcaagatgtcagacactgagaacggagtcgtgtgctttggactcatcgacatgattcggcggcggctggaggaggaaggaagaggaggaaaaaaaagggagagggggaaggcgaagcctcgctgctttttttttctccctttgccaaatattctggtgttaccttaacgccgatcttgttggatgtacacgtaacggagtggaccgagtcctccttaattggcttgagtggaggctcgggggctgcctcgcgtttgttttagcccggcgccaggttttaggcagccaccagaggcggggcgtaagcgctaaagcaacaagacaatagaagcctacatcttgcccgagataattagcttacatgctgatgacaaggtaaacacctttaagtttcacttgtcaggatttttaggtctcaaagagagagagagagaggcagagacgagacccaaagcatttcccccctcccttggacacccccacccccattttttgtggggtaccagcggagcgcggggaggaggtggaggggaggggaaggaggagggaaccgagagcggggagggcaggaggtggggtgggggagtaacagaggaggagagatggttgagaggaaggaaggtgaatgctgctttgcaaccaacttgcggagttacaaagtggaaccactttccaattcggtcggggttccccgggcacggacaggtctttaggaggagggggctgagggacagggtgggggtttcacctgagcctgccggggctgctcctccctcccgccgcggcctcccagccccgcgccttcccactgcctccggaccacatcgggcttcgctgcgctgagccccagtcgccaacaaatgagcgagcgagtctggggacgaaccctggggccgcactgttggtctacgtgtctgtcagtctgtctgcctctcttctgccgccgtcagagggacacctctgctccccgccccctttccccctaccggagagaatccgagcgggcggagggggcgctgagtaggggatcgactgcctcccggaggctgtcccggatccccgagccacaacccgcccccgcagctcaggggtttttcagtgggccacccccgctaacacgcctcccccaaggtcttccccccccccccccacccccggccgagcaaacacagcactggcccccagagctgggaggatgggaaggggtctcacgggagggtccgtcactgaagttgccccacctcgaacaaacctggtgtccctgaccctcgcccatctcccagacacgcggggatctggggctggagctgactttccgaggacatcacagccccagcacccgagcccagagccacgctgttttcccctctgatgcttcagggagcgcgcgagcagggagcggcgtgagtgcccgtctgtctgttgccgggcggaactgagcctgaaccccggcggctggagcgctggccaggagggggcgaatgccgaggtgcgggcagctcagcgggcgggaggctgggccgaggctcgcctccgcccgcagctcagccatgcaaaagtgctcttgcttcccgggaataaccaaatatctttgtttaaagtggtggcgtaaatggccagtcgctttgtggccacgctggatattagtagatgaggatcattctgcttcaattgggcgcctctcatccgacgagcaagaaactgcttaggaggaagagggtttcctgtctgcgcgttcccaggcttcaagtgtgggccccgcgccttgagggtccttgggcgcctggcgagggggagctgtgggctgcgctccccagcggaatcgggggtgtcccccgcgttgctccggccaggccggggcctgcagccgagtcgactaccgagtggagcactgaacggcgcggattttgagaccgactccggtttttgtccttggattttaaacgtttttatcattgtttttgttttgctttctccttagctgttttagtctcctctgcgcgccaggggctgggagggcggagcgctccccggccggccccggcaggtgcctccaagacacccgcgctggtcaaggagcttcttgaatttagtttttgttttcacattttctttcccctccttgtagagaaggagctcctgatcatgacgaacaggcagttttgagctacttaattcatccgggctccctttttttattaatagcaattacagtagagaaagttttatttatttttaaagatttcagccctctccttgaagagagctcttactccctcaatacaaagccaacttctataataacattcgcttttctcaccgcctaccttctttaccagggtaaagaaagctcaggacaccctccgccctcccacctgcgcccgcgtttttgtgcggtccccacggcagagctggggag

SEQ ID NO: 169 - DNA, 4040 bp, Homo sapiens
atgcccactttcttgtagctttcctccaggggactcaagatgtcagacactgagaacggagtcgtgtgctttggactcatcgacatgattcggcggcggctggaggaggaaggaagaggaggaaaaaaaagggagagggggaaggcgaagcctcgctgctttttttttctccctttgccaaatattctggtgttaccttaacgccgatcttgttggatgtacacgtaacggagtggaccgagtcctccttaattggcttgagtggaggctcgggggctgcctcgcgtttgttttagcccggcgccaggttttaggcagccaccagaggcggggcgtaagcgctaaagcaacaagacaatagaagcctacatcttgcccgagataattagcttacatgctgatgacaaggtaaacacctttaagtttcacttgtcaggatttttaggtctcaaagagagagagagagaggcagagacgagacccaaagcatttcccccctcccttggacacccccacccccattttttgtggggtaccagcggagcgcggggaggaggtggaggggaggggaaggaggagggaaccgagagcggggagggcaggaggtggggtgggggagtaacagaggaggagagatggttgagaggaaggaaggtgaatgctgctttgcaaccaacttgcggagttacaaagtggaaccactttccaattcggtcggggttccccgggcacggacaggtctttaggaggagggggctgagggacagggtgggggtttcacctgagcctgccggggctgctcctccctcccgccgcggcctcccagccccgcgccttcccactgcctccggaccacatcgggcttcgctgcgctgagccccagtcgccaacaaatgagcgagcgagtctggggacgaaccctggggccgcactgttggtctacgtgtctgtcagtctgtctgcctctcttctgccgccgtcagagggacacctctgctccccgccccctttccccctaccggagagaatccgagcgggcggagggggcgctgagtaggggatcgactgcctcccggaggctgtcccggatccccgagccacaacccgcccccgcagctcaggggtttttcagtgggccacccccgctaacacgcctcccccaaggtcttccccccccccccccacccccggccgagcaaacacagcactggcccccagagctgggaggatgggaaggggtctcacgggagggtccgtcactgaagttgccccacctcgaacaaacctggtgtccctgaccctcgcccatctcccagacacgcggggatctggggctggagctgactttccgaggacatcacagccccagcacccgagcccagagccacgctgttttcccctctgatgcttcagggagcgcgcgagcagggagcggcgtgagtgcccgtctgtctgttgccgggcggaactgagcctgaaccccggcggctggagcgctggccaggagggggcgaatgccgaggtgcgggcagctcagcgggcgggaggctgggccgaggctcgcctccgcccgcagctcagccatgcaaaagtgctcttgcttcccgggaataaccaaatatctttgtttaaagtggtggcgtaaatggccagtcgctttgtggccacgctggatattagtagatgaggatcattctgcttcaattgggcgcctctcatccgacgagcaagaaactgcttaggaggaagagggtttcctgtctgcgcgttcccaggcttcaagtgtgggccccgcgccttgagggtccttgggcgcctggcgagggggagctgtgggctgcgctccccagcggaatcgggggtgtcccccgcgttgctccggccaggccggggcctgcagccgagtcgactaccgagtggagcactgaacggcgcggattttgagaccgactccggtttttgtccttggattttaaacgtttttatcattgtttttgttttgctttctccttagctgttttagtctcctctgcgcgccaggggctgggagggcggagcgctccccggccggccccggcaggtgcctccaagacacccgcgctggtcaaggagcttcttgaatttagtttttgttttcacattttctttcccctccttgtagagaaggagctcctgatcatgacgaacaggcagttttgagctacttaattcatccgggctccctttttttattaatagcaattacagtagagaaagttttatttatttttaaagatttcagccctctccttgaagagagctcttactccctcaatacaaagccaacttctataataacattcgcttttctcaccgcctaccttctttaccagggtaaagaaagctcaggacaccctccgccctcccacctgcgcccgcgtttttgtgcggtccccacggcagagctggggaggccaccctacgtttgcgcagggagacgcgctcgccgctggtgttgcgaaagaccagagcgaagcccggctccttgcccttccttcccaggggcttctctggggggcgctctcaggccccgacgaactgagcattgatcactgtggtggctaagcaaggaggggaggcgacgccgggcttaagcgaaccacagaggagaactggcaacgctgaatacagaccttgtctgcaggcgcgacctggccgggcctgagtcccgaatggggtctaattgcgaaggcggggtgggtttcccagtcacccagcttctttctctcactcgccattatttcatagttgtttgtaagtttaaggaacaccaagtgtagaatgttgtacatctcttccagtctcaacgccatttagaaatggagatcaatcttcacaaggtttttgtgagattcaagtaagatgaagcacatcaaaatgctttgaaagctttgaatgtttttcagctcagtgccagcactggagattgcggtagttattatcatgactatccccaccccctcttaggtcccaagacctgagtaaaaggaagagttgggtgaatcttccacagcccctaggtcctgtcttctcggccttcgtcccttggcagcttttcaacctctcagcaggccacaggcgcacgtggctggcagctccccggcctccggctctgacagtccgggggcaaccaggcctgcagttctcgaggaaacccccagccccccacgtctcgttctggaccaggaaccccctccccaacaaccgcgcagcaagtggcgactctgggagctgaactggagtggagctcgaagtggctggggcgggcaaagactcccgcttcactctgggacacaactgggacggcgcttcaacctctgcctgcaggcgtgcttctcgcgcgcaccagcaagctctctatccacctcgcctgggcctttgcagcgccctgccgcccaggctccagcgcctctactaccctagccccttctcaacacgcggctctgccttcttccccagtaccactgcactgccgaaaataagcccggagactaacgcaccttgtagggaagagaaggacatctgtatctccaagcttatccaagcaaaggcctccagagtccctcccatggcccgaaacacctccctctgaccgaagagcgtcctttctttccgccgcctcctggactcatcctaaatagggcagacccgggctaaaccagtgatttttttttccatgaatacgaagaaccccgattgcactttgcgaagtctgcgcgtattcctttatcccgcaactagcttgctcccgggtggagtgggcacagtggggagcggtcagggcagggcagggcccaacgctggcccctcgcggagctttccctggcgcgacctcacacggtcgctgcctctattccgaccacgctctgcttcgctggctgcggctccgccaggaatccgagggggcgcaggcccaggctcggccctagatgcgcggaatcgccatcagcctttgcttacaccagcgtggccgcagggaaactcctttctctccctccagt

SEQ ID NO: 170 - DNA, 4025 bp, Homo sapiens
aacataaaacaaaatgcgtgaacctatagaaaaatgtctctgggactctttttaaactatattttgaaataactttagattttggaaaaaattgcaaaaataacacagtgtttccatatacccattgtccagcttcccctaatgttaacatcttgcatacccatagtataattatgaacactaagaaatgaacaatgtacaatgctattaactacagactttattcagatttcattagttatatatatatgtgtgtgtgtgtgtgtgtatatatatatatatatatataattttttttttgtaaaatgtactatccctggagcttataaaacatccagagtgcaaagacaatgactgacctttcagaggcacccaggaaccccctggtcagattcaaggatccatattcccacagctccccagggacccagatgggacatggtggggtctgggatggtgaacttcagaggcctgagtctggcttcctgtgggtgtgagttgggacaagccaatgagcctttctctgctctgccacttaccagctgtgtgaccttgagcaagttgcttaactgccctgagcctcatctgtaaaacaaggattctgagcatatctatgttatagatttgcagtgaggattgaataaggtgatggatgttaagtgattaacacaatgtcttgcacatagtaaacatctgataaattattagtaaattactagtatcaagtgaagacattttgcttcgtgttttatttttatttctgtaccactattgcacatgattttcttttttccttacttttttttttgagatggagtctcattctgtcacccaggctgggatgcagtggtgcaatcttggctgactgcaatctctgcctcccaaattcaagtgattctcctgcctcagcctcccaagtagctgggattacaggcaaccaccaccatgcctggctaatttttgtatttttagtagaggcggggttttaccatgttggccaggctggtctcaaactcctgacctcaggtgatccacctgcctcagccttccaaagtgctgagattacaggcatgagccaccatgcctggcctgtacatgcttttcattcttcttatcttcagacctagaaacagcagctacaggttctcagcatgggtcctgcttccgtgtttggtagaacctgggttggggcctattgtgtgtaggtgaggacatatcctctgtggagaggggccacctggggaacgaagatgctgaacagaagttgctgaagccctctgaaccattcagctctctaaggaaccttctgatatctccccacaggtggacctggcctctcaggtcccttggtttgagcagctggctcagttcaagatgccctggacatctcccagctgccagaattcttgtgagctgggcatccagaacctaagcttcaaagtgagaagtgggcagatgctggccatcatagggagctcaggtaccggaaaggcaaatcgctgggcaatggtttctctcctgggatacagaatggtcctttggacaaatggatgcttcttatggagctctttgctgactagtagaataatacagcagaatggctgagaacacaggttctgggtcagacagacctgggctcaaatcctggctcctccatttgctggcttgagggtaggtgctgttgttaagagtcatgagtgcgcctcttgtccacccgaggctgtggccagagcatctgactttggctaacacctggacggagagatcagcaaacagctccagcatgtaatgttcttttcagactcctccagccatgaggggcattggttcaggttgttcctccacaatcacattctgattatggccagacagcccctgccacactctcacctctcagacagcctctccagtgtcttacttagcacaactttcactcatctgcaaagagccaggttcttggagtgcctcaaattgtcatttccatggccaaatttaaaatgagagaatgtctgagctgaaagggggcttggggaacagaggtcattctcatcatgttccacctttctttctccctaccagtttggaagcattttcagaggaaggtgttcaaactccctactcctcagtgtgtctagagtatcctcctgcacgcgcgcgtgcacacacacacacacacacacacacacacacacactcccctccatttgacagatgaggagactcaaatccaaagaaattgagggattctcgtaaggacacatatttaatgcagagctagaactagaactttggtttcatcattctcggatcaagacatttctccctgggacacccttacatagtgctggagagagcattttatatcttttaattaatcatttccagaggtagagattactcaattttttaaacattctgctccaaacttttacacccgtctggtagataagttctgtttaccgtataaccaaagatcaaatgaaatcttatgtataaatgcactttgtaactgaaacagcatcacagtcatgaagtccctctcactctgtccctgtccctgcaatcctgacctaaataagaaaaaagtagatcccggccaggcacagtggctcatacctgtaatcctagcactttgggaggccgaggcgggcagatcacgaggtcaggagatcgagaccgtcctggctatcacggtgaaaccccgtctctactaaaaatacaaaaaattagctgggtgtcgtggtgggtgcctgtagtcccagctacttgggaggttgaggcaggagaatggcgtgaacctgggaggtggagcttgcagtgagtcgagatcgcgccactgcactccagcctgggcaacagagcacgatcccgtctcttagaaaggaatgaataaattacactgaatagtctcctgttttgttttttttgttgttgttgttttgtttttttgaggcagtctctctctgttgcctaggctggattgcagtggtgtgatctcggctcactgcaacccgctcctcctgggttcaagcgagtctcatgtctcagcctcccaagtagctgggattacaggtgggtgccactatgcctggctcatttttttttgtattttttgtagagatatggttttgccatggtggccaggctgatctccaactcctggcctcaggtgatctgcttgccttggcctctcaaagtgctgggattacaggcatgagtcactgcaccgagcatctcctggttgtttatagattcagtgttgtttggcttcaggtttacttgcctgtgtaaaaaaaacaaaaacaaaaaacaaaacaacaacaaacaactttagacaaataaatagtagagttgtctgagcaaatagtgattaatgaatctggcagcactcaaaaacaggaccagttcagaggctcccccaagcaatttggtcaggcagtatttatagacagaaaaaggaagtgccctacagaaatagctgattggttacagttgggtgttcaccttatttatttgagggtgatgtgatcaggtgttgggtatggacaggagctcatcagtcggtagcctgtgattggctgatgcttggctgccatgattggctgagactcagcaacttgtctcagccagtctctgtcttaagagaatatactgctaagataagttgcagtttgtttacatactaagtttgcttgcagtttgctctgtgggaactcaaagtatgcaggcagcctcaggccaaatttagtttaactgagcagctgaaattattaaaatgatttattagaaaggttcatcaactacacttcctgtgacttttactgccatccccctctccccctgcccaacatacacacaaaagaacgctggccataatttttaaaatacaaagaaaacagccaggctgggcacggtggctcatgcctgtaatcccagcactttgggaggctgaggcaagtggatcacctgaggtcaggagttcgagaccagcctggccaacatggtgaaaccctgtctctactaaa

SEQ ID NO: 171 - DNA, 4042 bp, Homo sapiens
actacaagcatacagtgaccacttcatacacaccacataaaaaatacaaaaactgaaaaatactatcaaatgctttgacattttctaaatatttctgctgcccctataaaattgccttgtctgacctttcctcactaaccaggagatacggtgtttttcatttcctctcccttcaaattttacaagagaatcaaggaatttgaggaccaaagcaccacaaacacaagagtaagcacagcaaatatgacaaggggactgaagtaagcccctatgggaataggatctgctgaaggaatcaagagggatggacaaaggaacagaagacactcaagaataacttcaggaagtctccttaccgcctcacctgctttccctctgtcctacacatccagccttgcaaagaaataagagtaaagagaaaagtccatgtagcaccatcccagttcagaagcaacccccaagatatgggtcaactttatcacctcaaactctactcatttataatgacaaaattcaactgttaacacataggtaagagttcttcaggcatcggttttaaaggtccatgtactgggacgggtgcggcggctcacacctgtaatcctagcaccttgggaggccaaggctggtggatcacctgaggtcaggagttcaagactagcctggccaacatggtgaaacccagtctctactaaaatacaaaagttagccgggcatgatggcgggtgcctgtaatgccagctgttctggaggctgggacgggagaatcacttgaacctgggagacagtggctgcagtgagccgagatcacaccactgcactccagcctgggtggctgagcaagacactgtctaaaaaaaaaaaaaaaaaagttcatatactgaataaccatctgggcccataacagcttaagactttctggagaaaaaaaaaaaaaccagtttccagtttaatttccaacaaagcagtaggaactcttgcctatagaatactgtgctgggggctgggcacggcgacttatgcccgtaatcccagcactttgggaggccgaggcgggtggatcatttgaggtcaggagttaagagactagcctggccaaaatggtgaaaccctctctctactaaattaaatacaaaaattagcctgctgtcgtactacacgcctttaatcccagctattcgggaggctgaggcacaattgcttgaacctgggtggcagaggttgcagtgagccgatcacaccaccgcactccagcctggagacagagcgagactctgtctcaaaaaaaaaaaaaatactgtgctggttcatttgcctataaagtcaccaatctaatgtttgggtatttgatcattcagaattctagaaacactgaagatcccttcacctactcagggtctgggcctctttcatgaatgcttaattcccacagccttacagtttatacccttctcctctcccacttttgatcctcaagttttttgcttctcacattttttactgggtttgtgcttctcagtatccttgaccaaagcaactgatgctgtaagaaatgagacttcaaaccatttacccacactgggtgattaaggtagtttaaaaaaagaaatgaggccaggcacggtggctcccgcctgtaatcccagaactttgggaggccgaggcaggtgtttcactttaagtcaggagttcgtgaccagcctggccaacatggcaaaaccccgtctctactaaaaatacaaccattagccaggcatggtggctcatgactgtaatcccagctactggtgaggctgaggcaggagaatcgcttgaacccaggaggcagaggttacagtgagccaagatggcaccactgcactccagcctgggcaacaaagcgagactccatctccaaaaaataaattaatttattaatttaaaaagaaaaagaaaaaagaaatgaagaacttacggtaattagtgtggttagggacagtgagttagaaattgtcacatcaaaatacaaagttttcaaaacagtatattttattttacaatagcaaccaactccccagtttgtttcaattgtgacatctagatggcttaagattactttctggtggtcacccatgctgaacaatatttttcaatcttccaaacagcaaagactcaaaagagattctgcatttcacatcagttcacaagttcaagagtcttccatttatcttagcttttggaataaattatctttgaggtagaaggacaatgacgaagccacttaattccttgtgtctgcataaaagcagatttattcatcacaacttcatttatgtgaataaagcagatgatgataaaatgttctcttattcttgtttaatcagtagtggtagtgatgccagaaactgtgaaaggaaggcttttagttactttcttctttccattttccaataatccattccccatccccagctgaagaaaggggtgttactgagtccagctgataccacacattgaaaggtaaacattaatatttcaaatctgatgtctaactaaaaatgtacagaatgaaaactagaaaatttcaaccccagattatcttcaaccttgctccctccaccaatcatactttgacatttatctatttccttctccacttatggatgtaattggcttgctatagaaactacagttcagatgctttgaatgtatgaactacaatgaacaataaagtcctcttcttttgaagcatattttggcttcagctttaagataatcttatgacaagaagggtcacactgattcacttaataaattccattcttacctaacacaaggtttagttgataagcacttggacaaaaataatacttttcaaaaatgtaaagcaaactagtgaggacaaaggattttgtcctcatctcaacaatgatcagctattggaactgcatgaaactgaacaatttaaacctggagctggtaatgttcttaagaccaattcagaacaaaggcaggttgcccttaaaacaggtttgaccttttccttcactcttcctcctgtcccaccctctgtgagtgatttaaaaacggaaaaggtcaaagcccagccaggcctacatttagagaaattttaaaaaaatttttcctttcaattttggccaattatttccaatttttattttattcttaaaacttaagcatggtaaaatgttaagctgttttcatccactgatattattctactataaaaagcccttcttgagcagatttgatgataaaaaggagaacatttctaaggtataattagagaagctgttgcatgagaaatcatgtctccatctccattttgctatgcgttatctgaggattgtttctgaaagagatctatttaggcagtgtatgtatgtgtcagcatgtaaaaagtaaagaactgaaaatagacaaaccttgtaaatgcacttcaaaaccaattgtggctcaagtgtaggtggttccccaaggctggtaccaatgagactggggtttgggaattagttggtcatcatccctcctgctgcccagcagtggtcagtcatttttcatgagggatggactaggaaaatgaagtgtctattataaggagagttcctgtaacttaaggagcaagctcactacaaaacccagctacctgcttatcgtagtggccagagtggtagaagagatacggagtaggaattaaaccacacaatgttatttagggactaagccatgcccctaacaagaaaacaagccaaaaggaaagtattaggcattctctgggaaggcatgcatttttttcccatgtctctggggccaaaaaccttataccaagtacctattggcacccgaatatatttgtagaatgaatgaatacatgaaaaaaaataaacagtaacctttctcctatattctactttccaagccaattaataagcaagtgtcttttcgtcatgattttttttgttttctgtttaggatttaacaaaatggttgagataacagtcacttctgtttgatgaagagtatcacttcattccatttttgt

SEQ ID NO: 172 - DNA, 4027 bp, Homo sapiens
gacctttcctcactaaccaggagatacggtgtttttcatttcctctcccttcaaattttacaagagaatcaaggaatttgaggaccaaagcaccacaaacacaagagtaagcacagcaaatatgacaaggggactgaagtaagcccctatgggaataggatctgctgaaggaatcaagagggatggacaaaggaacagaagacactcaagaataacttcaggaagtctccttaccgcctcacctgctttccctctgtcctacacatccagccttgcaaagaaataagagtaaagagaaaagtccatgtagcaccatcccagttcagaagcaacccccaagatatgggtcaactttatcacctcaaactctactcatttataatgacaaaattcaactgttaacacataggtaagagttcttcaggcatcggttttaaaggtccatgtactgggacgggtgcggcggctcacacctgtaatcctagcaccttgggaggccaaggctggtggatcacctgaggtcaggagttcaagactagcctggccaacatggtgaaacccagtctctactaaaatacaaaagttagccgggcatgatggcgggtgcctgtaatgccagctgttctggaggctgggacgggagaatcacttgaacctgggagacagtggctgcagtgagccgagatcacaccactgcactccagcctgggtggctgagcaagacactgtctaaaaaaaaaaaaaaaaaagttcatatactgaataaccatctgggcccataacagcttaagactttctggagaaaaaaaaaaaaaccagtttccagtttaatttccaacaaagcagtaggaactcttgcctatagaatactgtgctgggggctgggcacggcgacttatgcccgtaatcccagcactttgggaggccgaggcgggtggatcatttgaggtcaggagttaagagactagcctggccaaaatggtgaaaccctctctctactaaattaaatacaaaaattagcctgctgtcgtactacacgcctttaatcccagctattcgggaggctgaggcacaattgcttgaacctgggtggcagaggttgcagtgagccgatcacaccaccgcactccagcctggagacagagcgagactctgtctcaaaaaaaaaaaaaatactgtgctggttcatttgcctataaagtcaccaatctaatgtttgggtatttgatcattcagaattctagaaacactgaagatcccttcacctactcagggtctgggcctctttcatgaatgcttaattcccacagccttacagtttatacccttctcctctcccacttttgatcctcaagttttttgcttctcacattttttactgggtttgtgcttctcagtatccttgaccaaagcaactgatgctgtaagaaatgagacttcaaaccatttacccacactgggtgattaaggtagtttaaaaaaagaaatgaggccaggcacggtggctcccgcctgtaatcccagaactttgggaggccgaggcaggtgtttcactttaagtcaggagttcgtgaccagcctggccaacatggcaaaaccccgtctctactaaaaatacaaccattagccaggcatggtggctcatgactgtaatcccagctactggtgaggctgaggcaggagaatcgcttgaacccaggaggcagaggttacagtgagccaagatggcaccactgcactccagcctgggcaacaaagcgagactccatctccaaaaaataaattaatttattaatttaaaaagaaaaagaaaaaagaaatgaagaacttacggtaattagtgtggttagggacagtgagttagaaattgtcacatcaaaatacaaagttttcaaaacagtatattttattttacaatagcaaccaactccccagtttgtttcaattgtgacatctagatggcttaagattactttctggtggtcacccatgctgaacaatatttttcaatcttccaaacagcaaagactcaaaagagattctgcatttcacatcagttcacaagttcaagagtcttccatttatcttagcttttggaataaattatctttgaggtagaaggacaatgacgaagccacttaattccttgtgtctgcataaaagcagatttattcatcacaacttcatttatgtgaataaagcagatgatgataaaatgttctcttattcttgtttaatcagtagtggtagtgatgccagaaactgtgaaaggaaggcttttagttactttcttctttccattttccaataatccattccccatccccagctgaagaaaggggtgttactgagtccagctgataccacacattgaaaggtaaacattaatatttcaaatctgatgtctaactaaaaatgtacagaatgaaaactagaaaatttcaaccccagattatcttcaaccttgctccctccaccaatcatactttgacatttatctatttccttctccacttatggatgtaattggcttgctatagaaactacagttcagatgctttgaatgtatgaactacaatgaacaataaagtcctcttcttttgaagcatattttggcttcagctttaagataatcttatgacaagaagggtcacactgattcacttaataaattccattcttacctaacacaaggtttagttgataagcacttggacaaaaataatacttttcaaaaatgtaaagcaaactagtgaggacaaaggattttgtcctcatctcaacaatgatcagctattggaactgcatgaaactgaacaatttaaacctggagctggtaatgttcttaagaccaattcagaacaaaggcaggttgcccttaaaacaggtttgaccttttccttcactcttcctcctgtcccaccctctgtgagtgatttaaaaacggaaaaggtcaaagcccagccaggcctacatttagagaaattttaaaaaaatttttcctttcaattttggccaattatttccaatttttattttattcttaaaacttaagcatggtaaaatgttaagctgttttcatccactgatattattctactataaaaagcccttcttgagcagatttgatgataaaaaggagaacatttctaaggtataattagagaagctgttgcatgagaaatcatgtctccatctccattttgctatgcgttatctgaggattgtttctgaaagagatctatttaggcagtgtatgtatgtgtcagcatgtaaaaagtaaagaactgaaaatagacaaaccttgtaaatgcacttcaaaaccaattgtggctcaagtgtaggtggttccccaaggctggtaccaatgagactggggtttgggaattagttggtcatcatccctcctgctgcccagcagtggtcagtcatttttcatgagggatggactaggaaaatgaagtgtctattataaggagagttcctgtaacttaaggagcaagctcactacaaaacccagctacctgcttatcgtagtggccagagtggtagaagagatacggagtaggaattaaaccacacaatgttatttagggactaagccatgcccctaacaagaaaacaagccaaaaggaaagtattaggcattctctgggaaggcatgcatttttttcccatgtctctggggccaaaaaccttataccaagtacctattggcacccgaatatatttgtagaatgaatgaatacatgaaaaaaaataaacagtaacctttctcctatattctactttccaagccaattaataagcaagtgtcttttcgtcatgattttttttgttttctgtttaggatttaacaaaatggttgagataacagtcacttctgtttgatgaagagtatcacttcattccatttttgtgtttttgttgcatctccaagtcagaataaatgccttttggagcagatatatttcatttagcatttagtatcatcttcatcaatactcgtatgaacgaaaaaataaaa

SEQ ID NO: 173 - DNA, 4047 bp, Homo sapiens
atcccagttcagaagcaacccccaagatatgggtcaactttatcacctcaaactctactcatttataatgacaaaattcaactgttaacacataggtaagagttcttcaggcatcggttttaaaggtccatgtactgggacgggtgcggcggctcacacctgtaatcctagcaccttgggaggccaaggctggtggatcacctgaggtcaggagttcaagactagcctggccaacatggtgaaacccagtctctactaaaatacaaaagttagccgggcatgatggcgggtgcctgtaatgccagctgttctggaggctgggacgggagaatcacttgaacctgggagacagtggctgcagtgagccgagatcacaccactgcactccagcctgggtggctgagcaagacactgtctaaaaaaaaaaaaaaaaaagttcatatactgaataaccatctgggcccataacagcttaagactttctggagaaaaaaaaaaaaaccagtttccagtttaatttccaacaaagcagtaggaactcttgcctatagaatactgtgctgggggctgggcacggcgacttatgcccgtaatcccagcactttgggaggccgaggcgggtggatcatttgaggtcaggagttaagagactagcctggccaaaatggtgaaaccctctctctactaaattaaatacaaaaattagcctgctgtcgtactacacgcctttaatcccagctattcgggaggctgaggcacaattgcttgaacctgggtggcagaggttgcagtgagccgatcacaccaccgcactccagcctggagacagagcgagactctgtctcaaaaaaaaaaaaaatactgtgctggttcatttgcctataaagtcaccaatctaatgtttgggtatttgatcattcagaattctagaaacactgaagatcccttcacctactcagggtctgggcctctttcatgaatgcttaattcccacagccttacagtttatacccttctcctctcccacttttgatcctcaagttttttgcttctcacattttttactgggtttgtgcttctcagtatccttgaccaaagcaactgatgctgtaagaaatgagacttcaaaccatttacccacactgggtgattaaggtagtttaaaaaaagaaatgaggccaggcacggtggctcccgcctgtaatcccagaactttgggaggccgaggcaggtgtttcactttaagtcaggagttcgtgaccagcctggccaacatggcaaaaccccgtctctactaaaaatacaaccattagccaggcatggtggctcatgactgtaatcccagctactggtgaggctgaggcaggagaatcgcttgaacccaggaggcagaggttacagtgagccaagatggcaccactgcactccagcctgggcaacaaagcgagactccatctccaaaaaataaattaatttattaatttaaaaagaaaaagaaaaaagaaatgaagaacttacggtaattagtgtggttagggacagtgagttagaaattgtcacatcaaaatacaaagttttcaaaacagtatattttattttacaatagcaaccaactccccagtttgtttcaattgtgacatctagatggcttaagattactttctggtggtcacccatgctgaacaatatttttcaatcttccaaacagcaaagactcaaaagagattctgcatttcacatcagttcacaagttcaagagtcttccatttatcttagcttttggaataaattatctttgaggtagaaggacaatgacgaagccacttaattccttgtgtctgcataaaagcagatttattcatcacaacttcatttatgtgaataaagcagatgatgataaaatgttctcttattcttgtttaatcagtagtggtagtgatgccagaaactgtgaaaggaaggcttttagttactttcttctttccattttccaataatccattccccatccccagctgaagaaaggggtgttactgagtccagctgataccacacattgaaaggtaaacattaatatttcaaatctgatgtctaactaaaaatgtacagaatgaaaactagaaaatttcaaccccagattatcttcaaccttgctccctccaccaatcatactttgacatttatctatttccttctccacttatggatgtaattggcttgctatagaaactacagttcagatgctttgaatgtatgaactacaatgaacaataaagtcctcttcttttgaagcatattttggcttcagctttaagataatcttatgacaagaagggtcacactgattcacttaataaattccattcttacctaacacaaggtttagttgataagcacttggacaaaaataatacttttcaaaaatgtaaagcaaactagtgaggacaaaggattttgtcctcatctcaacaatgatcagctattggaactgcatgaaactgaacaatttaaacctggagctggtaatgttcttaagaccaattcagaacaaaggcaggttgcccttaaaacaggtttgaccttttccttcactcttcctcctgtcccaccctctgtgagtgatttaaaaacggaaaaggtcaaagcccagccaggcctacatttagagaaattttaaaaaaatttttcctttcaattttggccaattatttccaatttttattttattcttaaaacttaagcatggtaaaatgttaagctgttttcatccactgatattattctactataaaaagcccttcttgagcagatttgatgataaaaaggagaacatttctaaggtataattagagaagctgttgcatgagaaatcatgtctccatctccattttgctatgcgttatctgaggattgtttctgaaagagatctatttaggcagtgtatgtatgtgtcagcatgtaaaaagtaaagaactgaaaatagacaaaccttgtaaatgcacttcaaaaccaattgtggctcaagtgtaggtggttccccaaggctggtaccaatgagactggggtttgggaattagttggtcatcatccctcctgctgcccagcagtggtcagtcatttttcatgagggatggactaggaaaatgaagtgtctattataaggagagttcctgtaacttaaggagcaagctcactacaaaacccagctacctgcttatcgtagtggccagagtggtagaagagatacggagtaggaattaaaccacacaatgttatttagggactaagccatgcccctaacaagaaaacaagccaaaaggaaagtattaggcattctctgggaaggcatgcatttttttcccatgtctctggggccaaaaaccttataccaagtacctattggcacccgaatatatttgtagaatgaatgaatacatgaaaaaaaataaacagtaacctttctcctatattctactttccaagccaattaataagcaagtgtcttttcgtcatgattttttttgttttctgtttaggatttaacaaaatggttgagataacagtcacttctgtttgatgaagagtatcacttcattccatttttgtgtttttgttgcatctccaagtcagaataaatgccttttggagcagatatatttcatttagcatttagtatcatcttcatcaatactcgtatgaacgaaaaaataaaaagccctctcttattcccactctacaacgcatgtcaaaggtgatctgtttagtttttccttagtatcgaacatatcacagctactcaatgaagtttcttctcaactaaagaaacacagtctcttagagaatttgttcctgtgtttccaccataagataaatgagataaagtgcactttggtttacgtctttcaagcacttaagaacagcactttattcagttttaataaatttttactaaattggtaaatgcaaaagaatcttttttttattgctcatatgtcttcctgtctctaagccagaccaatgagcaaatacctttaaaactagttgtta

SEQ ID NO: 174 - DNA, 4063 bp, Homo sapiens
tctttcaaaataaagagacatttttcctagtttcaggaatcccccaaatcacttcctcattggcttagtttaaagccaggagactgataaaagggctcagggtttgttctttaattcattaactaaacattctgcttttattacagttaaatggttcaagatgtaacaactagttttaaaggtatttgctcattggtctggcttagagacaggaagacatatgagcaataaaaaaaagattcttttgcatttaccaatttagtaaaaatttattaaaactgaataaagtgctgttcttaagtgcttgaaagacgtaaaccaaagtgcactttatctcatttatcttatggtggaaacacaggaacaaattctctaagagactgtgtttctttagttgagaagaaacttcattgagtagctgtgatatgttcgatactaaggaaaaactaaacagatcacctttgacatgcgttgtagagtgggaataagagagggctttttattttttcgttcatacgagtattgatgaagatgatactaaatgctaaatgaaatatatctgctccaaaaggcatttattctgacttggagatgcaacaaaaacacaaaaatggaatgaagtgatactcttcatcaaacagaagtgactgttatctcaaccattttgttaaatcctaaacagaaaacaaaaaaaatcatgacgaaaagacacttgcttattaattggcttggaaagtagaatataggagaaaggttactgtttattttttttcatgtattcattcattctacaaatatattcgggtgccaataggtacttggtataaggtttttggccccagagacatgggaaaaaaatgcatgccttcccagagaatgcctaatactttccttttggcttgttttcttgttaggggcatggcttagtccctaaataacattgtgtggtttaattcctactccgtatctcttctaccactctggccactacgataagcaggtagctgggttttgtagtgagcttgctccttaagttacaggaactctccttataatagacacttcattttcctagtccatccctcatgaaaaatgactgaccactgctgggcagcaggagggatgatgaccaactaattcccaaaccccagtctcattggtaccagccttggggaaccacctacacttgagccacaattggttttgaagtgcatttacaaggtttgtctattttcagttctttactttttacatgctgacacatacatacactgcctaaatagatctctttcagaaacaatcctcagataacgcatagcaaaatggagatggagacatgatttctcatgcaacagcttctctaattataccttagaaatgttctcctttttatcatcaaatctgctcaagaagggctttttatagtagaataatatcagtggatgaaaacagcttaacattttaccatgcttaagttttaagaataaaataaaaattggaaataattggccaaaattgaaaggaaaaatttttttaaaatttctctaaatgtaggcctggctgggctttgaccttttccgtttttaaatcactcacagagggtgggacaggaggaagagtgaaggaaaaggtcaaacctgttttaagggcaacctgcctttgttctgaattggtcttaagaacattaccagctccaggtttaaattgttcagtttcatgcagttccaatagctgatcattgttgagatgaggacaaaatcctttgtcctcactagtttgctttacatttttgaaaagtattatttttgtccaagtgcttatcaactaaaccttgtgttaggtaagaatggaatttattaagtgaatcagtgtgacccttcttgtcataagattatcttaaagctgaagccaaaatatgcttcaaaagaagaggactttattgttcattgtagttcatacattcaaagcatctgaactgtagtttctatagcaagccaattacatccataagtggagaaggaaatagataaatgtcaaagtatgattggtggagggagcaaggttgaagataatctggggttgaaattttctagttttcattctgtacatttttagttagacatcagatttgaaatattaatgtttacctttcaatgtgtggtatcagctggactcagtaacacccctttcttcagctggggatggggaatggattattggaaaatggaaagaagaaagtaactaaaagccttcctttcacagtttctggcatcactaccactactgattaaacaagaataagagaacattttatcatcatctgctttattcacataaatgaagttgtgatgaataaatctgcttttatgcagacacaaggaattaagtggcttcgtcattgtccttctacctcaaagataatttattccaaaagctaagataaatggaagactcttgaacttgtgaactgatgtgaaatgcagaatctcttttgagtctttgctgtttggaagattgaaaaatattgttcagcatgggtgaccaccagaaagtaatcttaagccatctagatgtcacaattgaaacaaactggggagttggttgctattgtaaaataaaatatactgttttgaaaactttgtattttgatgtgacaatttctaactcactgtccctaaccacactaattaccgtaagttcttcatttcttttttctttttctttttaaattaataaattaatttattttttggagatggagtctcgctttgttgcccaggctggagtgcagtggtgccatcttggctcactgtaacctctgcctcctgggttcaagcgattctcctgcctcagcctcaccagtagctgggattacagtcatgagccaccatgcctggctaatggttgtatttttagtagagacggggttttgccatgttggccaggctggtcacgaactcctgacttaaagtgaaacacctgcctcggcctcccaaagttctgggattacaggcgggagccaccgtgcctggcctcatttctttttttaaactaccttaatcacccagtgtgggtaaatggtttgaagtctcatttcttacagcatcagttgctttggtcaaggatactgagaagcacaaacccagtaaaaaatgtgagaagcaaaaaacttgaggatcaaaagtgggagaggagaagggtataaactgtaaggctgtgggaattaagcattcatgaaagaggcccagaccctgagtaggtgaagggatcttcagtgtttctagaattctgaatgatcaaatacccaaacattagattggtgactttataggcaaatgaaccagcacagtattttttttttttttgagacagagtctcgctctgtctccaggctggagtgcggtggtgtgatcggctcactgcaacctctgccacccaggttcaagcaattgtgcctcagcctcccgaatagctgggattaaaggcgtgtagtacgacagcaggctaatttttgtatttaatttagtagagagagggtttcaccattttggccaggctagtctcttaactcctgacctcaaatgatccacccgcctcggcctcccaaagtgctgggattacgggcataagtcgccgtgcccagcccccagcacagtattctataggcaagagttcctactgctttgttggaaattaaactggaaactggtttttttttttttctccagaaagtcttaagctgttatgggcccagatggttattcagtatatgaacttttttttttttttttttagacagtgtcttgctcagccacccaggctggagtgcagtggtgtgatctcggctcactgcagccactgtctcccaggttcaagtgattctcccgtcccagcctccagaacagctggcattacaggcacccgccatcatgcccggctaacttttgtattttagtagagactgggtttcaccatgttggccaggctagtcttgaactcctgacctcaggtgatccaccagccttggcctcccaaggtgctaggattacaggtgtgagccgcc

SEQ ID NO: 175 - DNA, 4115 bp, Homo sapiens
aaaaaaaaagttcatatactgaataaccatctgggcccataacagcttaagactttctggagaaaaaaaaaaaaaccagtttccagtttaatttccaacaaagcagtaggaactcttgcctatagaatactgtgctgggggctgggcacggcgacttatgcccgtaatcccagcactttgggaggccgaggcgggtggatcatttgaggtcaggagttaagagactagcctggccaaaatggtgaaaccctctctctactaaattaaatacaaaaattagcctgctgtcgtactacacgcctttaatcccagctattcgggaggctgaggcacaattgcttgaacctgggtggcagaggttgcagtgagccgatcacaccaccgcactccagcctggagacagagcgagactctgtctcaaaaaaaaaaaaaatactgtgctggttcatttgcctataaagtcaccaatctaatgtttgggtatttgatcattcagaattctagaaacactgaagatcccttcacctactcagggtctgggcctctttcatgaatgcttaattcccacagccttacagtttatacccttctcctctcccacttttgatcctcaagttttttgcttctcacattttttactgggtttgtgcttctcagtatccttgaccaaagcaactgatgctgtaagaaatgagacttcaaaccatttacccacactgggtgattaaggtagtttaaaaaaagaaatgaggccaggcacggtggctcccgcctgtaatcccagaactttgggaggccgaggcaggtgtttcactttaagtcaggagttcgtgaccagcctggccaacatggcaaaaccccgtctctactaaaaatacaaccattagccaggcatggtggctcatgactgtaatcccagctactggtgaggctgaggcaggagaatcgcttgaacccaggaggcagaggttacagtgagccaagatggcaccactgcactccagcctgggcaacaaagcgagactccatctccaaaaaataaattaatttattaatttaaaaagaaaaagaaaaaagaaatgaagaacttacggtaattagtgtggttagggacagtgagttagaaattgtcacatcaaaatacaaagttttcaaaacagtatattttattttacaatagcaaccaactccccagtttgtttcaattgtgacatctagatggcttaagattactttctggtggtcacccatgctgaacaatatttttcaatcttccaaacagcaaagactcaaaagagattctgcatttcacatcagttcacaagttcaagagtcttccatttatcttagcttttggaataaattatctttgaggtagaaggacaatgacgaagccacttaattccttgtgtctgcataaaagcagatttattcatcacaacttcatttatgtgaataaagcagatgatgataaaatgttctcttattcttgtttaatcagtagtggtagtgatgccagaaactgtgaaaggaaggcttttagttactttcttctttccattttccaataatccattccccatccccagctgaagaaaggggtgttactgagtccagctgataccacacattgaaaggtaaacattaatatttcaaatctgatgtctaactaaaaatgtacagaatgaaaactagaaaatttcaaccccagattatcttcaaccttgctccctccaccaatcatactttgacatttatctatttccttctccacttatggatgtaattggcttgctatagaaactacagttcagatgctttgaatgtatgaactacaatgaacaataaagtcctcttcttttgaagcatattttggcttcagctttaagataatcttatgacaagaagggtcacactgattcacttaataaattccattcttacctaacacaaggtttagttgataagcacttggacaaaaataatacttttcaaaaatgtaaagcaaactagtgaggacaaaggattttgtcctcatctcaacaatgatcagctattggaactgcatgaaactgaacaatttaaacctggagctggtaatgttcttaagaccaattcagaacaaaggcaggttgcccttaaaacaggtttgaccttttccttcactcttcctcctgtcccaccctctgtgagtgatttaaaaacggaaaaggtcaaagcccagccaggcctacatttagagaaattttaaaaaaatttttcctttcaattttggccaattatttccaatttttattttattcttaaaacttaagcatggtaaaatgttaagctgttttcatccactgatattattctactataaaaagcccttcttgagcagatttgatgataaaaaggagaacatttctaaggtataattagagaagctgttgcatgagaaatcatgtctccatctccattttgctatgcgttatctgaggattgtttctgaaagagatctatttaggcagtgtatgtatgtgtcagcatgtaaaaagtaaagaactgaaaatagacaaaccttgtaaatgcacttcaaaaccaattgtggctcaagtgtaggtggttccccaaggctggtaccaatgagactggggtttgggaattagttggtcatcatccctcctgctgcccagcagtggtcagtcatttttcatgagggatggactaggaaaatgaagtgtctattataaggagagttcctgtaacttaaggagcaagctcactacaaaacccagctacctgcttatcgtagtggccagagtggtagaagagatacggagtaggaattaaaccacacaatgttatttagggactaagccatgcccctaacaagaaaacaagccaaaaggaaagtattaggcattctctgggaaggcatgcatttttttcccatgtctctggggccaaaaaccttataccaagtacctattggcacccgaatatatttgtagaatgaatgaatacatgaaaaaaaataaacagtaacctttctcctatattctactttccaagccaattaataagcaagtgtcttttcgtcatgattttttttgttttctgtttaggatttaacaaaatggttgagataacagtcacttctgtttgatgaagagtatcacttcattccatttttgtgtttttgttgcatctccaagtcagaataaatgccttttggagcagatatatttcatttagcatttagtatcatcttcatcaatactcgtatgaacgaaaaaataaaaagccctctcttattcccactctacaacgcatgtcaaaggtgatctgtttagtttttccttagtatcgaacatatcacagctactcaatgaagtttcttctcaactaaagaaacacagtctcttagagaatttgttcctgtgtttccaccataagataaatgagataaagtgcactttggtttacgtctttcaagcacttaagaacagcactttattcagttttaataaatttttactaaattggtaaatgcaaaagaatcttttttttattgctcatatgtcttcctgtctctaagccagaccaatgagcaaatacctttaaaactagttgttacatcttgaaccatttaactgtaataaaagcagaatgtttagttaatgaattaaagaacaaaccctgagcccttttatcagtctcctggctttaaactaagccaatgaggaagtgatttgggggattcctgaaactaggaaaaatgtctctttattttgaaagaaacttgcatttttctttctttttttttttttttttaatctcaaaggcaattgagtgggtcttctgggccagacctatttaatttacgaaacatagtaccttgcagagaataggcattgaaatattatttaaacaatcaaaccaaagatgttcttctatcttcagctgtcagtgatctaatgccctcatctctcttatcctcaggacccagaatggtatattccacataaaagatgctttgtttatcaaatgaatcaaaaagcacgcctgaggcatttatttttactcctttacttctgtaggccaggtcaaggtgggtctaattcactttt

SEQ ID NO: 176 - DNA, 4046 bp, Homo sapiens
aagatacatgcttcctggcctgattgaggagatggaaaatttttgcaaaaaacaaggtgttgtggtcttccatccagtttcttaagtgctgatgataaaagtgaattagacccaccttgacctggcctacagaagtaaaggagtaaaaataaatgcctcaggcgtgctttttgattcatttgataaacaaagcatcttttatgtggaatataccattctgggtcctgaggataagagagatgagggcattagatcactgacagctgaagatagaagaacatctttggtttgattgtttaaataatatttcaatgcctattctctgcaaggtactatgtttcgtaaattaaataggtctggcccagaagacccactcaattgcctttgagattaaaaaaaaaaaaaaaaagaaagaaaaatgcaagtttctttcaaaataaagagacatttttcctagtttcaggaatcccccaaatcacttcctcattggcttagtttaaagccaggagactgataaaagggctcagggtttgttctttaattcattaactaaacattctgcttttattacagttaaatggttcaagatgtaacaactagttttaaaggtatttgctcattggtctggcttagagacaggaagacatatgagcaataaaaaaaagattcttttgcatttaccaatttagtaaaaatttattaaaactgaataaagtgctgttcttaagtgcttgaaagacgtaaaccaaagtgcactttatctcatttatcttatggtggaaacacaggaacaaattctctaagagactgtgtttctttagttgagaagaaacttcattgagtagctgtgatatgttcgatactaaggaaaaactaaacagatcacctttgacatgcgttgtagagtgggaataagagagggctttttattttttcgttcatacgagtattgatgaagatgatactaaatgctaaatgaaatatatctgctccaaaaggcatttattctgacttggagatgcaacaaaaacacaaaaatggaatgaagtgatactcttcatcaaacagaagtgactgttatctcaaccattttgttaaatcctaaacagaaaacaaaaaaaatcatgacgaaaagacacttgcttattaattggcttggaaagtagaatataggagaaaggttactgtttattttttttcatgtattcattcattctacaaatatattcgggtgccaataggtacttggtataaggtttttggccccagagacatgggaaaaaaatgcatgccttcccagagaatgcctaatactttccttttggcttgttttcttgttaggggcatggcttagtccctaaataacattgtgtggtttaattcctactccgtatctcttctaccactctggccactacgataagcaggtagctgggttttgtagtgagcttgctccttaagttacaggaactctccttataatagacacttcattttcctagtccatccctcatgaaaaatgactgaccactgctgggcagcaggagggatgatgaccaactaattcccaaaccccagtctcattggtaccagccttggggaaccacctacacttgagccacaattggttttgaagtgcatttacaaggtttgtctattttcagttctttactttttacatgctgacacatacatacactgcctaaatagatctctttcagaaacaatcctcagataacgcatagcaaaatggagatggagacatgatttctcatgcaacagcttctctaattataccttagaaatgttctcctttttatcatcaaatctgctcaagaagggctttttatagtagaataatatcagtggatgaaaacagcttaacattttaccatgcttaagttttaagaataaaataaaaattggaaataattggccaaaattgaaaggaaaaatttttttaaaatttctctaaatgtaggcctggctgggctttgaccttttccgtttttaaatcactcacagagggtgggacaggaggaagagtgaaggaaaaggtcaaacctgttttaagggcaacctgcctttgttctgaattggtcttaagaacattaccagctccaggtttaaattgttcagtttcatgcagttccaatagctgatcattgttgagatgaggacaaaatcctttgtcctcactagtttgctttacatttttgaaaagtattatttttgtccaagtgcttatcaactaaaccttgtgttaggtaagaatggaatttattaagtgaatcagtgtgacccttcttgtcataagattatcttaaagctgaagccaaaatatgcttcaaaagaagaggactttattgttcattgtagttcatacattcaaagcatctgaactgtagtttctatagcaagccaattacatccataagtggagaaggaaatagataaatgtcaaagtatgattggtggagggagcaaggttgaagataatctggggttgaaattttctagttttcattctgtacatttttagttagacatcagatttgaaatattaatgtttacctttcaatgtgtggtatcagctggactcagtaacacccctttcttcagctggggatggggaatggattattggaaaatggaaagaagaaagtaactaaaagccttcctttcacagtttctggcatcactaccactactgattaaacaagaataagagaacattttatcatcatctgctttattcacataaatgaagttgtgatgaataaatctgcttttatgcagacacaaggaattaagtggcttcgtcattgtccttctacctcaaagataatttattccaaaagctaagataaatggaagactcttgaacttgtgaactgatgtgaaatgcagaatctcttttgagtctttgctgtttggaagattgaaaaatattgttcagcatgggtgaccaccagaaagtaatcttaagccatctagatgtcacaattgaaacaaactggggagttggttgctattgtaaaataaaatatactgttttgaaaactttgtattttgatgtgacaatttctaactcactgtccctaaccacactaattaccgtaagttcttcatttcttttttctttttctttttaaattaataaattaatttattttttggagatggagtctcgctttgttgcccaggctggagtgcagtggtgccatcttggctcactgtaacctctgcctcctgggttcaagcgattctcctgcctcagcctcaccagtagctgggattacagtcatgagccaccatgcctggctaatggttgtatttttagtagagacggggttttgccatgttggccaggctggtcacgaactcctgacttaaagtgaaacacctgcctcggcctcccaaagttctgggattacaggcgggagccaccgtgcctggcctcatttctttttttaaactaccttaatcacccagtgtgggtaaatggtttgaagtctcatttcttacagcatcagttgctttggtcaaggatactgagaagcacaaacccagtaaaaaatgtgagaagcaaaaaacttgaggatcaaaagtgggagaggagaagggtataaactgtaaggctgtgggaattaagcattcatgaaagaggcccagaccctgagtaggtgaagggatcttcagtgtttctagaattctgaatgatcaaatacccaaacattagattggtgactttataggcaaatgaaccagcacagtattttttttttttttgagacagagtctcgctctgtctccaggctggagtgcggtggtgtgatcggctcactgcaacctctgccacccaggttcaagcaattgtgcctcagcctcccgaatagctgggattaaaggcgtgtagtacgacagcaggctaatttttgtatttaatttagtagagagagggtttcaccattttggccaggctagtctcttaactcctgacctcaaatgatccacccgcctcggcctcccaaagtgctgggatt

SEQ ID NO: 177 - DNA, 4050 bp, Homo sapiens
aaaagtcatttaacaagtttattcagtgatgaaaacatgggacaaatggactaatataaggcagtgtactaagctgagtagagagataaagtcctgtccagaagatacatgcttcctggcctgattgaggagatggaaaatttttgcaaaaaacaaggtgttgtggtcttccatccagtttcttaagtgctgatgataaaagtgaattagacccaccttgacctggcctacagaagtaaaggagtaaaaataaatgcctcaggcgtgctttttgattcatttgataaacaaagcatcttttatgtggaatataccattctgggtcctgaggataagagagatgagggcattagatcactgacagctgaagatagaagaacatctttggtttgattgtttaaataatatttcaatgcctattctctgcaaggtactatgtttcgtaaattaaataggtctggcccagaagacccactcaattgcctttgagattaaaaaaaaaaaaaaaaagaaagaaaaatgcaagtttctttcaaaataaagagacatttttcctagtttcaggaatcccccaaatcacttcctcattggcttagtttaaagccaggagactgataaaagggctcagggtttgttctttaattcattaactaaacattctgcttttattacagttaaatggttcaagatgtaacaactagttttaaaggtatttgctcattggtctggcttagagacaggaagacatatgagcaataaaaaaaagattcttttgcatttaccaatttagtaaaaatttattaaaactgaataaagtgctgttcttaagtgcttgaaagacgtaaaccaaagtgcactttatctcatttatcttatggtggaaacacaggaacaaattctctaagagactgtgtttctttagttgagaagaaacttcattgagtagctgtgatatgttcgatactaaggaaaaactaaacagatcacctttgacatgcgttgtagagtgggaataagagagggctttttattttttcgttcatacgagtattgatgaagatgatactaaatgctaaatgaaatatatctgctccaaaaggcatttattctgacttggagatgcaacaaaaacacaaaaatggaatgaagtgatactcttcatcaaacagaagtgactgttatctcaaccattttgttaaatcctaaacagaaaacaaaaaaaatcatgacgaaaagacacttgcttattaattggcttggaaagtagaatataggagaaaggttactgtttattttttttcatgtattcattcattctacaaatatattcgggtgccaataggtacttggtataaggtttttggccccagagacatgggaaaaaaatgcatgccttcccagagaatgcctaatactttccttttggcttgttttcttgttaggggcatggcttagtccctaaataacattgtgtggtttaattcctactccgtatctcttctaccactctggccactacgataagcaggtagctgggttttgtagtgagcttgctccttaagttacaggaactctccttataatagacacttcattttcctagtccatccctcatgaaaaatgactgaccactgctgggcagcaggagggatgatgaccaactaattcccaaaccccagtctcattggtaccagccttggggaaccacctacacttgagccacaattggttttgaagtgcatttacaaggtttgtctattttcagttctttactttttacatgctgacacatacatacactgcctaaatagatctctttcagaaacaatcctcagataacgcatagcaaaatggagatggagacatgatttctcatgcaacagcttctctaattataccttagaaatgttctcctttttatcatcaaatctgctcaagaagggctttttatagtagaataatatcagtggatgaaaacagcttaacattttaccatgcttaagttttaagaataaaataaaaattggaaataattggccaaaattgaaaggaaaaatttttttaaaatttctctaaatgtaggcctggctgggctttgaccttttccgtttttaaatcactcacagagggtgggacaggaggaagagtgaaggaaaaggtcaaacctgttttaagggcaacctgcctttgttctgaattggtcttaagaacattaccagctccaggtttaaattgttcagtttcatgcagttccaatagctgatcattgttgagatgaggacaaaatcctttgtcctcactagtttgctttacatttttgaaaagtattatttttgtccaagtgcttatcaactaaaccttgtgttaggtaagaatggaatttattaagtgaatcagtgtgacccttcttgtcataagattatcttaaagctgaagccaaaatatgcttcaaaagaagaggactttattgttcattgtagttcatacattcaaagcatctgaactgtagtttctatagcaagccaattacatccataagtggagaaggaaatagataaatgtcaaagtatgattggtggagggagcaaggttgaagataatctggggttgaaattttctagttttcattctgtacatttttagttagacatcagatttgaaatattaatgtttacctttcaatgtgtggtatcagctggactcagtaacacccctttcttcagctggggatggggaatggattattggaaaatggaaagaagaaagtaactaaaagccttcctttcacagtttctggcatcactaccactactgattaaacaagaataagagaacattttatcatcatctgctttattcacataaatgaagttgtgatgaataaatctgcttttatgcagacacaaggaattaagtggcttcgtcattgtccttctacctcaaagataatttattccaaaagctaagataaatggaagactcttgaacttgtgaactgatgtgaaatgcagaatctcttttgagtctttgctgtttggaagattgaaaaatattgttcagcatgggtgaccaccagaaagtaatcttaagccatctagatgtcacaattgaaacaaactggggagttggttgctattgtaaaataaaatatactgttttgaaaactttgtattttgatgtgacaatttctaactcactgtccctaaccacactaattaccgtaagttcttcatttcttttttctttttctttttaaattaataaattaatttattttttggagatggagtctcgctttgttgcccaggctggagtgcagtggtgccatcttggctcactgtaacctctgcctcctgggttcaagcgattctcctgcctcagcctcaccagtagctgggattacagtcatgagccaccatgcctggctaatggttgtatttttagtagagacggggttttgccatgttggccaggctggtcacgaactcctgacttaaagtgaaacacctgcctcggcctcccaaagttctgggattacaggcgggagccaccgtgcctggcctcatttctttttttaaactaccttaatcacccagtgtgggtaaatggtttgaagtctcatttcttacagcatcagttgctttggtcaaggatactgagaagcacaaacccagtaaaaaatgtgagaagcaaaaaacttgaggatcaaaagtgggagaggagaagggtataaactgtaaggctgtgggaattaagcattcatgaaagaggcccagaccctgagtaggtgaagggatcttcagtgtttctagaattctgaatgatcaaatacccaaacattagattggtgactttataggcaaatgaaccagcacagtattttttttttttttgagacagagtctcgctctgtctccaggctggagtgcggtggtgtgatcggctcactgcaacctctgccacccaggttcaagcaattgtgcctcagcctcccgaatagctgggattaaaggcgtgtagtacgacagcaggctaatttttgtatttaat

SEQ ID NO: 178 - DNA, 4037 bp, Homo sapiens
ctactcagggtctgggcctctttcatgaatgcttaattcccacagccttacagtttatacccttctcctctcccacttttgatcctcaagttttttgcttctcacattttttactgggtttgtgcttctcagtatccttgaccaaagcaactgatgctgtaagaaatgagacttcaaaccatttacccacactgggtgattaaggtagtttaaaaaaagaaatgaggccaggcacggtggctcccgcctgtaatcccagaactttgggaggccgaggcaggtgtttcactttaagtcaggagttcgtgaccagcctggccaacatggcaaaaccccgtctctactaaaaatacaaccattagccaggcatggtggctcatgactgtaatcccagctactggtgaggctgaggcaggagaatcgcttgaacccaggaggcagaggttacagtgagccaagatggcaccactgcactccagcctgggcaacaaagcgagactccatctccaaaaaataaattaatttattaatttaaaaagaaaaagaaaaaagaaatgaagaacttacggtaattagtgtggttagggacagtgagttagaaattgtcacatcaaaatacaaagttttcaaaacagtatattttattttacaatagcaaccaactccccagtttgtttcaattgtgacatctagatggcttaagattactttctggtggtcacccatgctgaacaatatttttcaatcttccaaacagcaaagactcaaaagagattctgcatttcacatcagttcacaagttcaagagtcttccatttatcttagcttttggaataaattatctttgaggtagaaggacaatgacgaagccacttaattccttgtgtctgcataaaagcagatttattcatcacaacttcatttatgtgaataaagcagatgatgataaaatgttctcttattcttgtttaatcagtagtggtagtgatgccagaaactgtgaaaggaaggcttttagttactttcttctttccattttccaataatccattccccatccccagctgaagaaaggggtgttactgagtccagctgataccacacattgaaaggtaaacattaatatttcaaatctgatgtctaactaaaaatgtacagaatgaaaactagaaaatttcaaccccagattatcttcaaccttgctccctccaccaatcatactttgacatttatctatttccttctccacttatggatgtaattggcttgctatagaaactacagttcagatgctttgaatgtatgaactacaatgaacaataaagtcctcttcttttgaagcatattttggcttcagctttaagataatcttatgacaagaagggtcacactgattcacttaataaattccattcttacctaacacaaggtttagttgataagcacttggacaaaaataatacttttcaaaaatgtaaagcaaactagtgaggacaaaggattttgtcctcatctcaacaatgatcagctattggaactgcatgaaactgaacaatttaaacctggagctggtaatgttcttaagaccaattcagaacaaaggcaggttgcccttaaaacaggtttgaccttttccttcactcttcctcctgtcccaccctctgtgagtgatttaaaaacggaaaaggtcaaagcccagccaggcctacatttagagaaattttaaaaaaatttttcctttcaattttggccaattatttccaatttttattttattcttaaaacttaagcatggtaaaatgttaagctgttttcatccactgatattattctactataaaaagcccttcttgagcagatttgatgataaaaaggagaacatttctaaggtataattagagaagctgttgcatgagaaatcatgtctccatctccattttgctatgcgttatctgaggattgtttctgaaagagatctatttaggcagtgtatgtatgtgtcagcatgtaaaaagtaaagaactgaaaatagacaaaccttgtaaatgcacttcaaaaccaattgtggctcaagtgtaggtggttccccaaggctggtaccaatgagactggggtttgggaattagttggtcatcatccctcctgctgcccagcagtggtcagtcatttttcatgagggatggactaggaaaatgaagtgtctattataaggagagttcctgtaacttaaggagcaagctcactacaaaacccagctacctgcttatcgtagtggccagagtggtagaagagatacggagtaggaattaaaccacacaatgttatttagggactaagccatgcccctaacaagaaaacaagccaaaaggaaagtattaggcattctctgggaaggcatgcatttttttcccatgtctctggggccaaaaaccttataccaagtacctattggcacccgaatatatttgtagaatgaatgaatacatgaaaaaaaataaacagtaacctttctcctatattctactttccaagccaattaataagcaagtgtcttttcgtcatgattttttttgttttctgtttaggatttaacaaaatggttgagataacagtcacttctgtttgatgaagagtatcacttcattccatttttgtgtttttgttgcatctccaagtcagaataaatgccttttggagcagatatatttcatttagcatttagtatcatcttcatcaatactcgtatgaacgaaaaaataaaaagccctctcttattcccactctacaacgcatgtcaaaggtgatctgtttagtttttccttagtatcgaacatatcacagctactcaatgaagtttcttctcaactaaagaaacacagtctcttagagaatttgttcctgtgtttccaccataagataaatgagataaagtgcactttggtttacgtctttcaagcacttaagaacagcactttattcagttttaataaatttttactaaattggtaaatgcaaaagaatcttttttttattgctcatatgtcttcctgtctctaagccagaccaatgagcaaatacctttaaaactagttgttacatcttgaaccatttaactgtaataaaagcagaatgtttagttaatgaattaaagaacaaaccctgagcccttttatcagtctcctggctttaaactaagccaatgaggaagtgatttgggggattcctgaaactaggaaaaatgtctctttattttgaaagaaacttgcatttttctttctttttttttttttttttaatctcaaaggcaattgagtgggtcttctgggccagacctatttaatttacgaaacatagtaccttgcagagaataggcattgaaatattatttaaacaatcaaaccaaagatgttcttctatcttcagctgtcagtgatctaatgccctcatctctcttatcctcaggacccagaatggtatattccacataaaagatgctttgtttatcaaatgaatcaaaaagcacgcctgaggcatttatttttactcctttacttctgtaggccaggtcaaggtgggtctaattcacttttatcatcagcacttaagaaactggatggaagaccacaacaccttgttttttgcaaaaattttccatctcctcaatcaggccaggaagcatgtatcttctggacaggactttatctctctactcagcttagtacactgccttatattagtccatttgtcccatgttttcatcactgaataaacttgttaaatgacttttggtctggatctcacacctatattacttcatttccttctgtgagcactctataatgataacatcatttttatatcctagggcatgtagttccgagccccacagaaagtaatcaccattcagtaagccaatagttcattcctatctgtatagaactgtaggctttgtaaatctacacatagatctctgttgtaggttcaataatgataataaatgtttgtgcccccagttgttatctctaaggataagagta

SEQ ID NO: 179 - DNA, 4041 bp, Homo sapiens
ccacttttgatcctcaagttttttgcttctcacattttttactgggtttgtgcttctcagtatccttgaccaaagcaactgatgctgtaagaaatgagacttcaaaccatttacccacactgggtgattaaggtagtttaaaaaaagaaatgaggccaggcacggtggctcccgcctgtaatcccagaactttgggaggccgaggcaggtgtttcactttaagtcaggagttcgtgaccagcctggccaacatggcaaaaccccgtctctactaaaaatacaaccattagccaggcatggtggctcatgactgtaatcccagctactggtgaggctgaggcaggagaatcgcttgaacccaggaggcagaggttacagtgagccaagatggcaccactgcactccagcctgggcaacaaagcgagactccatctccaaaaaataaattaatttattaatttaaaaagaaaaagaaaaaagaaatgaagaacttacggtaattagtgtggttagggacagtgagttagaaattgtcacatcaaaatacaaagttttcaaaacagtatattttattttacaatagcaaccaactccccagtttgtttcaattgtgacatctagatggcttaagattactttctggtggtcacccatgctgaacaatatttttcaatcttccaaacagcaaagactcaaaagagattctgcatttcacatcagttcacaagttcaagagtcttccatttatcttagcttttggaataaattatctttgaggtagaaggacaatgacgaagccacttaattccttgtgtctgcataaaagcagatttattcatcacaacttcatttatgtgaataaagcagatgatgataaaatgttctcttattcttgtttaatcagtagtggtagtgatgccagaaactgtgaaaggaaggcttttagttactttcttctttccattttccaataatccattccccatccccagctgaagaaaggggtgttactgagtccagctgataccacacattgaaaggtaaacattaatatttcaaatctgatgtctaactaaaaatgtacagaatgaaaactagaaaatttcaaccccagattatcttcaaccttgctccctccaccaatcatactttgacatttatctatttccttctccacttatggatgtaattggcttgctatagaaactacagttcagatgctttgaatgtatgaactacaatgaacaataaagtcctcttcttttgaagcatattttggcttcagctttaagataatcttatgacaagaagggtcacactgattcacttaataaattccattcttacctaacacaaggtttagttgataagcacttggacaaaaataatacttttcaaaaatgtaaagcaaactagtgaggacaaaggattttgtcctcatctcaacaatgatcagctattggaactgcatgaaactgaacaatttaaacctggagctggtaatgttcttaagaccaattcagaacaaaggcaggttgcccttaaaacaggtttgaccttttccttcactcttcctcctgtcccaccctctgtgagtgatttaaaaacggaaaaggtcaaagcccagccaggcctacatttagagaaattttaaaaaaatttttcctttcaattttggccaattatttccaatttttattttattcttaaaacttaagcatggtaaaatgttaagctgttttcatccactgatattattctactataaaaagcccttcttgagcagatttgatgataaaaaggagaacatttctaaggtataattagagaagctgttgcatgagaaatcatgtctccatctccattttgctatgcgttatctgaggattgtttctgaaagagatctatttaggcagtgtatgtatgtgtcagcatgtaaaaagtaaagaactgaaaatagacaaaccttgtaaatgcacttcaaaaccaattgtggctcaagtgtaggtggttccccaaggctggtaccaatgagactggggtttgggaattagttggtcatcatccctcctgctgcccagcagtggtcagtcatttttcatgagggatggactaggaaaatgaagtgtctattataaggagagttcctgtaacttaaggagcaagctcactacaaaacccagctacctgcttatcgtagtggccagagtggtagaagagatacggagtaggaattaaaccacacaatgttatttagggactaagccatgcccctaacaagaaaacaagccaaaaggaaagtattaggcattctctgggaaggcatgcatttttttcccatgtctctggggccaaaaaccttataccaagtacctattggcacccgaatatatttgtagaatgaatgaatacatgaaaaaaaataaacagtaacctttctcctatattctactttccaagccaattaataagcaagtgtcttttcgtcatgattttttttgttttctgtttaggatttaacaaaatggttgagataacagtcacttctgtttgatgaagagtatcacttcattccatttttgtgtttttgttgcatctccaagtcagaataaatgccttttggagcagatatatttcatttagcatttagtatcatcttcatcaatactcgtatgaacgaaaaaataaaaagccctctcttattcccactctacaacgcatgtcaaaggtgatctgtttagtttttccttagtatcgaacatatcacagctactcaatgaagtttcttctcaactaaagaaacacagtctcttagagaatttgttcctgtgtttccaccataagataaatgagataaagtgcactttggtttacgtctttcaagcacttaagaacagcactttattcagttttaataaatttttactaaattggtaaatgcaaaagaatcttttttttattgctcatatgtcttcctgtctctaagccagaccaatgagcaaatacctttaaaactagttgttacatcttgaaccatttaactgtaataaaagcagaatgtttagttaatgaattaaagaacaaaccctgagcccttttatcagtctcctggctttaaactaagccaatgaggaagtgatttgggggattcctgaaactaggaaaaatgtctctttattttgaaagaaacttgcatttttctttctttttttttttttttttaatctcaaaggcaattgagtgggtcttctgggccagacctatttaatttacgaaacatagtaccttgcagagaataggcattgaaatattatttaaacaatcaaaccaaagatgttcttctatcttcagctgtcagtgatctaatgccctcatctctcttatcctcaggacccagaatggtatattccacataaaagatgctttgtttatcaaatgaatcaaaaagcacgcctgaggcatttatttttactcctttacttctgtaggccaggtcaaggtgggtctaattcacttttatcatcagcacttaagaaactggatggaagaccacaacaccttgttttttgcaaaaattttccatctcctcaatcaggccaggaagcatgtatcttctggacaggactttatctctctactcagcttagtacactgccttatattagtccatttgtcccatgttttcatcactgaataaacttgttaaatgacttttggtctggatctcacacctatattacttcatttccttctgtgagcactctataatgataacatcatttttatatcctagggcatgtagttccgagccccacagaaagtaatcaccattcagtaagccaatagttcattcctatctgtatagaactgtaggctttgtaaatctacacatagatctctgttgtaggttcaataatgataataaatgtttgtgcccccagttgttatctctaaggataagagtaatcaatgatcattcagcagatatagcttatatatgggtggcagtttacaaattataaattgattttacacatattt

SEQ ID NO: 180 - DNA, 4050 bp, Homo sapiens
tattgtgtgccaatctcattgctaggcattggggatgcaaagataaaccatctttattgtgtcttgggtagcagaagaaaatatgtgtaaaatcaatttataatttgtaaactgccacccatatataagctatatctgctgaatgatcattgattactcttatccttagagataacaactgggggcacaaacatttattatcattattgaacctacaacagagatctatgtgtagatttacaaagcctacagttctatacagataggaatgaactattggcttactgaatggtgattactttctgtggggctcggaactacatgccctaggatataaaaatgatgttatcattatagagtgctcacagaaggaaatgaagtaatataggtgtgagatccagaccaaaagtcatttaacaagtttattcagtgatgaaaacatgggacaaatggactaatataaggcagtgtactaagctgagtagagagataaagtcctgtccagaagatacatgcttcctggcctgattgaggagatggaaaatttttgcaaaaaacaaggtgttgtggtcttccatccagtttcttaagtgctgatgataaaagtgaattagacccaccttgacctggcctacagaagtaaaggagtaaaaataaatgcctcaggcgtgctttttgattcatttgataaacaaagcatcttttatgtggaatataccattctgggtcctgaggataagagagatgagggcattagatcactgacagctgaagatagaagaacatctttggtttgattgtttaaataatatttcaatgcctattctctgcaaggtactatgtttcgtaaattaaataggtctggcccagaagacccactcaattgcctttgagattaaaaaaaaaaaaaaaaagaaagaaaaatgcaagtttctttcaaaataaagagacatttttcctagtttcaggaatcccccaaatcacttcctcattggcttagtttaaagccaggagactgataaaagggctcagggtttgttctttaattcattaactaaacattctgcttttattacagttaaatggttcaagatgtaacaactagttttaaaggtatttgctcattggtctggcttagagacaggaagacatatgagcaataaaaaaaagattcttttgcatttaccaatttagtaaaaatttattaaaactgaataaagtgctgttcttaagtgcttgaaagacgtaaaccaaagtgcactttatctcatttatcttatggtggaaacacaggaacaaattctctaagagactgtgtttctttagttgagaagaaacttcattgagtagctgtgatatgttcgatactaaggaaaaactaaacagatcacctttgacatgcgttgtagagtgggaataagagagggctttttattttttcgttcatacgagtattgatgaagatgatactaaatgctaaatgaaatatatctgctccaaaaggcatttattctgacttggagatgcaacaaaaacacaaaaatggaatgaagtgatactcttcatcaaacagaagtgactgttatctcaaccattttgttaaatcctaaacagaaaacaaaaaaaatcatgacgaaaagacacttgcttattaattggcttggaaagtagaatataggagaaaggttactgtttattttttttcatgtattcattcattctacaaatatattcgggtgccaataggtacttggtataaggtttttggccccagagacatgggaaaaaaatgcatgccttcccagagaatgcctaatactttccttttggcttgttttcttgttaggggcatggcttagtccctaaataacattgtgtggtttaattcctactccgtatctcttctaccactctggccactacgataagcaggtagctgggttttgtagtgagcttgctccttaagttacaggaactctccttataatagacacttcattttcctagtccatccctcatgaaaaatgactgaccactgctgggcagcaggagggatgatgaccaactaattcccaaaccccagtctcattggtaccagccttggggaaccacctacacttgagccacaattggttttgaagtgcatttacaaggtttgtctattttcagttctttactttttacatgctgacacatacatacactgcctaaatagatctctttcagaaacaatcctcagataacgcatagcaaaatggagatggagacatgatttctcatgcaacagcttctctaattataccttagaaatgttctcctttttatcatcaaatctgctcaagaagggctttttatagtagaataatatcagtggatgaaaacagcttaacattttaccatgcttaagttttaagaataaaataaaaattggaaataattggccaaaattgaaaggaaaaatttttttaaaatttctctaaatgtaggcctggctgggctttgaccttttccgtttttaaatcactcacagagggtgggacaggaggaagagtgaaggaaaaggtcaaacctgttttaagggcaacctgcctttgttctgaattggtcttaagaacattaccagctccaggtttaaattgttcagtttcatgcagttccaatagctgatcattgttgagatgaggacaaaatcctttgtcctcactagtttgctttacatttttgaaaagtattatttttgtccaagtgcttatcaactaaaccttgtgttaggtaagaatggaatttattaagtgaatcagtgtgacccttcttgtcataagattatcttaaagctgaagccaaaatatgcttcaaaagaagaggactttattgttcattgtagttcatacattcaaagcatctgaactgtagtttctatagcaagccaattacatccataagtggagaaggaaatagataaatgtcaaagtatgattggtggagggagcaaggttgaagataatctggggttgaaattttctagttttcattctgtacatttttagttagacatcagatttgaaatattaatgtttacctttcaatgtgtggtatcagctggactcagtaacacccctttcttcagctggggatggggaatggattattggaaaatggaaagaagaaagtaactaaaagccttcctttcacagtttctggcatcactaccactactgattaaacaagaataagagaacattttatcatcatctgctttattcacataaatgaagttgtgatgaataaatctgcttttatgcagacacaaggaattaagtggcttcgtcattgtccttctacctcaaagataatttattccaaaagctaagataaatggaagactcttgaacttgtgaactgatgtgaaatgcagaatctcttttgagtctttgctgtttggaagattgaaaaatattgttcagcatgggtgaccaccagaaagtaatcttaagccatctagatgtcacaattgaaacaaactggggagttggttgctattgtaaaataaaatatactgttttgaaaactttgtattttgatgtgacaatttctaactcactgtccctaaccacactaattaccgtaagttcttcatttcttttttctttttctttttaaattaataaattaatttattttttggagatggagtctcgctttgttgcccaggctggagtgcagtggtgccatcttggctcactgtaacctctgcctcctgggttcaagcgattctcctgcctcagcctcaccagtagctgggattacagtcatgagccaccatgcctggctaatggttgtatttttagtagagacggggttttgccatgttggccaggctggtcacgaactcctgacttaaagtgaaacacctgcctcggcctcccaaagttctgggattacaggcgggagccaccgtgcctggcctcatttctttttttaaactaccttaatcacccagtgtgggtaaatggtttgaagtctcatttcttacagcatcagttgctttgg

SEQ ID NO: 181 - DNA, 4037 bp, Homo sapiens
gcaaaaccccgtctctactaaaaatacaaccattagccaggcatggtggctcatgactgtaatcccagctactggtgaggctgaggcaggagaatcgcttgaacccaggaggcagaggttacagtgagccaagatggcaccactgcactccagcctgggcaacaaagcgagactccatctccaaaaaataaattaatttattaatttaaaaagaaaaagaaaaaagaaatgaagaacttacggtaattagtgtggttagggacagtgagttagaaattgtcacatcaaaatacaaagttttcaaaacagtatattttattttacaatagcaaccaactccccagtttgtttcaattgtgacatctagatggcttaagattactttctggtggtcacccatgctgaacaatatttttcaatcttccaaacagcaaagactcaaaagagattctgcatttcacatcagttcacaagttcaagagtcttccatttatcttagcttttggaataaattatctttgaggtagaaggacaatgacgaagccacttaattccttgtgtctgcataaaagcagatttattcatcacaacttcatttatgtgaataaagcagatgatgataaaatgttctcttattcttgtttaatcagtagtggtagtgatgccagaaactgtgaaaggaaggcttttagttactttcttctttccattttccaataatccattccccatccccagctgaagaaaggggtgttactgagtccagctgataccacacattgaaaggtaaacattaatatttcaaatctgatgtctaactaaaaatgtacagaatgaaaactagaaaatttcaaccccagattatcttcaaccttgctccctccaccaatcatactttgacatttatctatttccttctccacttatggatgtaattggcttgctatagaaactacagttcagatgctttgaatgtatgaactacaatgaacaataaagtcctcttcttttgaagcatattttggcttcagctttaagataatcttatgacaagaagggtcacactgattcacttaataaattccattcttacctaacacaaggtttagttgataagcacttggacaaaaataatacttttcaaaaatgtaaagcaaactagtgaggacaaaggattttgtcctcatctcaacaatgatcagctattggaactgcatgaaactgaacaatttaaacctggagctggtaatgttcttaagaccaattcagaacaaaggcaggttgcccttaaaacaggtttgaccttttccttcactcttcctcctgtcccaccctctgtgagtgatttaaaaacggaaaaggtcaaagcccagccaggcctacatttagagaaattttaaaaaaatttttcctttcaattttggccaattatttccaatttttattttattcttaaaacttaagcatggtaaaatgttaagctgttttcatccactgatattattctactataaaaagcccttcttgagcagatttgatgataaaaaggagaacatttctaaggtataattagagaagctgttgcatgagaaatcatgtctccatctccattttgctatgcgttatctgaggattgtttctgaaagagatctatttaggcagtgtatgtatgtgtcagcatgtaaaaagtaaagaactgaaaatagacaaaccttgtaaatgcacttcaaaaccaattgtggctcaagtgtaggtggttccccaaggctggtaccaatgagactggggtttgggaattagttggtcatcatccctcctgctgcccagcagtggtcagtcatttttcatgagggatggactaggaaaatgaagtgtctattataaggagagttcctgtaacttaaggagcaagctcactacaaaacccagctacctgcttatcgtagtggccagagtggtagaagagatacggagtaggaattaaaccacacaatgttatttagggactaagccatgcccctaacaagaaaacaagccaaaaggaaagtattaggcattctctgggaaggcatgcatttttttcccatgtctctggggccaaaaaccttataccaagtacctattggcacccgaatatatttgtagaatgaatgaatacatgaaaaaaaataaacagtaacctttctcctatattctactttccaagccaattaataagcaagtgtcttttcgtcatgattttttttgttttctgtttaggatttaacaaaatggttgagataacagtcacttctgtttgatgaagagtatcacttcattccatttttgtgtttttgttgcatctccaagtcagaataaatgccttttggagcagatatatttcatttagcatttagtatcatcttcatcaatactcgtatgaacgaaaaaataaaaagccctctcttattcccactctacaacgcatgtcaaaggtgatctgtttagtttttccttagtatcgaacatatcacagctactcaatgaagtttcttctcaactaaagaaacacagtctcttagagaatttgttcctgtgtttccaccataagataaatgagataaagtgcactttggtttacgtctttcaagcacttaagaacagcactttattcagttttaataaatttttactaaattggtaaatgcaaaagaatcttttttttattgctcatatgtcttcctgtctctaagccagaccaatgagcaaatacctttaaaactagttgttacatcttgaaccatttaactgtaataaaagcagaatgtttagttaatgaattaaagaacaaaccctgagcccttttatcagtctcctggctttaaactaagccaatgaggaagtgatttgggggattcctgaaactaggaaaaatgtctctttattttgaaagaaacttgcatttttctttctttttttttttttttttaatctcaaaggcaattgagtgggtcttctgggccagacctatttaatttacgaaacatagtaccttgcagagaataggcattgaaatattatttaaacaatcaaaccaaagatgttcttctatcttcagctgtcagtgatctaatgccctcatctctcttatcctcaggacccagaatggtatattccacataaaagatgctttgtttatcaaatgaatcaaaaagcacgcctgaggcatttatttttactcctttacttctgtaggccaggtcaaggtgggtctaattcacttttatcatcagcacttaagaaactggatggaagaccacaacaccttgttttttgcaaaaattttccatctcctcaatcaggccaggaagcatgtatcttctggacaggactttatctctctactcagcttagtacactgccttatattagtccatttgtcccatgttttcatcactgaataaacttgttaaatgacttttggtctggatctcacacctatattacttcatttccttctgtgagcactctataatgataacatcatttttatatcctagggcatgtagttccgagccccacagaaagtaatcaccattcagtaagccaatagttcattcctatctgtatagaactgtaggctttgtaaatctacacatagatctctgttgtaggttcaataatgataataaatgtttgtgcccccagttgttatctctaaggataagagtaatcaatgatcattcagcagatatagcttatatatgggtggcagtttacaaattataaattgattttacacatattttcttctgctacccaagacacaataaagatggtttatctttgcatccccaatgcctagcaatgagattggcacacaatagataactactatagtggcattcttcagacaaccaatcccttgcgtatgcgtattcaaaagataatcattgttattcaaattttcctactttatttgcacaatataataactatcatacaattttataaacctagtacccagcaccaagtgagaaaatcaacagttacattta

SEQ ID NO: 182 - DNA, 4050 bp, Homo sapiens
aaaatttatcatatttcatttagccacagccaaaaataaggcaatacctatgttagcattttgtgaactctaaggcaccatataaatgtaactgttgattttctcacttggtgctgggtactaggtttataaaattgtatgatagttattatattgtgcaaataaagtaggaaaatttgaataacaatgattatcttttgaatacgcatacgcaagggattggttgtctgaagaatgccactatagtagttatctattgtgtgccaatctcattgctaggcattggggatgcaaagataaaccatctttattgtgtcttgggtagcagaagaaaatatgtgtaaaatcaatttataatttgtaaactgccacccatatataagctatatctgctgaatgatcattgattactcttatccttagagataacaactgggggcacaaacatttattatcattattgaacctacaacagagatctatgtgtagatttacaaagcctacagttctatacagataggaatgaactattggcttactgaatggtgattactttctgtggggctcggaactacatgccctaggatataaaaatgatgttatcattatagagtgctcacagaaggaaatgaagtaatataggtgtgagatccagaccaaaagtcatttaacaagtttattcagtgatgaaaacatgggacaaatggactaatataaggcagtgtactaagctgagtagagagataaagtcctgtccagaagatacatgcttcctggcctgattgaggagatggaaaatttttgcaaaaaacaaggtgttgtggtcttccatccagtttcttaagtgctgatgataaaagtgaattagacccaccttgacctggcctacagaagtaaaggagtaaaaataaatgcctcaggcgtgctttttgattcatttgataaacaaagcatcttttatgtggaatataccattctgggtcctgaggataagagagatgagggcattagatcactgacagctgaagatagaagaacatctttggtttgattgtttaaataatatttcaatgcctattctctgcaaggtactatgtttcgtaaattaaataggtctggcccagaagacccactcaattgcctttgagattaaaaaaaaaaaaaaaaagaaagaaaaatgcaagtttctttcaaaataaagagacatttttcctagtttcaggaatcccccaaatcacttcctcattggcttagtttaaagccaggagactgataaaagggctcagggtttgttctttaattcattaactaaacattctgcttttattacagttaaatggttcaagatgtaacaactagttttaaaggtatttgctcattggtctggcttagagacaggaagacatatgagcaataaaaaaaagattcttttgcatttaccaatttagtaaaaatttattaaaactgaataaagtgctgttcttaagtgcttgaaagacgtaaaccaaagtgcactttatctcatttatcttatggtggaaacacaggaacaaattctctaagagactgtgtttctttagttgagaagaaacttcattgagtagctgtgatatgttcgatactaaggaaaaactaaacagatcacctttgacatgcgttgtagagtgggaataagagagggctttttattttttcgttcatacgagtattgatgaagatgatactaaatgctaaatgaaatatatctgctccaaaaggcatttattctgacttggagatgcaacaaaaacacaaaaatggaatgaagtgatactcttcatcaaacagaagtgactgttatctcaaccattttgttaaatcctaaacagaaaacaaaaaaaatcatgacgaaaagacacttgcttattaattggcttggaaagtagaatataggagaaaggttactgtttattttttttcatgtattcattcattctacaaatatattcgggtgccaataggtacttggtataaggtttttggccccagagacatgggaaaaaaatgcatgccttcccagagaatgcctaatactttccttttggcttgttttcttgttaggggcatggcttagtccctaaataacattgtgtggtttaattcctactccgtatctcttctaccactctggccactacgataagcaggtagctgggttttgtagtgagcttgctccttaagttacaggaactctccttataatagacacttcattttcctagtccatccctcatgaaaaatgactgaccactgctgggcagcaggagggatgatgaccaactaattcccaaaccccagtctcattggtaccagccttggggaaccacctacacttgagccacaattggttttgaagtgcatttacaaggtttgtctattttcagttctttactttttacatgctgacacatacatacactgcctaaatagatctctttcagaaacaatcctcagataacgcatagcaaaatggagatggagacatgatttctcatgcaacagcttctctaattataccttagaaatgttctcctttttatcatcaaatctgctcaagaagggctttttatagtagaataatatcagtggatgaaaacagcttaacattttaccatgcttaagttttaagaataaaataaaaattggaaataattggccaaaattgaaaggaaaaatttttttaaaatttctctaaatgtaggcctggctgggctttgaccttttccgtttttaaatcactcacagagggtgggacaggaggaagagtgaaggaaaaggtcaaacctgttttaagggcaacctgcctttgttctgaattggtcttaagaacattaccagctccaggtttaaattgttcagtttcatgcagttccaatagctgatcattgttgagatgaggacaaaatcctttgtcctcactagtttgctttacatttttgaaaagtattatttttgtccaagtgcttatcaactaaaccttgtgttaggtaagaatggaatttattaagtgaatcagtgtgacccttcttgtcataagattatcttaaagctgaagccaaaatatgcttcaaaagaagaggactttattgttcattgtagttcatacattcaaagcatctgaactgtagtttctatagcaagccaattacatccataagtggagaaggaaatagataaatgtcaaagtatgattggtggagggagcaaggttgaagataatctggggttgaaattttctagttttcattctgtacatttttagttagacatcagatttgaaatattaatgtttacctttcaatgtgtggtatcagctggactcagtaacacccctttcttcagctggggatggggaatggattattggaaaatggaaagaagaaagtaactaaaagccttcctttcacagtttctggcatcactaccactactgattaaacaagaataagagaacattttatcatcatctgctttattcacataaatgaagttgtgatgaataaatctgcttttatgcagacacaaggaattaagtggcttcgtcattgtccttctacctcaaagataatttattccaaaagctaagataaatggaagactcttgaacttgtgaactgatgtgaaatgcagaatctcttttgagtctttgctgtttggaagattgaaaaatattgttcagcatgggtgaccaccagaaagtaatcttaagccatctagatgtcacaattgaaacaaactggggagttggttgctattgtaaaataaaatatactgttttgaaaactttgtattttgatgtgacaatttctaactcactgtccctaaccacactaattaccgtaagttcttcatttcttttttctttttctttttaaattaataaattaatttattttttggagatggagtctcgctttgttgcccaggctggagtgcagtggtgccatcttggctcactgtaacctctgcctcctgggttcaagcgattctcctgcctcagcctcaccagta

SEQ ID NO: 183 - DNA, 4044 bp, Homo sapiens
agcaaagactcaaaagagattctgcatttcacatcagttcacaagttcaagagtcttccatttatcttagcttttggaataaattatctttgaggtagaaggacaatgacgaagccacttaattccttgtgtctgcataaaagcagatttattcatcacaacttcatttatgtgaataaagcagatgatgataaaatgttctcttattcttgtttaatcagtagtggtagtgatgccagaaactgtgaaaggaaggcttttagttactttcttctttccattttccaataatccattccccatccccagctgaagaaaggggtgttactgagtccagctgataccacacattgaaaggtaaacattaatatttcaaatctgatgtctaactaaaaatgtacagaatgaaaactagaaaatttcaaccccagattatcttcaaccttgctccctccaccaatcatactttgacatttatctatttccttctccacttatggatgtaattggcttgctatagaaactacagttcagatgctttgaatgtatgaactacaatgaacaataaagtcctcttcttttgaagcatattttggcttcagctttaagataatcttatgacaagaagggtcacactgattcacttaataaattccattcttacctaacacaaggtttagttgataagcacttggacaaaaataatacttttcaaaaatgtaaagcaaactagtgaggacaaaggattttgtcctcatctcaacaatgatcagctattggaactgcatgaaactgaacaatttaaacctggagctggtaatgttcttaagaccaattcagaacaaaggcaggttgcccttaaaacaggtttgaccttttccttcactcttcctcctgtcccaccctctgtgagtgatttaaaaacggaaaaggtcaaagcccagccaggcctacatttagagaaattttaaaaaaatttttcctttcaattttggccaattatttccaatttttattttattcttaaaacttaagcatggtaaaatgttaagctgttttcatccactgatattattctactataaaaagcccttcttgagcagatttgatgataaaaaggagaacatttctaaggtataattagagaagctgttgcatgagaaatcatgtctccatctccattttgctatgcgttatctgaggattgtttctgaaagagatctatttaggcagtgtatgtatgtgtcagcatgtaaaaagtaaagaactgaaaatagacaaaccttgtaaatgcacttcaaaaccaattgtggctcaagtgtaggtggttccccaaggctggtaccaatgagactggggtttgggaattagttggtcatcatccctcctgctgcccagcagtggtcagtcatttttcatgagggatggactaggaaaatgaagtgtctattataaggagagttcctgtaacttaaggagcaagctcactacaaaacccagctacctgcttatcgtagtggccagagtggtagaagagatacggagtaggaattaaaccacacaatgttatttagggactaagccatgcccctaacaagaaaacaagccaaaaggaaagtattaggcattctctgggaaggcatgcatttttttcccatgtctctggggccaaaaaccttataccaagtacctattggcacccgaatatatttgtagaatgaatgaatacatgaaaaaaaataaacagtaacctttctcctatattctactttccaagccaattaataagcaagtgtcttttcgtcatgattttttttgttttctgtttaggatttaacaaaatggttgagataacagtcacttctgtttgatgaagagtatcacttcattccatttttgtgtttttgttgcatctccaagtcagaataaatgccttttggagcagatatatttcatttagcatttagtatcatcttcatcaatactcgtatgaacgaaaaaataaaaagccctctcttattcccactctacaacgcatgtcaaaggtgatctgtttagtttttccttagtatcgaacatatcacagctactcaatgaagtttcttctcaactaaagaaacacagtctcttagagaatttgttcctgtgtttccaccataagataaatgagataaagtgcactttggtttacgtctttcaagcacttaagaacagcactttattcagttttaataaatttttactaaattggtaaatgcaaaagaatcttttttttattgctcatatgtcttcctgtctctaagccagaccaatgagcaaatacctttaaaactagttgttacatcttgaaccatttaactgtaataaaagcagaatgtttagttaatgaattaaagaacaaaccctgagcccttttatcagtctcctggctttaaactaagccaatgaggaagtgatttgggggattcctgaaactaggaaaaatgtctctttattttgaaagaaacttgcatttttctttctttttttttttttttttaatctcaaaggcaattgagtgggtcttctgggccagacctatttaatttacgaaacatagtaccttgcagagaataggcattgaaatattatttaaacaatcaaaccaaagatgttcttctatcttcagctgtcagtgatctaatgccctcatctctcttatcctcaggacccagaatggtatattccacataaaagatgctttgtttatcaaatgaatcaaaaagcacgcctgaggcatttatttttactcctttacttctgtaggccaggtcaaggtgggtctaattcacttttatcatcagcacttaagaaactggatggaagaccacaacaccttgttttttgcaaaaattttccatctcctcaatcaggccaggaagcatgtatcttctggacaggactttatctctctactcagcttagtacactgccttatattagtccatttgtcccatgttttcatcactgaataaacttgttaaatgacttttggtctggatctcacacctatattacttcatttccttctgtgagcactctataatgataacatcatttttatatcctagggcatgtagttccgagccccacagaaagtaatcaccattcagtaagccaatagttcattcctatctgtatagaactgtaggctttgtaaatctacacatagatctctgttgtaggttcaataatgataataaatgtttgtgcccccagttgttatctctaaggataagagtaatcaatgatcattcagcagatatagcttatatatgggtggcagtttacaaattataaattgattttacacatattttcttctgctacccaagacacaataaagatggtttatctttgcatccccaatgcctagcaatgagattggcacacaatagataactactatagtggcattcttcagacaaccaatcccttgcgtatgcgtattcaaaagataatcattgttattcaaattttcctactttatttgcacaatataataactatcatacaattttataaacctagtacccagcaccaagtgagaaaatcaacagttacatttatatggtgccttagagttcacaaaatgctaacataggtattgccttatttttggctgtggctaaatgaaatatgataaattttcagtgcctttaacagtgagttcacatagtaggcaatcaaaattgatctatttaacaggtatttaaacccttggtttgtataactacttatagaacccttctcactgtggtttaactatacaatgagaattttgtagagacaatacctagcttacagaaagttttattcatacagaaagcatcaaatttttcatttacaagtgctttataatttagaaagcacattcgcaagctgaattaagtgactttcggtctggatctcacatctattacttcatttcctcatactagctctttcctggttacctggaaaaatgtatcagtaataatttaacttaacctcaccagtaaagtc

SEQ ID NO: 184 - DNA, 4048 bp, Homo sapiens
tgtaaggaatgatatattgcttaattttaaacaatcaagactttactggtgaggttaagttaaattattactgatacatttttccaggtaaccaggaaagagctagtatgaggaaatgaagtaatagatgtgagatccagaccgaaagtcacttaattcagcttgcgaatgtgctttctaaattataaagcacttgtaaatgaaaaatttgatgctttctgtatgaataaaactttctgtaagctaggtattgtctctacaaaattctcattgtatagttaaaccacagtgagaagggttctataagtagttatacaaaccaagggtttaaatacctgttaaatagatcaattttgattgcctactatgtgaactcactgttaaaggcactgaaaatttatcatatttcatttagccacagccaaaaataaggcaatacctatgttagcattttgtgaactctaaggcaccatataaatgtaactgttgattttctcacttggtgctgggtactaggtttataaaattgtatgatagttattatattgtgcaaataaagtaggaaaatttgaataacaatgattatcttttgaatacgcatacgcaagggattggttgtctgaagaatgccactatagtagttatctattgtgtgccaatctcattgctaggcattggggatgcaaagataaaccatctttattgtgtcttgggtagcagaagaaaatatgtgtaaaatcaatttataatttgtaaactgccacccatatataagctatatctgctgaatgatcattgattactcttatccttagagataacaactgggggcacaaacatttattatcattattgaacctacaacagagatctatgtgtagatttacaaagcctacagttctatacagataggaatgaactattggcttactgaatggtgattactttctgtggggctcggaactacatgccctaggatataaaaatgatgttatcattatagagtgctcacagaaggaaatgaagtaatataggtgtgagatccagaccaaaagtcatttaacaagtttattcagtgatgaaaacatgggacaaatggactaatataaggcagtgtactaagctgagtagagagataaagtcctgtccagaagatacatgcttcctggcctgattgaggagatggaaaatttttgcaaaaaacaaggtgttgtggtcttccatccagtttcttaagtgctgatgataaaagtgaattagacccaccttgacctggcctacagaagtaaaggagtaaaaataaatgcctcaggcgtgctttttgattcatttgataaacaaagcatcttttatgtggaatataccattctgggtcctgaggataagagagatgagggcattagatcactgacagctgaagatagaagaacatctttggtttgattgtttaaataatatttcaatgcctattctctgcaaggtactatgtttcgtaaattaaataggtctggcccagaagacccactcaattgcctttgagattaaaaaaaaaaaaaaaaagaaagaaaaatgcaagtttctttcaaaataaagagacatttttcctagtttcaggaatcccccaaatcacttcctcattggcttagtttaaagccaggagactgataaaagggctcagggtttgttctttaattcattaactaaacattctgcttttattacagttaaatggttcaagatgtaacaactagttttaaaggtatttgctcattggtctggcttagagacaggaagacatatgagcaataaaaaaaagattcttttgcatttaccaatttagtaaaaatttattaaaactgaataaagtgctgttcttaagtgcttgaaagacgtaaaccaaagtgcactttatctcatttatcttatggtggaaacacaggaacaaattctctaagagactgtgtttctttagttgagaagaaacttcattgagtagctgtgatatgttcgatactaaggaaaaactaaacagatcacctttgacatgcgttgtagagtgggaataagagagggctttttattttttcgttcatacgagtattgatgaagatgatactaaatgctaaatgaaatatatctgctccaaaaggcatttattctgacttggagatgcaacaaaaacacaaaaatggaatgaagtgatactcttcatcaaacagaagtgactgttatctcaaccattttgttaaatcctaaacagaaaacaaaaaaaatcatgacgaaaagacacttgcttattaattggcttggaaagtagaatataggagaaaggttactgtttattttttttcatgtattcattcattctacaaatatattcgggtgccaataggtacttggtataaggtttttggccccagagacatgggaaaaaaatgcatgccttcccagagaatgcctaatactttccttttggcttgttttcttgttaggggcatggcttagtccctaaataacattgtgtggtttaattcctactccgtatctcttctaccactctggccactacgataagcaggtagctgggttttgtagtgagcttgctccttaagttacaggaactctccttataatagacacttcattttcctagtccatccctcatgaaaaatgactgaccactgctgggcagcaggagggatgatgaccaactaattcccaaaccccagtctcattggtaccagccttggggaaccacctacacttgagccacaattggttttgaagtgcatttacaaggtttgtctattttcagttctttactttttacatgctgacacatacatacactgcctaaatagatctctttcagaaacaatcctcagataacgcatagcaaaatggagatggagacatgatttctcatgcaacagcttctctaattataccttagaaatgttctcctttttatcatcaaatctgctcaagaagggctttttatagtagaataatatcagtggatgaaaacagcttaacattttaccatgcttaagttttaagaataaaataaaaattggaaataattggccaaaattgaaaggaaaaatttttttaaaatttctctaaatgtaggcctggctgggctttgaccttttccgtttttaaatcactcacagagggtgggacaggaggaagagtgaaggaaaaggtcaaacctgttttaagggcaacctgcctttgttctgaattggtcttaagaacattaccagctccaggtttaaattgttcagtttcatgcagttccaatagctgatcattgttgagatgaggacaaaatcctttgtcctcactagtttgctttacatttttgaaaagtattatttttgtccaagtgcttatcaactaaaccttgtgttaggtaagaatggaatttattaagtgaatcagtgtgacccttcttgtcataagattatcttaaagctgaagccaaaatatgcttcaaaagaagaggactttattgttcattgtagttcatacattcaaagcatctgaactgtagtttctatagcaagccaattacatccataagtggagaaggaaatagataaatgtcaaagtatgattggtggagggagcaaggttgaagataatctggggttgaaattttctagttttcattctgtacatttttagttagacatcagatttgaaatattaatgtttacctttcaatgtgtggtatcagctggactcagtaacacccctttcttcagctggggatggggaatggattattggaaaatggaaagaagaaagtaactaaaagccttcctttcacagtttctggcatcactaccactactgattaaacaagaataagagaacattttatcatcatctgctttattcacataaatgaagttgtgatgaataaatctgcttttatgcagacacaaggaattaagtggcttcgtcattgtccttctacctcaaagataatttattccaaaagctaagataaatggaagactcttgaacttgtgaactg

SEQ ID NO: 185 - DNA, 4053 bp, Homo sapiens
ttatcttagcttttggaataaattatctttgaggtagaaggacaatgacgaagccacttaattccttgtgtctgcataaaagcagatttattcatcacaacttcatttatgtgaataaagcagatgatgataaaatgttctcttattcttgtttaatcagtagtggtagtgatgccagaaactgtgaaaggaaggcttttagttactttcttctttccattttccaataatccattccccatccccagctgaagaaaggggtgttactgagtccagctgataccacacattgaaaggtaaacattaatatttcaaatctgatgtctaactaaaaatgtacagaatgaaaactagaaaatttcaaccccagattatcttcaaccttgctccctccaccaatcatactttgacatttatctatttccttctccacttatggatgtaattggcttgctatagaaactacagttcagatgctttgaatgtatgaactacaatgaacaataaagtcctcttcttttgaagcatattttggcttcagctttaagataatcttatgacaagaagggtcacactgattcacttaataaattccattcttacctaacacaaggtttagttgataagcacttggacaaaaataatacttttcaaaaatgtaaagcaaactagtgaggacaaaggattttgtcctcatctcaacaatgatcagctattggaactgcatgaaactgaacaatttaaacctggagctggtaatgttcttaagaccaattcagaacaaaggcaggttgcccttaaaacaggtttgaccttttccttcactcttcctcctgtcccaccctctgtgagtgatttaaaaacggaaaaggtcaaagcccagccaggcctacatttagagaaattttaaaaaaatttttcctttcaattttggccaattatttccaatttttattttattcttaaaacttaagcatggtaaaatgttaagctgttttcatccactgatattattctactataaaaagcccttcttgagcagatttgatgataaaaaggagaacatttctaaggtataattagagaagctgttgcatgagaaatcatgtctccatctccattttgctatgcgttatctgaggattgtttctgaaagagatctatttaggcagtgtatgtatgtgtcagcatgtaaaaagtaaagaactgaaaatagacaaaccttgtaaatgcacttcaaaaccaattgtggctcaagtgtaggtggttccccaaggctggtaccaatgagactggggtttgggaattagttggtcatcatccctcctgctgcccagcagtggtcagtcatttttcatgagggatggactaggaaaatgaagtgtctattataaggagagttcctgtaacttaaggagcaagctcactacaaaacccagctacctgcttatcgtagtggccagagtggtagaagagatacggagtaggaattaaaccacacaatgttatttagggactaagccatgcccctaacaagaaaacaagccaaaaggaaagtattaggcattctctgggaaggcatgcatttttttcccatgtctctggggccaaaaaccttataccaagtacctattggcacccgaatatatttgtagaatgaatgaatacatgaaaaaaaataaacagtaacctttctcctatattctactttccaagccaattaataagcaagtgtcttttcgtcatgattttttttgttttctgtttaggatttaacaaaatggttgagataacagtcacttctgtttgatgaagagtatcacttcattccatttttgtgtttttgttgcatctccaagtcagaataaatgccttttggagcagatatatttcatttagcatttagtatcatcttcatcaatactcgtatgaacgaaaaaataaaaagccctctcttattcccactctacaacgcatgtcaaaggtgatctgtttagtttttccttagtatcgaacatatcacagctactcaatgaagtttcttctcaactaaagaaacacagtctcttagagaatttgttcctgtgtttccaccataagataaatgagataaagtgcactttggtttacgtctttcaagcacttaagaacagcactttattcagttttaataaatttttactaaattggtaaatgcaaaagaatcttttttttattgctcatatgtcttcctgtctctaagccagaccaatgagcaaatacctttaaaactagttgttacatcttgaaccatttaactgtaataaaagcagaatgtttagttaatgaattaaagaacaaaccctgagcccttttatcagtctcctggctttaaactaagccaatgaggaagtgatttgggggattcctgaaactaggaaaaatgtctctttattttgaaagaaacttgcatttttctttctttttttttttttttttaatctcaaaggcaattgagtgggtcttctgggccagacctatttaatttacgaaacatagtaccttgcagagaataggcattgaaatattatttaaacaatcaaaccaaagatgttcttctatcttcagctgtcagtgatctaatgccctcatctctcttatcctcaggacccagaatggtatattccacataaaagatgctttgtttatcaaatgaatcaaaaagcacgcctgaggcatttatttttactcctttacttctgtaggccaggtcaaggtgggtctaattcacttttatcatcagcacttaagaaactggatggaagaccacaacaccttgttttttgcaaaaattttccatctcctcaatcaggccaggaagcatgtatcttctggacaggactttatctctctactcagcttagtacactgccttatattagtccatttgtcccatgttttcatcactgaataaacttgttaaatgacttttggtctggatctcacacctatattacttcatttccttctgtgagcactctataatgataacatcatttttatatcctagggcatgtagttccgagccccacagaaagtaatcaccattcagtaagccaatagttcattcctatctgtatagaactgtaggctttgtaaatctacacatagatctctgttgtaggttcaataatgataataaatgtttgtgcccccagttgttatctctaaggataagagtaatcaatgatcattcagcagatatagcttatatatgggtggcagtttacaaattataaattgattttacacatattttcttctgctacccaagacacaataaagatggtttatctttgcatccccaatgcctagcaatgagattggcacacaatagataactactatagtggcattcttcagacaaccaatcccttgcgtatgcgtattcaaaagataatcattgttattcaaattttcctactttatttgcacaatataataactatcatacaattttataaacctagtacccagcaccaagtgagaaaatcaacagttacatttatatggtgccttagagttcacaaaatgctaacataggtattgccttatttttggctgtggctaaatgaaatatgataaattttcagtgcctttaacagtgagttcacatagtaggcaatcaaaattgatctatttaacaggtatttaaacccttggtttgtataactacttatagaacccttctcactgtggtttaactatacaatgagaattttgtagagacaatacctagcttacagaaagttttattcatacagaaagcatcaaatttttcatttacaagtgctttataatttagaaagcacattcgcaagctgaattaagtgactttcggtctggatctcacatctattacttcatttcctcatactagctctttcctggttacctggaaaaatgtatcagtaataatttaacttaacctcaccagtaaagtcttgattgtttaaaattaagcaatatatcattccttacatctgaatagtatagaggataaactttcctctt

SEQ ID NO: 186 - DNA, 4044 bp, Homo sapiens
ccttttccttcactcttcctcctgtcccaccctctgtgagtgatttaaaaacggaaaaggtcaaagcccagccaggcctacatttagagaaattttaaaaaaatttttcctttcaattttggccaattatttccaatttttattttattcttaaaacttaagcatggtaaaatgttaagctgttttcatccactgatattattctactataaaaagcccttcttgagcagatttgatgataaaaaggagaacatttctaaggtataattagagaagctgttgcatgagaaatcatgtctccatctccattttgctatgcgttatctgaggattgtttctgaaagagatctatttaggcagtgtatgtatgtgtcagcatgtaaaaagtaaagaactgaaaatagacaaaccttgtaaatgcacttcaaaaccaattgtggctcaagtgtaggtggttccccaaggctggtaccaatgagactggggtttgggaattagttggtcatcatccctcctgctgcccagcagtggtcagtcatttttcatgagggatggactaggaaaatgaagtgtctattataaggagagttcctgtaacttaaggagcaagctcactacaaaacccagctacctgcttatcgtagtggccagagtggtagaagagatacggagtaggaattaaaccacacaatgttatttagggactaagccatgcccctaacaagaaaacaagccaaaaggaaagtattaggcattctctgggaaggcatgcatttttttcccatgtctctggggccaaaaaccttataccaagtacctattggcacccgaatatatttgtagaatgaatgaatacatgaaaaaaaataaacagtaacctttctcctatattctactttccaagccaattaataagcaagtgtcttttcgtcatgattttttttgttttctgtttaggatttaacaaaatggttgagataacagtcacttctgtttgatgaagagtatcacttcattccatttttgtgtttttgttgcatctccaagtcagaataaatgccttttggagcagatatatttcatttagcatttagtatcatcttcatcaatactcgtatgaacgaaaaaataaaaagccctctcttattcccactctacaacgcatgtcaaaggtgatctgtttagtttttccttagtatcgaacatatcacagctactcaatgaagtttcttctcaactaaagaaacacagtctcttagagaatttgttcctgtgtttccaccataagataaatgagataaagtgcactttggtttacgtctttcaagcacttaagaacagcactttattcagttttaataaatttttactaaattggtaaatgcaaaagaatcttttttttattgctcatatgtcttcctgtctctaagccagaccaatgagcaaatacctttaaaactagttgttacatcttgaaccatttaactgtaataaaagcagaatgtttagttaatgaattaaagaacaaaccctgagcccttttatcagtctcctggctttaaactaagccaatgaggaagtgatttgggggattcctgaaactaggaaaaatgtctctttattttgaaagaaacttgcatttttctttctttttttttttttttttaatctcaaaggcaattgagtgggtcttctgggccagacctatttaatttacgaaacatagtaccttgcagagaataggcattgaaatattatttaaacaatcaaaccaaagatgttcttctatcttcagctgtcagtgatctaatgccctcatctctcttatcctcaggacccagaatggtatattccacataaaagatgctttgtttatcaaatgaatcaaaaagcacgcctgaggcatttatttttactcctttacttctgtaggccaggtcaaggtgggtctaattcacttttatcatcagcacttaagaaactggatggaagaccacaacaccttgttttttgcaaaaattttccatctcctcaatcaggccaggaagcatgtatcttctggacaggactttatctctctactcagcttagtacactgccttatattagtccatttgtcccatgttttcatcactgaataaacttgttaaatgacttttggtctggatctcacacctatattacttcatttccttctgtgagcactctataatgataacatcatttttatatcctagggcatgtagttccgagccccacagaaagtaatcaccattcagtaagccaatagttcattcctatctgtatagaactgtaggctttgtaaatctacacatagatctctgttgtaggttcaataatgataataaatgtttgtgcccccagttgttatctctaaggataagagtaatcaatgatcattcagcagatatagcttatatatgggtggcagtttacaaattataaattgattttacacatattttcttctgctacccaagacacaataaagatggtttatctttgcatccccaatgcctagcaatgagattggcacacaatagataactactatagtggcattcttcagacaaccaatcccttgcgtatgcgtattcaaaagataatcattgttattcaaattttcctactttatttgcacaatataataactatcatacaattttataaacctagtacccagcaccaagtgagaaaatcaacagttacatttatatggtgccttagagttcacaaaatgctaacataggtattgccttatttttggctgtggctaaatgaaatatgataaattttcagtgcctttaacagtgagttcacatagtaggcaatcaaaattgatctatttaacaggtatttaaacccttggtttgtataactacttatagaacccttctcactgtggtttaactatacaatgagaattttgtagagacaatacctagcttacagaaagttttattcatacagaaagcatcaaatttttcatttacaagtgctttataatttagaaagcacattcgcaagctgaattaagtgactttcggtctggatctcacatctattacttcatttcctcatactagctctttcctggttacctggaaaaatgtatcagtaataatttaacttaacctcaccagtaaagtcttgattgtttaaaattaagcaatatatcattccttacatctgaatagtatagaggataaactttcctcttattacataggagaattaatcttgtattttacagtacccaaaatagctggtatgtaagaggcacttaatattcattcatccattcattcattcataaatatgtagcccattgacatttgtatcatgctttagtttacaaagcactttaatatgcacctttctgaaattttttgttctatgagaatacttttccccctttggtagctctagcacccagcatggtatctggcacattataggtgaccacaacaagcttagtcccttatgttttcagtatattttaaagtttaaaagcagtttccatgtgttttcgtttctgatacctggaatactgcatttttactcaaaattaccagagcagcaaacacaaattggcctcaaatatacatataatttattcatttatcaaacaattccttgtgtctgcatagtactatatccttttgaaagagcacttttttatgcttgctcctttctttgtatccacaacgcttatcacagtagaatacaagtgctttacagtttacaaagcacattcactattttttttcaggtcacctagatatcaataatcattgcatttttagtgcctagcacagggacaggcacagaaaaggaaactagtagtattcagaaattttctctgaataacaaataatacatcagggggtggtaagctatgaacagcaggccaaatccaattggctcaaaaactaagaatgattttgaccttataaaaacgttgtttaaaaaacaaatatgtaacagaaaccatatggcccacagtctaaagtatttatgatt

SEQ ID NO: 187 - DNA, 4042 bp, Homo sapiens
tattgtttacacttcttactcttagatatttccagttctcctgtttatctttaagcctgattcttttgagatgtactttttgatgttgccggttacctttagattgacagtattatgcctgggccagtcttgagccagctttaaatcacagcttttacctatttgttaggctatagtgttttgtaaacttctgtttctattcacatcttctccacttgagagagacaccaaaatccagtcagtatctaatctggcttttgttaacttccctcaggagcagacattcatataggtgatactgtatttcagtcctttcttttgaccccagaagccctagactgagaagataaaatggtcaggttgttggggaaaaaaaagtgccaggctctctagagaaaaatgtgaagagatgctccaggccaatgagaagaattagacaagaaatacacagatgtgccagacttctgagaagcacctgccagcaacagcttccttctttgagcttaggtgagcaggattctggggtttgggatttctagtgatggttatggaaagggtgactgtgcctgggacaaagcgaggtcccaaggggacagcctgaactccctgctcatagtagtggccaaataatttggtggactgtgccaacgctactcctgggtttaatacccatctctaggcttaaagatgagagaacctgggactgttgagcatgtttaatactttccttgatttttttcttcctgtttatgtgggaagttgatttaaatgactgataatgtgtatgaaagcactgtaaaacataagagaaaaaccaattagtgtattggcaatcatgcagttaacatttgaaagtgcagtgtaaattgtgaagcattatgtaaatcaggggtccacagtttttctgtaaggggtcaaatcataaatactttagactgtgggccatatggtttctgttacatatttgttttttaaacaacgtttttataaggtcaaaatcattcttagtttttgagccaattggatttggcctgctgttcatagcttaccaccccctgatgtattatttgttattcagagaaaatttctgaatactactagtttccttttctgtgcctgtccctgtgctaggcactaaaaatgcaatgattattgatatctaggtgacctgaaaaaaaatagtgaatgtgctttgtaaactgtaaagcacttgtattctactgtgataagcgttgtggatacaaagaaaggagcaagcataaaaaagtgctctttcaaaaggatatagtactatgcagacacaaggaattgtttgataaatgaataaattatatgtatatttgaggccaatttgtgtttgctgctctggtaattttgagtaaaaatgcagtattccaggtatcagaaacgaaaacacatggaaactgcttttaaactttaaaatatactgaaaacataagggactaagcttgttgtggtcacctataatgtgccagataccatgctgggtgctagagctaccaaagggggaaaagtattctcatagaacaaaaaatttcagaaaggtgcatattaaagtgctttgtaaactaaagcatgatacaaatgtcaatgggctacatatttatgaatgaatgaatggatgaatgaatattaagtgcctcttacataccagctattttgggtactgtaaaatacaagattaattctcctatgtaataagaggaaagtttatcctctatactattcagatgtaaggaatgatatattgcttaattttaaacaatcaagactttactggtgaggttaagttaaattattactgatacatttttccaggtaaccaggaaagagctagtatgaggaaatgaagtaatagatgtgagatccagaccgaaagtcacttaattcagcttgcgaatgtgctttctaaattataaagcacttgtaaatgaaaaatttgatgctttctgtatgaataaaactttctgtaagctaggtattgtctctacaaaattctcattgtatagttaaaccacagtgagaagggttctataagtagttatacaaaccaagggtttaaatacctgttaaatagatcaattttgattgcctactatgtgaactcactgttaaaggcactgaaaatttatcatatttcatttagccacagccaaaaataaggcaatacctatgttagcattttgtgaactctaaggcaccatataaatgtaactgttgattttctcacttggtgctgggtactaggtttataaaattgtatgatagttattatattgtgcaaataaagtaggaaaatttgaataacaatgattatcttttgaatacgcatacgcaagggattggttgtctgaagaatgccactatagtagttatctattgtgtgccaatctcattgctaggcattggggatgcaaagataaaccatctttattgtgtcttgggtagcagaagaaaatatgtgtaaaatcaatttataatttgtaaactgccacccatatataagctatatctgctgaatgatcattgattactcttatccttagagataacaactgggggcacaaacatttattatcattattgaacctacaacagagatctatgtgtagatttacaaagcctacagttctatacagataggaatgaactattggcttactgaatggtgattactttctgtggggctcggaactacatgccctaggatataaaaatgatgttatcattatagagtgctcacagaaggaaatgaagtaatataggtgtgagatccagaccaaaagtcatttaacaagtttattcagtgatgaaaacatgggacaaatggactaatataaggcagtgtactaagctgagtagagagataaagtcctgtccagaagatacatgcttcctggcctgattgaggagatggaaaatttttgcaaaaaacaaggtgttgtggtcttccatccagtttcttaagtgctgatgataaaagtgaattagacccaccttgacctggcctacagaagtaaaggagtaaaaataaatgcctcaggcgtgctttttgattcatttgataaacaaagcatcttttatgtggaatataccattctgggtcctgaggataagagagatgagggcattagatcactgacagctgaagatagaagaacatctttggtttgattgtttaaataatatttcaatgcctattctctgcaaggtactatgtttcgtaaattaaataggtctggcccagaagacccactcaattgcctttgagattaaaaaaaaaaaaaaaaagaaagaaaaatgcaagtttctttcaaaataaagagacatttttcctagtttcaggaatcccccaaatcacttcctcattggcttagtttaaagccaggagactgataaaagggctcagggtttgttctttaattcattaactaaacattctgcttttattacagttaaatggttcaagatgtaacaactagttttaaaggtatttgctcattggtctggcttagagacaggaagacatatgagcaataaaaaaaagattcttttgcatttaccaatttagtaaaaatttattaaaactgaataaagtgctgttcttaagtgcttgaaagacgtaaaccaaagtgcactttatctcatttatcttatggtggaaacacaggaacaaattctctaagagactgtgtttctttagttgagaagaaacttcattgagtagctgtgatatgttcgatactaaggaaaaactaaacagatcacctttgacatgcgttgtagagtgggaataagagagggctttttattttttcgttcatacgagtattgatgaagatgatactaaatgctaaatgaaatatatctgctccaaaaggcatttattctgacttggagatgcaacaaaaacacaaaaatggaatgaagtgatactcttcatcaaacagaagtgactgttatctcaaccattttgttaaatcctaaacagaaaacaaaaaaaatcatgacgaaaagacac

SEQ ID NO: 188 - DNA, 4038 bp, Homo sapiens
aaaatgtctctttattttgaaagaaacttgcatttttctttctttttttttttttttttaatctcaaaggcaattgagtgggtcttctgggccagacctatttaatttacgaaacatagtaccttgcagagaataggcattgaaatattatttaaacaatcaaaccaaagatgttcttctatcttcagctgtcagtgatctaatgccctcatctctcttatcctcaggacccagaatggtatattccacataaaagatgctttgtttatcaaatgaatcaaaaagcacgcctgaggcatttatttttactcctttacttctgtaggccaggtcaaggtgggtctaattcacttttatcatcagcacttaagaaactggatggaagaccacaacaccttgttttttgcaaaaattttccatctcctcaatcaggccaggaagcatgtatcttctggacaggactttatctctctactcagcttagtacactgccttatattagtccatttgtcccatgttttcatcactgaataaacttgttaaatgacttttggtctggatctcacacctatattacttcatttccttctgtgagcactctataatgataacatcatttttatatcctagggcatgtagttccgagccccacagaaagtaatcaccattcagtaagccaatagttcattcctatctgtatagaactgtaggctttgtaaatctacacatagatctctgttgtaggttcaataatgataataaatgtttgtgcccccagttgttatctctaaggataagagtaatcaatgatcattcagcagatatagcttatatatgggtggcagtttacaaattataaattgattttacacatattttcttctgctacccaagacacaataaagatggtttatctttgcatccccaatgcctagcaatgagattggcacacaatagataactactatagtggcattcttcagacaaccaatcccttgcgtatgcgtattcaaaagataatcattgttattcaaattttcctactttatttgcacaatataataactatcatacaattttataaacctagtacccagcaccaagtgagaaaatcaacagttacatttatatggtgccttagagttcacaaaatgctaacataggtattgccttatttttggctgtggctaaatgaaatatgataaattttcagtgcctttaacagtgagttcacatagtaggcaatcaaaattgatctatttaacaggtatttaaacccttggtttgtataactacttatagaacccttctcactgtggtttaactatacaatgagaattttgtagagacaatacctagcttacagaaagttttattcatacagaaagcatcaaatttttcatttacaagtgctttataatttagaaagcacattcgcaagctgaattaagtgactttcggtctggatctcacatctattacttcatttcctcatactagctctttcctggttacctggaaaaatgtatcagtaataatttaacttaacctcaccagtaaagtcttgattgtttaaaattaagcaatatatcattccttacatctgaatagtatagaggataaactttcctcttattacataggagaattaatcttgtattttacagtacccaaaatagctggtatgtaagaggcacttaatattcattcatccattcattcattcataaatatgtagcccattgacatttgtatcatgctttagtttacaaagcactttaatatgcacctttctgaaattttttgttctatgagaatacttttccccctttggtagctctagcacccagcatggtatctggcacattataggtgaccacaacaagcttagtcccttatgttttcagtatattttaaagtttaaaagcagtttccatgtgttttcgtttctgatacctggaatactgcatttttactcaaaattaccagagcagcaaacacaaattggcctcaaatatacatataatttattcatttatcaaacaattccttgtgtctgcatagtactatatccttttgaaagagcacttttttatgcttgctcctttctttgtatccacaacgcttatcacagtagaatacaagtgctttacagtttacaaagcacattcactattttttttcaggtcacctagatatcaataatcattgcatttttagtgcctagcacagggacaggcacagaaaaggaaactagtagtattcagaaattttctctgaataacaaataatacatcagggggtggtaagctatgaacagcaggccaaatccaattggctcaaaaactaagaatgattttgaccttataaaaacgttgtttaaaaaacaaatatgtaacagaaaccatatggcccacagtctaaagtatttatgatttgaccccttacagaaaaactgtggacccctgatttacataatgcttcacaatttacactgcactttcaaatgttaactgcatgattgccaatacactaattggtttttctcttatgttttacagtgctttcatacacattatcagtcatttaaatcaacttcccacataaacaggaagaaaaaaatcaaggaaagtattaaacatgctcaacagtcccaggttctctcatctttaagcctagagatgggtattaaacccaggagtagcgttggcacagtccaccaaattatttggccactactatgagcagggagttcaggctgtccccttgggacctcgctttgtcccaggcacagtcaccctttccataaccatcactagaaatcccaaaccccagaatcctgctcacctaagctcaaagaaggaagctgttgctggcaggtgcttctcagaagtctggcacatctgtgtatttcttgtctaattcttctcattggcctggagcatctcttcacatttttctctagagagcctggcacttttttttccccaacaacctgaccattttatcttctcagtctagggcttctggggtcaaaagaaaggactgaaatacagtatcacctatatgaatgtctgctcctgagggaagttaacaaaagccagattagatactgactggattttggtgtctctctcaagtggagaagatgtgaatagaaacagaagtttacaaaacactatagcctaacaaataggtaaaagctgtgatttaaagctggctcaagactggcccaggcataatactgtcaatctaaaggtaaccggcaacatcaaaaagtacatctcaaaagaatcaggcttaaagataaacaggagaactggaaatatctaagagtaagaagtgtaaacaatagaaaagaggtagggtttagggttctcatcttgggatttccccaggtcttcaagcttctatccttcctgggttctgggtcatgggcctccagattccggccgttagtcttgagatacctttttcgcttgggtcctctatccatctaggtaggctttgtgacaggggccttccatccttgggttgtaggtcttccagctacaaccctgggctaatcttaggtcgttggccttgtgtcacaagtctcagttcttaggccttccatgtgtcctgtcccaggtcttaagacttctaactcaagccttgagacttccatccaactcaggccttcggtccaattcaggccaccctctgttttcttggctcttgaggcttttgttggtttcaggcctgaggcttctatctatcttggaacatgggctttccatcttagtcctcgggtctcaagtctcaaaccatctgtcttatactttgggccttctatccatatgagccttccaccttctgccctacttgagttctgggttttactgcagtctagggccttgttttggtcttggatcatctcacatggcagcctggcataaggaaccgctccacaatgcttgctctgatagccgacgttctgcacctatcaggcaggggttaggaagcccctctgccacacatgacacacacacacgtaca

SEQ ID NO: 189 - DNA, 4040 bp, Homo sapiens
cctgcgtgcctcagcatctcttgctgtttgtgattttctatttcagtattaatctctgttggcttgtatttgttctctgcttcttccctttctactcacctttgagtatttcagcctcttcatgaatctatctccctctctttgatttcatgtaatctctccttaaatatttctttgcatatgtgggcaagtgtacgtgtgtgtgtgtcatgtgtggcagaggggcttcctaacccctgcctgataggtgcagaacgtcggctatcagagcaagcattgtggagcggttccttatgccaggctgccatgtgagatgatccaagaccaaaacaaggccctagactgcagtaaaacccagaactcaagtagggcagaaggtggaaggctcatatggatagaaggcccaaagtataagacagatggtttgagacttgagacccgaggactaagatggaaagcccatgttccaagatagatagaagcctcaggcctgaaaccaacaaaagcctcaagagccaagaaaacagagggtggcctgaattggaccgaaggcctgagttggatggaagtctcaaggcttgagttagaagtcttaagacctgggacaggacacatggaaggcctaagaactgagacttgtgacacaaggccaacgacctaagattagcccagggttgtagctggaagacctacaacccaaggatggaaggcccctgtcacaaagcctacctagatggatagaggacccaagcgaaaaaggtatctcaagactaacggccggaatctggaggcccatgacccagaacccaggaaggatagaagcttgaagacctggggaaatcccaagatgagaaccctaaaccctacctcttttctattgtttacacttcttactcttagatatttccagttctcctgtttatctttaagcctgattcttttgagatgtactttttgatgttgccggttacctttagattgacagtattatgcctgggccagtcttgagccagctttaaatcacagcttttacctatttgttaggctatagtgttttgtaaacttctgtttctattcacatcttctccacttgagagagacaccaaaatccagtcagtatctaatctggcttttgttaacttccctcaggagcagacattcatataggtgatactgtatttcagtcctttcttttgaccccagaagccctagactgagaagataaaatggtcaggttgttggggaaaaaaaagtgccaggctctctagagaaaaatgtgaagagatgctccaggccaatgagaagaattagacaagaaatacacagatgtgccagacttctgagaagcacctgccagcaacagcttccttctttgagcttaggtgagcaggattctggggtttgggatttctagtgatggttatggaaagggtgactgtgcctgggacaaagcgaggtcccaaggggacagcctgaactccctgctcatagtagtggccaaataatttggtggactgtgccaacgctactcctgggtttaatacccatctctaggcttaaagatgagagaacctgggactgttgagcatgtttaatactttccttgatttttttcttcctgtttatgtgggaagttgatttaaatgactgataatgtgtatgaaagcactgtaaaacataagagaaaaaccaattagtgtattggcaatcatgcagttaacatttgaaagtgcagtgtaaattgtgaagcattatgtaaatcaggggtccacagtttttctgtaaggggtcaaatcataaatactttagactgtgggccatatggtttctgttacatatttgttttttaaacaacgtttttataaggtcaaaatcattcttagtttttgagccaattggatttggcctgctgttcatagcttaccaccccctgatgtattatttgttattcagagaaaatttctgaatactactagtttccttttctgtgcctgtccctgtgctaggcactaaaaatgcaatgattattgatatctaggtgacctgaaaaaaaatagtgaatgtgctttgtaaactgtaaagcacttgtattctactgtgataagcgttgtggatacaaagaaaggagcaagcataaaaaagtgctctttcaaaaggatatagtactatgcagacacaaggaattgtttgataaatgaataaattatatgtatatttgaggccaatttgtgtttgctgctctggtaattttgagtaaaaatgcagtattccaggtatcagaaacgaaaacacatggaaactgcttttaaactttaaaatatactgaaaacataagggactaagcttgttgtggtcacctataatgtgccagataccatgctgggtgctagagctaccaaagggggaaaagtattctcatagaacaaaaaatttcagaaaggtgcatattaaagtgctttgtaaactaaagcatgatacaaatgtcaatgggctacatatttatgaatgaatgaatggatgaatgaatattaagtgcctcttacataccagctattttgggtactgtaaaatacaagattaattctcctatgtaataagaggaaagtttatcctctatactattcagatgtaaggaatgatatattgcttaattttaaacaatcaagactttactggtgaggttaagttaaattattactgatacatttttccaggtaaccaggaaagagctagtatgaggaaatgaagtaatagatgtgagatccagaccgaaagtcacttaattcagcttgcgaatgtgctttctaaattataaagcacttgtaaatgaaaaatttgatgctttctgtatgaataaaactttctgtaagctaggtattgtctctacaaaattctcattgtatagttaaaccacagtgagaagggttctataagtagttatacaaaccaagggtttaaatacctgttaaatagatcaattttgattgcctactatgtgaactcactgttaaaggcactgaaaatttatcatatttcatttagccacagccaaaaataaggcaatacctatgttagcattttgtgaactctaaggcaccatataaatgtaactgttgattttctcacttggtgctgggtactaggtttataaaattgtatgatagttattatattgtgcaaataaagtaggaaaatttgaataacaatgattatcttttgaatacgcatacgcaagggattggttgtctgaagaatgccactatagtagttatctattgtgtgccaatctcattgctaggcattggggatgcaaagataaaccatctttattgtgtcttgggtagcagaagaaaatatgtgtaaaatcaatttataatttgtaaactgccacccatatataagctatatctgctgaatgatcattgattactcttatccttagagataacaactgggggcacaaacatttattatcattattgaacctacaacagagatctatgtgtagatttacaaagcctacagttctatacagataggaatgaactattggcttactgaatggtgattactttctgtggggctcggaactacatgccctaggatataaaaatgatgttatcattatagagtgctcacagaaggaaatgaagtaatataggtgtgagatccagaccaaaagtcatttaacaagtttattcagtgatgaaaacatgggacaaatggactaatataaggcagtgtactaagctgagtagagagataaagtcctgtccagaagatacatgcttcctggcctgattgaggagatggaaaatttttgcaaaaaacaaggtgttgtggtcttccatccagtttcttaagtgctgatgataaaagtgaattagacccaccttgacctggcctacagaagtaaaggagtaaaaataaatgcctcaggcgtgctttttgattcatttgataaacaaagcatcttttatgtggaatataccattctgggtcctgaggataagagagatgagggcattagatcactgaca

SEQ ID NO: 190 - DNA, 4131 bp, Homo sapiens
agatctctgttgtaggttcaataatgataataaatgtttgtgcccccagttgttatctctaaggataagagtaatcaatgatcattcagcagatatagcttatatatgggtggcagtttacaaattataaattgattttacacatattttcttctgctacccaagacacaataaagatggtttatctttgcatccccaatgcctagcaatgagattggcacacaatagataactactatagtggcattcttcagacaaccaatcccttgcgtatgcgtattcaaaagataatcattgttattcaaattttcctactttatttgcacaatataataactatcatacaattttataaacctagtacccagcaccaagtgagaaaatcaacagttacatttatatggtgccttagagttcacaaaatgctaacataggtattgccttatttttggctgtggctaaatgaaatatgataaattttcagtgcctttaacagtgagttcacatagtaggcaatcaaaattgatctatttaacaggtatttaaacccttggtttgtataactacttatagaacccttctcactgtggtttaactatacaatgagaattttgtagagacaatacctagcttacagaaagttttattcatacagaaagcatcaaatttttcatttacaagtgctttataatttagaaagcacattcgcaagctgaattaagtgactttcggtctggatctcacatctattacttcatttcctcatactagctctttcctggttacctggaaaaatgtatcagtaataatttaacttaacctcaccagtaaagtcttgattgtttaaaattaagcaatatatcattccttacatctgaatagtatagaggataaactttcctcttattacataggagaattaatcttgtattttacagtacccaaaatagctggtatgtaagaggcacttaatattcattcatccattcattcattcataaatatgtagcccattgacatttgtatcatgctttagtttacaaagcactttaatatgcacctttctgaaattttttgttctatgagaatacttttccccctttggtagctctagcacccagcatggtatctggcacattataggtgaccacaacaagcttagtcccttatgttttcagtatattttaaagtttaaaagcagtttccatgtgttttcgtttctgatacctggaatactgcatttttactcaaaattaccagagcagcaaacacaaattggcctcaaatatacatataatttattcatttatcaaacaattccttgtgtctgcatagtactatatccttttgaaagagcacttttttatgcttgctcctttctttgtatccacaacgcttatcacagtagaatacaagtgctttacagtttacaaagcacattcactattttttttcaggtcacctagatatcaataatcattgcatttttagtgcctagcacagggacaggcacagaaaaggaaactagtagtattcagaaattttctctgaataacaaataatacatcagggggtggtaagctatgaacagcaggccaaatccaattggctcaaaaactaagaatgattttgaccttataaaaacgttgtttaaaaaacaaatatgtaacagaaaccatatggcccacagtctaaagtatttatgatttgaccccttacagaaaaactgtggacccctgatttacataatgcttcacaatttacactgcactttcaaatgttaactgcatgattgccaatacactaattggtttttctcttatgttttacagtgctttcatacacattatcagtcatttaaatcaacttcccacataaacaggaagaaaaaaatcaaggaaagtattaaacatgctcaacagtcccaggttctctcatctttaagcctagagatgggtattaaacccaggagtagcgttggcacagtccaccaaattatttggccactactatgagcagggagttcaggctgtccccttgggacctcgctttgtcccaggcacagtcaccctttccataaccatcactagaaatcccaaaccccagaatcctgctcacctaagctcaaagaaggaagctgttgctggcaggtgcttctcagaagtctggcacatctgtgtatttcttgtctaattcttctcattggcctggagcatctcttcacatttttctctagagagcctggcacttttttttccccaacaacctgaccattttatcttctcagtctagggcttctggggtcaaaagaaaggactgaaatacagtatcacctatatgaatgtctgctcctgagggaagttaacaaaagccagattagatactgactggattttggtgtctctctcaagtggagaagatgtgaatagaaacagaagtttacaaaacactatagcctaacaaataggtaaaagctgtgatttaaagctggctcaagactggcccaggcataatactgtcaatctaaaggtaaccggcaacatcaaaaagtacatctcaaaagaatcaggcttaaagataaacaggagaactggaaatatctaagagtaagaagtgtaaacaatagaaaagaggtagggtttagggttctcatcttgggatttccccaggtcttcaagcttctatccttcctgggttctgggtcatgggcctccagattccggccgttagtcttgagatacctttttcgcttgggtcctctatccatctaggtaggctttgtgacaggggccttccatccttgggttgtaggtcttccagctacaaccctgggctaatcttaggtcgttggccttgtgtcacaagtctcagttcttaggccttccatgtgtcctgtcccaggtcttaagacttctaactcaagccttgagacttccatccaactcaggccttcggtccaattcaggccaccctctgttttcttggctcttgaggcttttgttggtttcaggcctgaggcttctatctatcttggaacatgggctttccatcttagtcctcgggtctcaagtctcaaaccatctgtcttatactttgggccttctatccatatgagccttccaccttctgccctacttgagttctgggttttactgcagtctagggccttgttttggtcttggatcatctcacatggcagcctggcataaggaaccgctccacaatgcttgctctgatagccgacgttctgcacctatcaggcaggggttaggaagcccctctgccacacatgacacacacacacgtacacttgcccacatatgcaaagaaatatttaaggagagattacatgaaatcaaagagagggagatagattcatgaagaggctgaaatactcaaaggtgagtagaaagggaagaagcagagaacaaatacaagccaacagagattaatactgaaatagaaaatcacaaacagcaagagatgctgaggcacgcaggggaggagagagagaatagcccaagagaggcagaaaggaaatgcagaaatgagaaatgtgagataaaaagtagaaacagcagaaaggaggccagactcagaaaaaaggtgaaatttaaaacgaacgagaaggggaaggggtaacaaataatcacagttcacaaagagaaaagagaggtaggcagagaaaggagaggtagacagaacaagaaaaggacaaaaagcacacagcatgtgacccaaaaaggagacatgaaataaagcgtgaaagaagagccacatctaggagagcaaagagaaatagcaacaaaatgaaaaatgagagatatgtctaagacaagacacagaccactcttgtgaacaaaaagagaaaatgaggcaaaggcacacacgaaagaaattagcaagagaaacatggaaatgggtaagacacactttagatagagaacaaagagcaaagacaagaaagaaagagacaaagaaatacacacttgagtgcaagagataagcaaaggcagacattcagaggaagtaagtagtagaagaggcaagatacagtgaggggcacaagaggcatgaaaagcatcacagaaagataaaaaaaatcaaaaagtgtcattagtaattataata

SEQ ID NO: 191 - DNA, 4046 bp, Homo sapiens
cttcagacaaccaatcccttgcgtatgcgtattcaaaagataatcattgttattcaaattttcctactttatttgcacaatataataactatcatacaattttataaacctagtacccagcaccaagtgagaaaatcaacagttacatttatatggtgccttagagttcacaaaatgctaacataggtattgccttatttttggctgtggctaaatgaaatatgataaattttcagtgcctttaacagtgagttcacatagtaggcaatcaaaattgatctatttaacaggtatttaaacccttggtttgtataactacttatagaacccttctcactgtggtttaactatacaatgagaattttgtagagacaatacctagcttacagaaagttttattcatacagaaagcatcaaatttttcatttacaagtgctttataatttagaaagcacattcgcaagctgaattaagtgactttcggtctggatctcacatctattacttcatttcctcatactagctctttcctggttacctggaaaaatgtatcagtaataatttaacttaacctcaccagtaaagtcttgattgtttaaaattaagcaatatatcattccttacatctgaatagtatagaggataaactttcctcttattacataggagaattaatcttgtattttacagtacccaaaatagctggtatgtaagaggcacttaatattcattcatccattcattcattcataaatatgtagcccattgacatttgtatcatgctttagtttacaaagcactttaatatgcacctttctgaaattttttgttctatgagaatacttttccccctttggtagctctagcacccagcatggtatctggcacattataggtgaccacaacaagcttagtcccttatgttttcagtatattttaaagtttaaaagcagtttccatgtgttttcgtttctgatacctggaatactgcatttttactcaaaattaccagagcagcaaacacaaattggcctcaaatatacatataatttattcatttatcaaacaattccttgtgtctgcatagtactatatccttttgaaagagcacttttttatgcttgctcctttctttgtatccacaacgcttatcacagtagaatacaagtgctttacagtttacaaagcacattcactattttttttcaggtcacctagatatcaataatcattgcatttttagtgcctagcacagggacaggcacagaaaaggaaactagtagtattcagaaattttctctgaataacaaataatacatcagggggtggtaagctatgaacagcaggccaaatccaattggctcaaaaactaagaatgattttgaccttataaaaacgttgtttaaaaaacaaatatgtaacagaaaccatatggcccacagtctaaagtatttatgatttgaccccttacagaaaaactgtggacccctgatttacataatgcttcacaatttacactgcactttcaaatgttaactgcatgattgccaatacactaattggtttttctcttatgttttacagtgctttcatacacattatcagtcatttaaatcaacttcccacataaacaggaagaaaaaaatcaaggaaagtattaaacatgctcaacagtcccaggttctctcatctttaagcctagagatgggtattaaacccaggagtagcgttggcacagtccaccaaattatttggccactactatgagcagggagttcaggctgtccccttgggacctcgctttgtcccaggcacagtcaccctttccataaccatcactagaaatcccaaaccccagaatcctgctcacctaagctcaaagaaggaagctgttgctggcaggtgcttctcagaagtctggcacatctgtgtatttcttgtctaattcttctcattggcctggagcatctcttcacatttttctctagagagcctggcacttttttttccccaacaacctgaccattttatcttctcagtctagggcttctggggtcaaaagaaaggactgaaatacagtatcacctatatgaatgtctgctcctgagggaagttaacaaaagccagattagatactgactggattttggtgtctctctcaagtggagaagatgtgaatagaaacagaagtttacaaaacactatagcctaacaaataggtaaaagctgtgatttaaagctggctcaagactggcccaggcataatactgtcaatctaaaggtaaccggcaacatcaaaaagtacatctcaaaagaatcaggcttaaagataaacaggagaactggaaatatctaagagtaagaagtgtaaacaatagaaaagaggtagggtttagggttctcatcttgggatttccccaggtcttcaagcttctatccttcctgggttctgggtcatgggcctccagattccggccgttagtcttgagatacctttttcgcttgggtcctctatccatctaggtaggctttgtgacaggggccttccatccttgggttgtaggtcttccagctacaaccctgggctaatcttaggtcgttggccttgtgtcacaagtctcagttcttaggccttccatgtgtcctgtcccaggtcttaagacttctaactcaagccttgagacttccatccaactcaggccttcggtccaattcaggccaccctctgttttcttggctcttgaggcttttgttggtttcaggcctgaggcttctatctatcttggaacatgggctttccatcttagtcctcgggtctcaagtctcaaaccatctgtcttatactttgggccttctatccatatgagccttccaccttctgccctacttgagttctgggttttactgcagtctagggccttgttttggtcttggatcatctcacatggcagcctggcataaggaaccgctccacaatgcttgctctgatagccgacgttctgcacctatcaggcaggggttaggaagcccctctgccacacatgacacacacacacgtacacttgcccacatatgcaaagaaatatttaaggagagattacatgaaatcaaagagagggagatagattcatgaagaggctgaaatactcaaaggtgagtagaaagggaagaagcagagaacaaatacaagccaacagagattaatactgaaatagaaaatcacaaacagcaagagatgctgaggcacgcaggggaggagagagagaatagcccaagagaggcagaaaggaaatgcagaaatgagaaatgtgagataaaaagtagaaacagcagaaaggaggccagactcagaaaaaaggtgaaatttaaaacgaacgagaaggggaaggggtaacaaataatcacagttcacaaagagaaaagagaggtaggcagagaaaggagaggtagacagaacaagaaaaggacaaaaagcacacagcatgtgacccaaaaaggagacatgaaataaagcgtgaaagaagagccacatctaggagagcaaagagaaatagcaacaaaatgaaaaatgagagatatgtctaagacaagacacagaccactcttgtgaacaaaaagagaaaatgaggcaaaggcacacacgaaagaaattagcaagagaaacatggaaatgggtaagacacactttagatagagaacaaagagcaaagacaagaaagaaagagacaaagaaatacacacttgagtgcaagagataagcaaaggcagacattcagaggaagtaagtagtagaagaggcaagatacagtgaggggcacaagaggcatgaaaagcatcacagaaagataaaaaaaatcaaaaagtgtcattagtaattataataaactattgttactacgaatactacttatagtactacaataataacaaccaccaataccaacacagatgctcttctatttataaacttttaccttagggatttcttacatagaaccaaagcatgccaactctgcctgctacctgatagtgctagtggtcactta

SEQ ID NO: 192 - DNA, 4045 bp, Homo sapiens
agtgagaaaatcaacagttacatttatatggtgccttagagttcacaaaatgctaacataggtattgccttatttttggctgtggctaaatgaaatatgataaattttcagtgcctttaacagtgagttcacatagtaggcaatcaaaattgatctatttaacaggtatttaaacccttggtttgtataactacttatagaacccttctcactgtggtttaactatacaatgagaattttgtagagacaatacctagcttacagaaagttttattcatacagaaagcatcaaatttttcatttacaagtgctttataatttagaaagcacattcgcaagctgaattaagtgactttcggtctggatctcacatctattacttcatttcctcatactagctctttcctggttacctggaaaaatgtatcagtaataatttaacttaacctcaccagtaaagtcttgattgtttaaaattaagcaatatatcattccttacatctgaatagtatagaggataaactttcctcttattacataggagaattaatcttgtattttacagtacccaaaatagctggtatgtaagaggcacttaatattcattcatccattcattcattcataaatatgtagcccattgacatttgtatcatgctttagtttacaaagcactttaatatgcacctttctgaaattttttgttctatgagaatacttttccccctttggtagctctagcacccagcatggtatctggcacattataggtgaccacaacaagcttagtcccttatgttttcagtatattttaaagtttaaaagcagtttccatgtgttttcgtttctgatacctggaatactgcatttttactcaaaattaccagagcagcaaacacaaattggcctcaaatatacatataatttattcatttatcaaacaattccttgtgtctgcatagtactatatccttttgaaagagcacttttttatgcttgctcctttctttgtatccacaacgcttatcacagtagaatacaagtgctttacagtttacaaagcacattcactattttttttcaggtcacctagatatcaataatcattgcatttttagtgcctagcacagggacaggcacagaaaaggaaactagtagtattcagaaattttctctgaataacaaataatacatcagggggtggtaagctatgaacagcaggccaaatccaattggctcaaaaactaagaatgattttgaccttataaaaacgttgtttaaaaaacaaatatgtaacagaaaccatatggcccacagtctaaagtatttatgatttgaccccttacagaaaaactgtggacccctgatttacataatgcttcacaatttacactgcactttcaaatgttaactgcatgattgccaatacactaattggtttttctcttatgttttacagtgctttcatacacattatcagtcatttaaatcaacttcccacataaacaggaagaaaaaaatcaaggaaagtattaaacatgctcaacagtcccaggttctctcatctttaagcctagagatgggtattaaacccaggagtagcgttggcacagtccaccaaattatttggccactactatgagcagggagttcaggctgtccccttgggacctcgctttgtcccaggcacagtcaccctttccataaccatcactagaaatcccaaaccccagaatcctgctcacctaagctcaaagaaggaagctgttgctggcaggtgcttctcagaagtctggcacatctgtgtatttcttgtctaattcttctcattggcctggagcatctcttcacatttttctctagagagcctggcacttttttttccccaacaacctgaccattttatcttctcagtctagggcttctggggtcaaaagaaaggactgaaatacagtatcacctatatgaatgtctgctcctgagggaagttaacaaaagccagattagatactgactggattttggtgtctctctcaagtggagaagatgtgaatagaaacagaagtttacaaaacactatagcctaacaaataggtaaaagctgtgatttaaagctggctcaagactggcccaggcataatactgtcaatctaaaggtaaccggcaacatcaaaaagtacatctcaaaagaatcaggcttaaagataaacaggagaactggaaatatctaagagtaagaagtgtaaacaatagaaaagaggtagggtttagggttctcatcttgggatttccccaggtcttcaagcttctatccttcctgggttctgggtcatgggcctccagattccggccgttagtcttgagatacctttttcgcttgggtcctctatccatctaggtaggctttgtgacaggggccttccatccttgggttgtaggtcttccagctacaaccctgggctaatcttaggtcgttggccttgtgtcacaagtctcagttcttaggccttccatgtgtcctgtcccaggtcttaagacttctaactcaagccttgagacttccatccaactcaggccttcggtccaattcaggccaccctctgttttcttggctcttgaggcttttgttggtttcaggcctgaggcttctatctatcttggaacatgggctttccatcttagtcctcgggtctcaagtctcaaaccatctgtcttatactttgggccttctatccatatgagccttccaccttctgccctacttgagttctgggttttactgcagtctagggccttgttttggtcttggatcatctcacatggcagcctggcataaggaaccgctccacaatgcttgctctgatagccgacgttctgcacctatcaggcaggggttaggaagcccctctgccacacatgacacacacacacgtacacttgcccacatatgcaaagaaatatttaaggagagattacatgaaatcaaagagagggagatagattcatgaagaggctgaaatactcaaaggtgagtagaaagggaagaagcagagaacaaatacaagccaacagagattaatactgaaatagaaaatcacaaacagcaagagatgctgaggcacgcaggggaggagagagagaatagcccaagagaggcagaaaggaaatgcagaaatgagaaatgtgagataaaaagtagaaacagcagaaaggaggccagactcagaaaaaaggtgaaatttaaaacgaacgagaaggggaaggggtaacaaataatcacagttcacaaagagaaaagagaggtaggcagagaaaggagaggtagacagaacaagaaaaggacaaaaagcacacagcatgtgacccaaaaaggagacatgaaataaagcgtgaaagaagagccacatctaggagagcaaagagaaatagcaacaaaatgaaaaatgagagatatgtctaagacaagacacagaccactcttgtgaacaaaaagagaaaatgaggcaaaggcacacacgaaagaaattagcaagagaaacatggaaatgggtaagacacactttagatagagaacaaagagcaaagacaagaaagaaagagacaaagaaatacacacttgagtgcaagagataagcaaaggcagacattcagaggaagtaagtagtagaagaggcaagatacagtgaggggcacaagaggcatgaaaagcatcacagaaagataaaaaaaatcaaaaagtgtcattagtaattataataaactattgttactacgaatactacttatagtactacaataataacaaccaccaataccaacacagatgctcttctatttataaacttttaccttagggatttcttacatagaaccaaagcatgccaactctgcctgctacctgatagtgctagtggtcacttatattgtgggaaatgaacttatgagtcttcttgggttaccttttacttgacatgtgccaggcactgcaataggtgagcactttacatacatgatttcatttaaccctcacaaacagagaagtcta

SEQ ID NO: 193 - DNA, 4036 bp, Homo sapiens
aaaatacttagtcatctgtgacatcccatttggctcttccagaaatcctagtaaatagttgtaacaggatgttaagaggcatacattgtgtgttttaaatcctctgctactcattaggtatatgacctttgacaacttaaagtctctagacttctctgtttgtgagggttaaatgaaatcatgtatgtaaagtgctcacctattgcagtgcctggcacatgtcaagtaaaaggtaacccaagaagactcataagttcatttcccacaatataagtgaccactagcactatcaggtagcaggcagagttggcatgctttggttctatgtaagaaatccctaaggtaaaagtttataaatagaagagcatctgtgttggtattggtggttgttattattgtagtactataagtagtattcgtagtaacaatagtttattataattactaatgacactttttgattttttttatctttctgtgatgcttttcatgcctcttgtgcccctcactgtatcttgcctcttctactacttacttcctctgaatgtctgcctttgcttatctcttgcactcaagtgtgtatttctttgtctctttctttcttgtctttgctctttgttctctatctaaagtgtgtcttacccatttccatgtttctcttgctaatttctttcgtgtgtgcctttgcctcattttctctttttgttcacaagagtggtctgtgtcttgtcttagacatatctctcatttttcattttgttgctatttctctttgctctcctagatgtggctcttctttcacgctttatttcatgtctcctttttgggtcacatgctgtgtgctttttgtccttttcttgttctgtctacctctcctttctctgcctacctctcttttctctttgtgaactgtgattatttgttaccccttccccttctcgttcgttttaaatttcaccttttttctgagtctggcctcctttctgctgtttctactttttatctcacatttctcatttctgcatttcctttctgcctctcttgggctattctctctctcctcccctgcgtgcctcagcatctcttgctgtttgtgattttctatttcagtattaatctctgttggcttgtatttgttctctgcttcttccctttctactcacctttgagtatttcagcctcttcatgaatctatctccctctctttgatttcatgtaatctctccttaaatatttctttgcatatgtgggcaagtgtacgtgtgtgtgtgtcatgtgtggcagaggggcttcctaacccctgcctgataggtgcagaacgtcggctatcagagcaagcattgtggagcggttccttatgccaggctgccatgtgagatgatccaagaccaaaacaaggccctagactgcagtaaaacccagaactcaagtagggcagaaggtggaaggctcatatggatagaaggcccaaagtataagacagatggtttgagacttgagacccgaggactaagatggaaagcccatgttccaagatagatagaagcctcaggcctgaaaccaacaaaagcctcaagagccaagaaaacagagggtggcctgaattggaccgaaggcctgagttggatggaagtctcaaggcttgagttagaagtcttaagacctgggacaggacacatggaaggcctaagaactgagacttgtgacacaaggccaacgacctaagattagcccagggttgtagctggaagacctacaacccaaggatggaaggcccctgtcacaaagcctacctagatggatagaggacccaagcgaaaaaggtatctcaagactaacggccggaatctggaggcccatgacccagaacccaggaaggatagaagcttgaagacctggggaaatcccaagatgagaaccctaaaccctacctcttttctattgtttacacttcttactcttagatatttccagttctcctgtttatctttaagcctgattcttttgagatgtactttttgatgttgccggttacctttagattgacagtattatgcctgggccagtcttgagccagctttaaatcacagcttttacctatttgttaggctatagtgttttgtaaacttctgtttctattcacatcttctccacttgagagagacaccaaaatccagtcagtatctaatctggcttttgttaacttccctcaggagcagacattcatataggtgatactgtatttcagtcctttcttttgaccccagaagccctagactgagaagataaaatggtcaggttgttggggaaaaaaaagtgccaggctctctagagaaaaatgtgaagagatgctccaggccaatgagaagaattagacaagaaatacacagatgtgccagacttctgagaagcacctgccagcaacagcttccttctttgagcttaggtgagcaggattctggggtttgggatttctagtgatggttatggaaagggtgactgtgcctgggacaaagcgaggtcccaaggggacagcctgaactccctgctcatagtagtggccaaataatttggtggactgtgccaacgctactcctgggtttaatacccatctctaggcttaaagatgagagaacctgggactgttgagcatgtttaatactttccttgatttttttcttcctgtttatgtgggaagttgatttaaatgactgataatgtgtatgaaagcactgtaaaacataagagaaaaaccaattagtgtattggcaatcatgcagttaacatttgaaagtgcagtgtaaattgtgaagcattatgtaaatcaggggtccacagtttttctgtaaggggtcaaatcataaatactttagactgtgggccatatggtttctgttacatatttgttttttaaacaacgtttttataaggtcaaaatcattcttagtttttgagccaattggatttggcctgctgttcatagcttaccaccccctgatgtattatttgttattcagagaaaatttctgaatactactagtttccttttctgtgcctgtccctgtgctaggcactaaaaatgcaatgattattgatatctaggtgacctgaaaaaaaatagtgaatgtgctttgtaaactgtaaagcacttgtattctactgtgataagcgttgtggatacaaagaaaggagcaagcataaaaaagtgctctttcaaaaggatatagtactatgcagacacaaggaattgtttgataaatgaataaattatatgtatatttgaggccaatttgtgtttgctgctctggtaattttgagtaaaaatgcagtattccaggtatcagaaacgaaaacacatggaaactgcttttaaactttaaaatatactgaaaacataagggactaagcttgttgtggtcacctataatgtgccagataccatgctgggtgctagagctaccaaagggggaaaagtattctcatagaacaaaaaatttcagaaaggtgcatattaaagtgctttgtaaactaaagcatgatacaaatgtcaatgggctacatatttatgaatgaatgaatggatgaatgaatattaagtgcctcttacataccagctattttgggtactgtaaaatacaagattaattctcctatgtaataagaggaaagtttatcctctatactattcagatgtaaggaatgatatattgcttaattttaaacaatcaagactttactggtgaggttaagttaaattattactgatacatttttccaggtaaccaggaaagagctagtatgaggaaatgaagtaatagatgtgagatccagaccgaaagtcacttaattcagcttgcgaatgtgctttctaaattataaagcacttgtaaatgaaaaatttgatgctttctgtatgaataaaactttctgtaagctaggtattgtctctacaaaattctcattgtatagttaaaccacagtgagaagggttctataagtagttatacaaaccaagggtttaaatacctgttaaata

SEQ ID NO: 194 - DNA, 4059 bp, Homo sapiens
gtttttttatagctcttcattgttcctatctgccaaatcattatacttcctacaagcagtgcagagagctgagtcttcagcaggtccaagaaatttgaacacactgaaggaagtcagccttcccacctgaagatcaacatgcctggcactctagcacttgaggatagctgaatgaagtaagttgttgatgttgcagtcctgtgaggatcacttcagaactgttataacagctgttttttgggagctggtgttggatggggtgtgttggtctaatgtgaagtggggctaaatgtgagatggaaagatgaccagtcttccatattactgactgggttcactgaagcaactcaaagacattatggtcttcttaccagttgtatcacagaagaatttagcctttgcttgtgtgttctatgtcttcactgtataggccctctgtcattcttagagccttaaacgttgagaagcttaaaacaccatttctgctttctgctgaaagggtaaccctttctcatctccgtttgtgagagactctgtcgtcagttaagattagtgtaaaaagaaaactaaactctgaagtagccattataaaagtgtgagaatgaagtcagttttctaaagagttggggaaaggtgatgctaaaggaggggattgagcaagtcctatcaaagagccttttatgaaaatacttagtcatctgtgacatcccatttggctcttccagaaatcctagtaaatagttgtaacaggatgttaagaggcatacattgtgtgttttaaatcctctgctactcattaggtatatgacctttgacaacttaaagtctctagacttctctgtttgtgagggttaaatgaaatcatgtatgtaaagtgctcacctattgcagtgcctggcacatgtcaagtaaaaggtaacccaagaagactcataagttcatttcccacaatataagtgaccactagcactatcaggtagcaggcagagttggcatgctttggttctatgtaagaaatccctaaggtaaaagtttataaatagaagagcatctgtgttggtattggtggttgttattattgtagtactataagtagtattcgtagtaacaatagtttattataattactaatgacactttttgattttttttatctttctgtgatgcttttcatgcctcttgtgcccctcactgtatcttgcctcttctactacttacttcctctgaatgtctgcctttgcttatctcttgcactcaagtgtgtatttctttgtctctttctttcttgtctttgctctttgttctctatctaaagtgtgtcttacccatttccatgtttctcttgctaatttctttcgtgtgtgcctttgcctcattttctctttttgttcacaagagtggtctgtgtcttgtcttagacatatctctcatttttcattttgttgctatttctctttgctctcctagatgtggctcttctttcacgctttatttcatgtctcctttttgggtcacatgctgtgtgctttttgtccttttcttgttctgtctacctctcctttctctgcctacctctcttttctctttgtgaactgtgattatttgttaccccttccccttctcgttcgttttaaatttcaccttttttctgagtctggcctcctttctgctgtttctactttttatctcacatttctcatttctgcatttcctttctgcctctcttgggctattctctctctcctcccctgcgtgcctcagcatctcttgctgtttgtgattttctatttcagtattaatctctgttggcttgtatttgttctctgcttcttccctttctactcacctttgagtatttcagcctcttcatgaatctatctccctctctttgatttcatgtaatctctccttaaatatttctttgcatatgtgggcaagtgtacgtgtgtgtgtgtcatgtgtggcagaggggcttcctaacccctgcctgataggtgcagaacgtcggctatcagagcaagcattgtggagcggttccttatgccaggctgccatgtgagatgatccaagaccaaaacaaggccctagactgcagtaaaacccagaactcaagtagggcagaaggtggaaggctcatatggatagaaggcccaaagtataagacagatggtttgagacttgagacccgaggactaagatggaaagcccatgttccaagatagatagaagcctcaggcctgaaaccaacaaaagcctcaagagccaagaaaacagagggtggcctgaattggaccgaaggcctgagttggatggaagtctcaaggcttgagttagaagtcttaagacctgggacaggacacatggaaggcctaagaactgagacttgtgacacaaggccaacgacctaagattagcccagggttgtagctggaagacctacaacccaaggatggaaggcccctgtcacaaagcctacctagatggatagaggacccaagcgaaaaaggtatctcaagactaacggccggaatctggaggcccatgacccagaacccaggaaggatagaagcttgaagacctggggaaatcccaagatgagaaccctaaaccctacctcttttctattgtttacacttcttactcttagatatttccagttctcctgtttatctttaagcctgattcttttgagatgtactttttgatgttgccggttacctttagattgacagtattatgcctgggccagtcttgagccagctttaaatcacagcttttacctatttgttaggctatagtgttttgtaaacttctgtttctattcacatcttctccacttgagagagacaccaaaatccagtcagtatctaatctggcttttgttaacttccctcaggagcagacattcatataggtgatactgtatttcagtcctttcttttgaccccagaagccctagactgagaagataaaatggtcaggttgttggggaaaaaaaagtgccaggctctctagagaaaaatgtgaagagatgctccaggccaatgagaagaattagacaagaaatacacagatgtgccagacttctgagaagcacctgccagcaacagcttccttctttgagcttaggtgagcaggattctggggtttgggatttctagtgatggttatggaaagggtgactgtgcctgggacaaagcgaggtcccaaggggacagcctgaactccctgctcatagtagtggccaaataatttggtggactgtgccaacgctactcctgggtttaatacccatctctaggcttaaagatgagagaacctgggactgttgagcatgtttaatactttccttgatttttttcttcctgtttatgtgggaagttgatttaaatgactgataatgtgtatgaaagcactgtaaaacataagagaaaaaccaattagtgtattggcaatcatgcagttaacatttgaaagtgcagtgtaaattgtgaagcattatgtaaatcaggggtccacagtttttctgtaaggggtcaaatcataaatactttagactgtgggccatatggtttctgttacatatttgttttttaaacaacgtttttataaggtcaaaatcattcttagtttttgagccaattggatttggcctgctgttcatagcttaccaccccctgatgtattatttgttattcagagaaaatttctgaatactactagtttccttttctgtgcctgtccctgtgctaggcactaaaaatgcaatgattattgatatctaggtgacctgaaaaaaaatagtgaatgtgctttgtaaactgtaaagcacttgtattctactgtgataagcgttgtggatacaaagaaaggagcaagcataaaaaagtgctctttcaaaaggatatagtactatgcagacacaaggaattgtttgataaatgaataaattatatgtatatttgaggccaatttgtgtttgctgctctggtaattttgagtaaaaatgcagtattccaggtatcagaaacgaaaacacatggaaactgcttttaaact

SEQ ID NO: 195 - DNA, 4036 bp, Homo sapiens
gcttattaatttgaatcttatgtaactctagcacagtactcaatatttatggcatttacatggtttatctcatgtttttttatagctcttcattgttcctatctgccaaatcattatacttcctacaagcagtgcagagagctgagtcttcagcaggtccaagaaatttgaacacactgaaggaagtcagccttcccacctgaagatcaacatgcctggcactctagcacttgaggatagctgaatgaagtaagttgttgatgttgcagtcctgtgaggatcacttcagaactgttataacagctgttttttgggagctggtgttggatggggtgtgttggtctaatgtgaagtggggctaaatgtgagatggaaagatgaccagtcttccatattactgactgggttcactgaagcaactcaaagacattatggtcttcttaccagttgtatcacagaagaatttagcctttgcttgtgtgttctatgtcttcactgtataggccctctgtcattcttagagccttaaacgttgagaagcttaaaacaccatttctgctttctgctgaaagggtaaccctttctcatctccgtttgtgagagactctgtcgtcagttaagattagtgtaaaaagaaaactaaactctgaagtagccattataaaagtgtgagaatgaagtcagttttctaaagagttggggaaaggtgatgctaaaggaggggattgagcaagtcctatcaaagagccttttatgaaaatacttagtcatctgtgacatcccatttggctcttccagaaatcctagtaaatagttgtaacaggatgttaagaggcatacattgtgtgttttaaatcctctgctactcattaggtatatgacctttgacaacttaaagtctctagacttctctgtttgtgagggttaaatgaaatcatgtatgtaaagtgctcacctattgcagtgcctggcacatgtcaagtaaaaggtaacccaagaagactcataagttcatttcccacaatataagtgaccactagcactatcaggtagcaggcagagttggcatgctttggttctatgtaagaaatccctaaggtaaaagtttataaatagaagagcatctgtgttggtattggtggttgttattattgtagtactataagtagtattcgtagtaacaatagtttattataattactaatgacactttttgattttttttatctttctgtgatgcttttcatgcctcttgtgcccctcactgtatcttgcctcttctactacttacttcctctgaatgtctgcctttgcttatctcttgcactcaagtgtgtatttctttgtctctttctttcttgtctttgctctttgttctctatctaaagtgtgtcttacccatttccatgtttctcttgctaatttctttcgtgtgtgcctttgcctcattttctctttttgttcacaagagtggtctgtgtcttgtcttagacatatctctcatttttcattttgttgctatttctctttgctctcctagatgtggctcttctttcacgctttatttcatgtctcctttttgggtcacatgctgtgtgctttttgtccttttcttgttctgtctacctctcctttctctgcctacctctcttttctctttgtgaactgtgattatttgttaccccttccccttctcgttcgttttaaatttcaccttttttctgagtctggcctcctttctgctgtttctactttttatctcacatttctcatttctgcatttcctttctgcctctcttgggctattctctctctcctcccctgcgtgcctcagcatctcttgctgtttgtgattttctatttcagtattaatctctgttggcttgtatttgttctctgcttcttccctttctactcacctttgagtatttcagcctcttcatgaatctatctccctctctttgatttcatgtaatctctccttaaatatttctttgcatatgtgggcaagtgtacgtgtgtgtgtgtcatgtgtggcagaggggcttcctaacccctgcctgataggtgcagaacgtcggctatcagagcaagcattgtggagcggttccttatgccaggctgccatgtgagatgatccaagaccaaaacaaggccctagactgcagtaaaacccagaactcaagtagggcagaaggtggaaggctcatatggatagaaggcccaaagtataagacagatggtttgagacttgagacccgaggactaagatggaaagcccatgttccaagatagatagaagcctcaggcctgaaaccaacaaaagcctcaagagccaagaaaacagagggtggcctgaattggaccgaaggcctgagttggatggaagtctcaaggcttgagttagaagtcttaagacctgggacaggacacatggaaggcctaagaactgagacttgtgacacaaggccaacgacctaagattagcccagggttgtagctggaagacctacaacccaaggatggaaggcccctgtcacaaagcctacctagatggatagaggacccaagcgaaaaaggtatctcaagactaacggccggaatctggaggcccatgacccagaacccaggaaggatagaagcttgaagacctggggaaatcccaagatgagaaccctaaaccctacctcttttctattgtttacacttcttactcttagatatttccagttctcctgtttatctttaagcctgattcttttgagatgtactttttgatgttgccggttacctttagattgacagtattatgcctgggccagtcttgagccagctttaaatcacagcttttacctatttgttaggctatagtgttttgtaaacttctgtttctattcacatcttctccacttgagagagacaccaaaatccagtcagtatctaatctggcttttgttaacttccctcaggagcagacattcatataggtgatactgtatttcagtcctttcttttgaccccagaagccctagactgagaagataaaatggtcaggttgttggggaaaaaaaagtgccaggctctctagagaaaaatgtgaagagatgctccaggccaatgagaagaattagacaagaaatacacagatgtgccagacttctgagaagcacctgccagcaacagcttccttctttgagcttaggtgagcaggattctggggtttgggatttctagtgatggttatggaaagggtgactgtgcctgggacaaagcgaggtcccaaggggacagcctgaactccctgctcatagtagtggccaaataatttggtggactgtgccaacgctactcctgggtttaatacccatctctaggcttaaagatgagagaacctgggactgttgagcatgtttaatactttccttgatttttttcttcctgtttatgtgggaagttgatttaaatgactgataatgtgtatgaaagcactgtaaaacataagagaaaaaccaattagtgtattggcaatcatgcagttaacatttgaaagtgcagtgtaaattgtgaagcattatgtaaatcaggggtccacagtttttctgtaaggggtcaaatcataaatactttagactgtgggccatatggtttctgttacatatttgttttttaaacaacgtttttataaggtcaaaatcattcttagtttttgagccaattggatttggcctgctgttcatagcttaccaccccctgatgtattatttgttattcagagaaaatttctgaatactactagtttccttttctgtgcctgtccctgtgctaggcactaaaaatgcaatgattattgatatctaggtgacctgaaaaaaaatagtgaatgtgctttgtaaactgtaaagcacttgtattctactgtgataagcgttgtggatacaaagaaaggagcaagcataaaaaagtgctctttcaaaaggatatagtactatgcagacacaaggaattgtttgataaatgaataaattatatgtatatt

SEQ ID NO: 196 - DNA, 4090 bp, Homo sapiens
cttgtgtctgcatagtactatatccttttgaaagagcacttttttatgcttgctcctttctttgtatccacaacgcttatcacagtagaatacaagtgctttacagtttacaaagcacattcactattttttttcaggtcacctagatatcaataatcattgcatttttagtgcctagcacagggacaggcacagaaaaggaaactagtagtattcagaaattttctctgaataacaaataatacatcagggggtggtaagctatgaacagcaggccaaatccaattggctcaaaaactaagaatgattttgaccttataaaaacgttgtttaaaaaacaaatatgtaacagaaaccatatggcccacagtctaaagtatttatgatttgaccccttacagaaaaactgtggacccctgatttacataatgcttcacaatttacactgcactttcaaatgttaactgcatgattgccaatacactaattggtttttctcttatgttttacagtgctttcatacacattatcagtcatttaaatcaacttcccacataaacaggaagaaaaaaatcaaggaaagtattaaacatgctcaacagtcccaggttctctcatctttaagcctagagatgggtattaaacccaggagtagcgttggcacagtccaccaaattatttggccactactatgagcagggagttcaggctgtccccttgggacctcgctttgtcccaggcacagtcaccctttccataaccatcactagaaatcccaaaccccagaatcctgctcacctaagctcaaagaaggaagctgttgctggcaggtgcttctcagaagtctggcacatctgtgtatttcttgtctaattcttctcattggcctggagcatctcttcacatttttctctagagagcctggcacttttttttccccaacaacctgaccattttatcttctcagtctagggcttctggggtcaaaagaaaggactgaaatacagtatcacctatatgaatgtctgctcctgagggaagttaacaaaagccagattagatactgactggattttggtgtctctctcaagtggagaagatgtgaatagaaacagaagtttacaaaacactatagcctaacaaataggtaaaagctgtgatttaaagctggctcaagactggcccaggcataatactgtcaatctaaaggtaaccggcaacatcaaaaagtacatctcaaaagaatcaggcttaaagataaacaggagaactggaaatatctaagagtaagaagtgtaaacaatagaaaagaggtagggtttagggttctcatcttgggatttccccaggtcttcaagcttctatccttcctgggttctgggtcatgggcctccagattccggccgttagtcttgagatacctttttcgcttgggtcctctatccatctaggtaggctttgtgacaggggccttccatccttgggttgtaggtcttccagctacaaccctgggctaatcttaggtcgttggccttgtgtcacaagtctcagttcttaggccttccatgtgtcctgtcccaggtcttaagacttctaactcaagccttgagacttccatccaactcaggccttcggtccaattcaggccaccctctgttttcttggctcttgaggcttttgttggtttcaggcctgaggcttctatctatcttggaacatgggctttccatcttagtcctcgggtctcaagtctcaaaccatctgtcttatactttgggccttctatccatatgagccttccaccttctgccctacttgagttctgggttttactgcagtctagggccttgttttggtcttggatcatctcacatggcagcctggcataaggaaccgctccacaatgcttgctctgatagccgacgttctgcacctatcaggcaggggttaggaagcccctctgccacacatgacacacacacacgtacacttgcccacatatgcaaagaaatatttaaggagagattacatgaaatcaaagagagggagatagattcatgaagaggctgaaatactcaaaggtgagtagaaagggaagaagcagagaacaaatacaagccaacagagattaatactgaaatagaaaatcacaaacagcaagagatgctgaggcacgcaggggaggagagagagaatagcccaagagaggcagaaaggaaatgcagaaatgagaaatgtgagataaaaagtagaaacagcagaaaggaggccagactcagaaaaaaggtgaaatttaaaacgaacgagaaggggaaggggtaacaaataatcacagttcacaaagagaaaagagaggtaggcagagaaaggagaggtagacagaacaagaaaaggacaaaaagcacacagcatgtgacccaaaaaggagacatgaaataaagcgtgaaagaagagccacatctaggagagcaaagagaaatagcaacaaaatgaaaaatgagagatatgtctaagacaagacacagaccactcttgtgaacaaaaagagaaaatgaggcaaaggcacacacgaaagaaattagcaagagaaacatggaaatgggtaagacacactttagatagagaacaaagagcaaagacaagaaagaaagagacaaagaaatacacacttgagtgcaagagataagcaaaggcagacattcagaggaagtaagtagtagaagaggcaagatacagtgaggggcacaagaggcatgaaaagcatcacagaaagataaaaaaaatcaaaaagtgtcattagtaattataataaactattgttactacgaatactacttatagtactacaataataacaaccaccaataccaacacagatgctcttctatttataaacttttaccttagggatttcttacatagaaccaaagcatgccaactctgcctgctacctgatagtgctagtggtcacttatattgtgggaaatgaacttatgagtcttcttgggttaccttttacttgacatgtgccaggcactgcaataggtgagcactttacatacatgatttcatttaaccctcacaaacagagaagtctagagactttaagttgtcaaaggtcatatacctaatgagtagcagaggatttaaaacacacaatgtatgcctcttaacatcctgttacaactatttactaggatttctggaagagccaaatgggatgtcacagatgactaagtattttcataaaaggctctttgataggacttgctcaatcccctcctttagcatcacctttccccaactctttagaaaactgacttcattctcacacttttataatggctacttcagagtttagttttctttttacactaatcttaactgacgacagagtctctcacaaacggagatgagaaagggttaccctttcagcagaaagcagaaatggtgttttaagcttctcaacgtttaaggctctaagaatgacagagggcctatacagtgaagacatagaacacacaagcaaaggctaaattcttctgtgatacaactggtaagaagaccataatgtctttgagttgcttcagtgaacccagtcagtaatatggaagactggtcatctttccatctcacatttagccccacttcacattagaccaacacaccccatccaacaccagctcccaaaaaacagctgttataacagttctgaagtgatcctcacaggactgcaacatcaacaacttacttcattcagctatcctcaagtgctagagtgccaggcatgttgatcttcaggtgggaaggctgacttccttcagtgtgttcaaatttcttggacctgctgaagactcagctctctgcactgcttgtaggaagtataatgatttggcagataggaacaatgaagagctataaaaaaacatgagataaaccatgtaaatgccataaatattgagtactgtgctagagttacataagattcaaattaataagcaatagaaaatgtttccacagaactttgaaacctataaagtcaaaacttttaggtctttagagagaaaatttcctcattcaacagaatagg

SEQ ID NO: 197 - DNA, 4071 bp, Homo sapiens
ctttacagtttacaaagcacattcactattttttttcaggtcacctagatatcaataatcattgcatttttagtgcctagcacagggacaggcacagaaaaggaaactagtagtattcagaaattttctctgaataacaaataatacatcagggggtggtaagctatgaacagcaggccaaatccaattggctcaaaaactaagaatgattttgaccttataaaaacgttgtttaaaaaacaaatatgtaacagaaaccatatggcccacagtctaaagtatttatgatttgaccccttacagaaaaactgtggacccctgatttacataatgcttcacaatttacactgcactttcaaatgttaactgcatgattgccaatacactaattggtttttctcttatgttttacagtgctttcatacacattatcagtcatttaaatcaacttcccacataaacaggaagaaaaaaatcaaggaaagtattaaacatgctcaacagtcccaggttctctcatctttaagcctagagatgggtattaaacccaggagtagcgttggcacagtccaccaaattatttggccactactatgagcagggagttcaggctgtccccttgggacctcgctttgtcccaggcacagtcaccctttccataaccatcactagaaatcccaaaccccagaatcctgctcacctaagctcaaagaaggaagctgttgctggcaggtgcttctcagaagtctggcacatctgtgtatttcttgtctaattcttctcattggcctggagcatctcttcacatttttctctagagagcctggcacttttttttccccaacaacctgaccattttatcttctcagtctagggcttctggggtcaaaagaaaggactgaaatacagtatcacctatatgaatgtctgctcctgagggaagttaacaaaagccagattagatactgactggattttggtgtctctctcaagtggagaagatgtgaatagaaacagaagtttacaaaacactatagcctaacaaataggtaaaagctgtgatttaaagctggctcaagactggcccaggcataatactgtcaatctaaaggtaaccggcaacatcaaaaagtacatctcaaaagaatcaggcttaaagataaacaggagaactggaaatatctaagagtaagaagtgtaaacaatagaaaagaggtagggtttagggttctcatcttgggatttccccaggtcttcaagcttctatccttcctgggttctgggtcatgggcctccagattccggccgttagtcttgagatacctttttcgcttgggtcctctatccatctaggtaggctttgtgacaggggccttccatccttgggttgtaggtcttccagctacaaccctgggctaatcttaggtcgttggccttgtgtcacaagtctcagttcttaggccttccatgtgtcctgtcccaggtcttaagacttctaactcaagccttgagacttccatccaactcaggccttcggtccaattcaggccaccctctgttttcttggctcttgaggcttttgttggtttcaggcctgaggcttctatctatcttggaacatgggctttccatcttagtcctcgggtctcaagtctcaaaccatctgtcttatactttgggccttctatccatatgagccttccaccttctgccctacttgagttctgggttttactgcagtctagggccttgttttggtcttggatcatctcacatggcagcctggcataaggaaccgctccacaatgcttgctctgatagccgacgttctgcacctatcaggcaggggttaggaagcccctctgccacacatgacacacacacacgtacacttgcccacatatgcaaagaaatatttaaggagagattacatgaaatcaaagagagggagatagattcatgaagaggctgaaatactcaaaggtgagtagaaagggaagaagcagagaacaaatacaagccaacagagattaatactgaaatagaaaatcacaaacagcaagagatgctgaggcacgcaggggaggagagagagaatagcccaagagaggcagaaaggaaatgcagaaatgagaaatgtgagataaaaagtagaaacagcagaaaggaggccagactcagaaaaaaggtgaaatttaaaacgaacgagaaggggaaggggtaacaaataatcacagttcacaaagagaaaagagaggtaggcagagaaaggagaggtagacagaacaagaaaaggacaaaaagcacacagcatgtgacccaaaaaggagacatgaaataaagcgtgaaagaagagccacatctaggagagcaaagagaaatagcaacaaaatgaaaaatgagagatatgtctaagacaagacacagaccactcttgtgaacaaaaagagaaaatgaggcaaaggcacacacgaaagaaattagcaagagaaacatggaaatgggtaagacacactttagatagagaacaaagagcaaagacaagaaagaaagagacaaagaaatacacacttgagtgcaagagataagcaaaggcagacattcagaggaagtaagtagtagaagaggcaagatacagtgaggggcacaagaggcatgaaaagcatcacagaaagataaaaaaaatcaaaaagtgtcattagtaattataataaactattgttactacgaatactacttatagtactacaataataacaaccaccaataccaacacagatgctcttctatttataaacttttaccttagggatttcttacatagaaccaaagcatgccaactctgcctgctacctgatagtgctagtggtcacttatattgtgggaaatgaacttatgagtcttcttgggttaccttttacttgacatgtgccaggcactgcaataggtgagcactttacatacatgatttcatttaaccctcacaaacagagaagtctagagactttaagttgtcaaaggtcatatacctaatgagtagcagaggatttaaaacacacaatgtatgcctcttaacatcctgttacaactatttactaggatttctggaagagccaaatgggatgtcacagatgactaagtattttcataaaaggctctttgataggacttgctcaatcccctcctttagcatcacctttccccaactctttagaaaactgacttcattctcacacttttataatggctacttcagagtttagttttctttttacactaatcttaactgacgacagagtctctcacaaacggagatgagaaagggttaccctttcagcagaaagcagaaatggtgttttaagcttctcaacgtttaaggctctaagaatgacagagggcctatacagtgaagacatagaacacacaagcaaaggctaaattcttctgtgatacaactggtaagaagaccataatgtctttgagttgcttcagtgaacccagtcagtaatatggaagactggtcatctttccatctcacatttagccccacttcacattagaccaacacaccccatccaacaccagctcccaaaaaacagctgttataacagttctgaagtgatcctcacaggactgcaacatcaacaacttacttcattcagctatcctcaagtgctagagtgccaggcatgttgatcttcaggtgggaaggctgacttccttcagtgtgttcaaatttcttggacctgctgaagactcagctctctgcactgcttgtaggaagtataatgatttggcagataggaacaatgaagagctataaaaaaacatgagataaaccatgtaaatgccataaatattgagtactgtgctagagttacataagattcaaattaataagcaatagaaaatgtttccacagaactttgaaacctataaagtcaaaacttttaggtctttagagagaaaatttcctcattcaacagaataggaaactggcataaatgggaaaatgtcttgccaaatatcacttgatgagtcactagagacaccactaccagtcatagcctt

SEQ ID NO: 198 - DNA, 4173 bp, Homo sapiens
ggacaggcacagaaaaggaaactagtagtattcagaaattttctctgaataacaaataatacatcagggggtggtaagctatgaacagcaggccaaatccaattggctcaaaaactaagaatgattttgaccttataaaaacgttgtttaaaaaacaaatatgtaacagaaaccatatggcccacagtctaaagtatttatgatttgaccccttacagaaaaactgtggacccctgatttacataatgcttcacaatttacactgcactttcaaatgttaactgcatgattgccaatacactaattggtttttctcttatgttttacagtgctttcatacacattatcagtcatttaaatcaacttcccacataaacaggaagaaaaaaatcaaggaaagtattaaacatgctcaacagtcccaggttctctcatctttaagcctagagatgggtattaaacccaggagtagcgttggcacagtccaccaaattatttggccactactatgagcagggagttcaggctgtccccttgggacctcgctttgtcccaggcacagtcaccctttccataaccatcactagaaatcccaaaccccagaatcctgctcacctaagctcaaagaaggaagctgttgctggcaggtgcttctcagaagtctggcacatctgtgtatttcttgtctaattcttctcattggcctggagcatctcttcacatttttctctagagagcctggcacttttttttccccaacaacctgaccattttatcttctcagtctagggcttctggggtcaaaagaaaggactgaaatacagtatcacctatatgaatgtctgctcctgagggaagttaacaaaagccagattagatactgactggattttggtgtctctctcaagtggagaagatgtgaatagaaacagaagtttacaaaacactatagcctaacaaataggtaaaagctgtgatttaaagctggctcaagactggcccaggcataatactgtcaatctaaaggtaaccggcaacatcaaaaagtacatctcaaaagaatcaggcttaaagataaacaggagaactggaaatatctaagagtaagaagtgtaaacaatagaaaagaggtagggtttagggttctcatcttgggatttccccaggtcttcaagcttctatccttcctgggttctgggtcatgggcctccagattccggccgttagtcttgagatacctttttcgcttgggtcctctatccatctaggtaggctttgtgacaggggccttccatccttgggttgtaggtcttccagctacaaccctgggctaatcttaggtcgttggccttgtgtcacaagtctcagttcttaggccttccatgtgtcctgtcccaggtcttaagacttctaactcaagccttgagacttccatccaactcaggccttcggtccaattcaggccaccctctgttttcttggctcttgaggcttttgttggtttcaggcctgaggcttctatctatcttggaacatgggctttccatcttagtcctcgggtctcaagtctcaaaccatctgtcttatactttgggccttctatccatatgagccttccaccttctgccctacttgagttctgggttttactgcagtctagggccttgttttggtcttggatcatctcacatggcagcctggcataaggaaccgctccacaatgcttgctctgatagccgacgttctgcacctatcaggcaggggttaggaagcccctctgccacacatgacacacacacacgtacacttgcccacatatgcaaagaaatatttaaggagagattacatgaaatcaaagagagggagatagattcatgaagaggctgaaatactcaaaggtgagtagaaagggaagaagcagagaacaaatacaagccaacagagattaatactgaaatagaaaatcacaaacagcaagagatgctgaggcacgcaggggaggagagagagaatagcccaagagaggcagaaaggaaatgcagaaatgagaaatgtgagataaaaagtagaaacagcagaaaggaggccagactcagaaaaaaggtgaaatttaaaacgaacgagaaggggaaggggtaacaaataatcacagttcacaaagagaaaagagaggtaggcagagaaaggagaggtagacagaacaagaaaaggacaaaaagcacacagcatgtgacccaaaaaggagacatgaaataaagcgtgaaagaagagccacatctaggagagcaaagagaaatagcaacaaaatgaaaaatgagagatatgtctaagacaagacacagaccactcttgtgaacaaaaagagaaaatgaggcaaaggcacacacgaaagaaattagcaagagaaacatggaaatgggtaagacacactttagatagagaacaaagagcaaagacaagaaagaaagagacaaagaaatacacacttgagtgcaagagataagcaaaggcagacattcagaggaagtaagtagtagaagaggcaagatacagtgaggggcacaagaggcatgaaaagcatcacagaaagataaaaaaaatcaaaaagtgtcattagtaattataataaactattgttactacgaatactacttatagtactacaataataacaaccaccaataccaacacagatgctcttctatttataaacttttaccttagggatttcttacatagaaccaaagcatgccaactctgcctgctacctgatagtgctagtggtcacttatattgtgggaaatgaacttatgagtcttcttgggttaccttttacttgacatgtgccaggcactgcaataggtgagcactttacatacatgatttcatttaaccctcacaaacagagaagtctagagactttaagttgtcaaaggtcatatacctaatgagtagcagaggatttaaaacacacaatgtatgcctcttaacatcctgttacaactatttactaggatttctggaagagccaaatgggatgtcacagatgactaagtattttcataaaaggctctttgataggacttgctcaatcccctcctttagcatcacctttccccaactctttagaaaactgacttcattctcacacttttataatggctacttcagagtttagttttctttttacactaatcttaactgacgacagagtctctcacaaacggagatgagaaagggttaccctttcagcagaaagcagaaatggtgttttaagcttctcaacgtttaaggctctaagaatgacagagggcctatacagtgaagacatagaacacacaagcaaaggctaaattcttctgtgatacaactggtaagaagaccataatgtctttgagttgcttcagtgaacccagtcagtaatatggaagactggtcatctttccatctcacatttagccccacttcacattagaccaacacaccccatccaacaccagctcccaaaaaacagctgttataacagttctgaagtgatcctcacaggactgcaacatcaacaacttacttcattcagctatcctcaagtgctagagtgccaggcatgttgatcttcaggtgggaaggctgacttccttcagtgtgttcaaatttcttggacctgctgaagactcagctctctgcactgcttgtaggaagtataatgatttggcagataggaacaatgaagagctataaaaaaacatgagataaaccatgtaaatgccataaatattgagtactgtgctagagttacataagattcaaattaataagcaatagaaaatgtttccacagaactttgaaacctataaagtcaaaacttttaggtctttagagagaaaatttcctcattcaacagaataggaaactggcataaatgggaaaatgtcttgccaaatatcacttgatgagtcactagagacaccactaccagtcatagccttataccttagttaaagaccagaactgccgggcgcggtggctcacgcccataatcccagcactttgggaggttgaggtgggcggatcacctgaggtcaggagtttgagaccagcctgaccaacatggagaaacaccgtctctattaaaaatacaaaattagccgggcgtggtggtgcatgactgtaatc

SEQ ID NO: 199 - DNA, 4090 bp, Homo sapiens
aaaactgtggacccctgatttacataatgcttcacaatttacactgcactttcaaatgttaactgcatgattgccaatacactaattggtttttctcttatgttttacagtgctttcatacacattatcagtcatttaaatcaacttcccacataaacaggaagaaaaaaatcaaggaaagtattaaacatgctcaacagtcccaggttctctcatctttaagcctagagatgggtattaaacccaggagtagcgttggcacagtccaccaaattatttggccactactatgagcagggagttcaggctgtccccttgggacctcgctttgtcccaggcacagtcaccctttccataaccatcactagaaatcccaaaccccagaatcctgctcacctaagctcaaagaaggaagctgttgctggcaggtgcttctcagaagtctggcacatctgtgtatttcttgtctaattcttctcattggcctggagcatctcttcacatttttctctagagagcctggcacttttttttccccaacaacctgaccattttatcttctcagtctagggcttctggggtcaaaagaaaggactgaaatacagtatcacctatatgaatgtctgctcctgagggaagttaacaaaagccagattagatactgactggattttggtgtctctctcaagtggagaagatgtgaatagaaacagaagtttacaaaacactatagcctaacaaataggtaaaagctgtgatttaaagctggctcaagactggcccaggcataatactgtcaatctaaaggtaaccggcaacatcaaaaagtacatctcaaaagaatcaggcttaaagataaacaggagaactggaaatatctaagagtaagaagtgtaaacaatagaaaagaggtagggtttagggttctcatcttgggatttccccaggtcttcaagcttctatccttcctgggttctgggtcatgggcctccagattccggccgttagtcttgagatacctttttcgcttgggtcctctatccatctaggtaggctttgtgacaggggccttccatccttgggttgtaggtcttccagctacaaccctgggctaatcttaggtcgttggccttgtgtcacaagtctcagttcttaggccttccatgtgtcctgtcccaggtcttaagacttctaactcaagccttgagacttccatccaactcaggccttcggtccaattcaggccaccctctgttttcttggctcttgaggcttttgttggtttcaggcctgaggcttctatctatcttggaacatgggctttccatcttagtcctcgggtctcaagtctcaaaccatctgtcttatactttgggccttctatccatatgagccttccaccttctgccctacttgagttctgggttttactgcagtctagggccttgttttggtcttggatcatctcacatggcagcctggcataaggaaccgctccacaatgcttgctctgatagccgacgttctgcacctatcaggcaggggttaggaagcccctctgccacacatgacacacacacacgtacacttgcccacatatgcaaagaaatatttaaggagagattacatgaaatcaaagagagggagatagattcatgaagaggctgaaatactcaaaggtgagtagaaagggaagaagcagagaacaaatacaagccaacagagattaatactgaaatagaaaatcacaaacagcaagagatgctgaggcacgcaggggaggagagagagaatagcccaagagaggcagaaaggaaatgcagaaatgagaaatgtgagataaaaagtagaaacagcagaaaggaggccagactcagaaaaaaggtgaaatttaaaacgaacgagaaggggaaggggtaacaaataatcacagttcacaaagagaaaagagaggtaggcagagaaaggagaggtagacagaacaagaaaaggacaaaaagcacacagcatgtgacccaaaaaggagacatgaaataaagcgtgaaagaagagccacatctaggagagcaaagagaaatagcaacaaaatgaaaaatgagagatatgtctaagacaagacacagaccactcttgtgaacaaaaagagaaaatgaggcaaaggcacacacgaaagaaattagcaagagaaacatggaaatgggtaagacacactttagatagagaacaaagagcaaagacaagaaagaaagagacaaagaaatacacacttgagtgcaagagataagcaaaggcagacattcagaggaagtaagtagtagaagaggcaagatacagtgaggggcacaagaggcatgaaaagcatcacagaaagataaaaaaaatcaaaaagtgtcattagtaattataataaactattgttactacgaatactacttatagtactacaataataacaaccaccaataccaacacagatgctcttctatttataaacttttaccttagggatttcttacatagaaccaaagcatgccaactctgcctgctacctgatagtgctagtggtcacttatattgtgggaaatgaacttatgagtcttcttgggttaccttttacttgacatgtgccaggcactgcaataggtgagcactttacatacatgatttcatttaaccctcacaaacagagaagtctagagactttaagttgtcaaaggtcatatacctaatgagtagcagaggatttaaaacacacaatgtatgcctcttaacatcctgttacaactatttactaggatttctggaagagccaaatgggatgtcacagatgactaagtattttcataaaaggctctttgataggacttgctcaatcccctcctttagcatcacctttccccaactctttagaaaactgacttcattctcacacttttataatggctacttcagagtttagttttctttttacactaatcttaactgacgacagagtctctcacaaacggagatgagaaagggttaccctttcagcagaaagcagaaatggtgttttaagcttctcaacgtttaaggctctaagaatgacagagggcctatacagtgaagacatagaacacacaagcaaaggctaaattcttctgtgatacaactggtaagaagaccataatgtctttgagttgcttcagtgaacccagtcagtaatatggaagactggtcatctttccatctcacatttagccccacttcacattagaccaacacaccccatccaacaccagctcccaaaaaacagctgttataacagttctgaagtgatcctcacaggactgcaacatcaacaacttacttcattcagctatcctcaagtgctagagtgccaggcatgttgatcttcaggtgggaaggctgacttccttcagtgtgttcaaatttcttggacctgctgaagactcagctctctgcactgcttgtaggaagtataatgatttggcagataggaacaatgaagagctataaaaaaacatgagataaaccatgtaaatgccataaatattgagtactgtgctagagttacataagattcaaattaataagcaatagaaaatgtttccacagaactttgaaacctataaagtcaaaacttttaggtctttagagagaaaatttcctcattcaacagaataggaaactggcataaatgggaaaatgtcttgccaaatatcacttgatgagtcactagagacaccactaccagtcatagccttataccttagttaaagaccagaactgccgggcgcggtggctcacgcccataatcccagcactttgggaggttgaggtgggcggatcacctgaggtcaggagtttgagaccagcctgaccaacatggagaaacaccgtctctattaaaaatacaaaattagccgggcgtggtggtgcatgactgtaatcccagctacttgggaggctgaggcaggagaatcgcttgaacccgggaggcagaggttgcagtgagctgagattgcaccattgcactccagcctgggcaacaagagcaaaactccatctcaaaaaaaaaaaaaaaaaa

SEQ ID NO: 200 - DNA, 4097 bp, Homo sapiens
acagtcccaggttctctcatctttaagcctagagatgggtattaaacccaggagtagcgttggcacagtccaccaaattatttggccactactatgagcagggagttcaggctgtccccttgggacctcgctttgtcccaggcacagtcaccctttccataaccatcactagaaatcccaaaccccagaatcctgctcacctaagctcaaagaaggaagctgttgctggcaggtgcttctcagaagtctggcacatctgtgtatttcttgtctaattcttctcattggcctggagcatctcttcacatttttctctagagagcctggcacttttttttccccaacaacctgaccattttatcttctcagtctagggcttctggggtcaaaagaaaggactgaaatacagtatcacctatatgaatgtctgctcctgagggaagttaacaaaagccagattagatactgactggattttggtgtctctctcaagtggagaagatgtgaatagaaacagaagtttacaaaacactatagcctaacaaataggtaaaagctgtgatttaaagctggctcaagactggcccaggcataatactgtcaatctaaaggtaaccggcaacatcaaaaagtacatctcaaaagaatcaggcttaaagataaacaggagaactggaaatatctaagagtaagaagtgtaaacaatagaaaagaggtagggtttagggttctcatcttgggatttccccaggtcttcaagcttctatccttcctgggttctgggtcatgggcctccagattccggccgttagtcttgagatacctttttcgcttgggtcctctatccatctaggtaggctttgtgacaggggccttccatccttgggttgtaggtcttccagctacaaccctgggctaatcttaggtcgttggccttgtgtcacaagtctcagttcttaggccttccatgtgtcctgtcccaggtcttaagacttctaactcaagccttgagacttccatccaactcaggccttcggtccaattcaggccaccctctgttttcttggctcttgaggcttttgttggtttcaggcctgaggcttctatctatcttggaacatgggctttccatcttagtcctcgggtctcaagtctcaaaccatctgtcttatactttgggccttctatccatatgagccttccaccttctgccctacttgagttctgggttttactgcagtctagggccttgttttggtcttggatcatctcacatggcagcctggcataaggaaccgctccacaatgcttgctctgatagccgacgttctgcacctatcaggcaggggttaggaagcccctctgccacacatgacacacacacacgtacacttgcccacatatgcaaagaaatatttaaggagagattacatgaaatcaaagagagggagatagattcatgaagaggctgaaatactcaaaggtgagtagaaagggaagaagcagagaacaaatacaagccaacagagattaatactgaaatagaaaatcacaaacagcaagagatgctgaggcacgcaggggaggagagagagaatagcccaagagaggcagaaaggaaatgcagaaatgagaaatgtgagataaaaagtagaaacagcagaaaggaggccagactcagaaaaaaggtgaaatttaaaacgaacgagaaggggaaggggtaacaaataatcacagttcacaaagagaaaagagaggtaggcagagaaaggagaggtagacagaacaagaaaaggacaaaaagcacacagcatgtgacccaaaaaggagacatgaaataaagcgtgaaagaagagccacatctaggagagcaaagagaaatagcaacaaaatgaaaaatgagagatatgtctaagacaagacacagaccactcttgtgaacaaaaagagaaaatgaggcaaaggcacacacgaaagaaattagcaagagaaacatggaaatgggtaagacacactttagatagagaacaaagagcaaagacaagaaagaaagagacaaagaaatacacacttgagtgcaagagataagcaaaggcagacattcagaggaagtaagtagtagaagaggcaagatacagtgaggggcacaagaggcatgaaaagcatcacagaaagataaaaaaaatcaaaaagtgtcattagtaattataataaactattgttactacgaatactacttatagtactacaataataacaaccaccaataccaacacagatgctcttctatttataaacttttaccttagggatttcttacatagaaccaaagcatgccaactctgcctgctacctgatagtgctagtggtcacttatattgtgggaaatgaacttatgagtcttcttgggttaccttttacttgacatgtgccaggcactgcaataggtgagcactttacatacatgatttcatttaaccctcacaaacagagaagtctagagactttaagttgtcaaaggtcatatacctaatgagtagcagaggatttaaaacacacaatgtatgcctcttaacatcctgttacaactatttactaggatttctggaagagccaaatgggatgtcacagatgactaagtattttcataaaaggctctttgataggacttgctcaatcccctcctttagcatcacctttccccaactctttagaaaactgacttcattctcacacttttataatggctacttcagagtttagttttctttttacactaatcttaactgacgacagagtctctcacaaacggagatgagaaagggttaccctttcagcagaaagcagaaatggtgttttaagcttctcaacgtttaaggctctaagaatgacagagggcctatacagtgaagacatagaacacacaagcaaaggctaaattcttctgtgatacaactggtaagaagaccataatgtctttgagttgcttcagtgaacccagtcagtaatatggaagactggtcatctttccatctcacatttagccccacttcacattagaccaacacaccccatccaacaccagctcccaaaaaacagctgttataacagttctgaagtgatcctcacaggactgcaacatcaacaacttacttcattcagctatcctcaagtgctagagtgccaggcatgttgatcttcaggtgggaaggctgacttccttcagtgtgttcaaatttcttggacctgctgaagactcagctctctgcactgcttgtaggaagtataatgatttggcagataggaacaatgaagagctataaaaaaacatgagataaaccatgtaaatgccataaatattgagtactgtgctagagttacataagattcaaattaataagcaatagaaaatgtttccacagaactttgaaacctataaagtcaaaacttttaggtctttagagagaaaatttcctcattcaacagaataggaaactggcataaatgggaaaatgtcttgccaaatatcacttgatgagtcactagagacaccactaccagtcatagccttataccttagttaaagaccagaactgccgggcgcggtggctcacgcccataatcccagcactttgggaggttgaggtgggcggatcacctgaggtcaggagtttgagaccagcctgaccaacatggagaaacaccgtctctattaaaaatacaaaattagccgggcgtggtggtgcatgactgtaatcccagctacttgggaggctgaggcaggagaatcgcttgaacccgggaggcagaggttgcagtgagctgagattgcaccattgcactccagcctgggcaacaagagcaaaactccatctcaaaaaaaaaaaaaaaaaaaaagacttccatcctgttttaagtgccaatcagctaggaaagagtccctttaaatgattaataactgagatcacaaaaataatagatatgagagggaaaaacataaggtcttcccaatgtttaaggctcacttcgatgttttaagacccctcaagtttgctttaagtctcctggctcaggactaacaaaacacagccttagag

SEQ ID NO: 201 - DNA, 4052 bp, Homo sapiens
caggagacttaaagcaaacttgaggggtcttaaaacatcgaagtgagccttaaacattgggaagaccttatgtttttccctctcatatctattatttttgtgatctcagttattaatcatttaaagggactctttcctagctgattggcacttaaaacaggatggaagtctttttttttttttttttttttgagatggagttttgctcttgttgcccaggctggagtgcaatggtgcaatctcagctcactgcaacctctgcctcccgggttcaagcgattctcctgcctcagcctcccaagtagctgggattacagtcatgcaccaccacgcccggctaattttgtatttttaatagagacggtgtttctccatgttggtcaggctggtctcaaactcctgacctcaggtgatccgcccacctcaacctcccaaagtgctgggattatgggcgtgagccaccgcgcccggcagttctggtctttaactaaggtataaggctatgactggtagtggtgtctctagtgactcatcaagtgatatttggcaagacattttcccatttatgccagtttcctattctgttgaatgaggaaattttctctctaaagacctaaaagttttgactttataggtttcaaagttctgtggaaacattttctattgcttattaatttgaatcttatgtaactctagcacagtactcaatatttatggcatttacatggtttatctcatgtttttttatagctcttcattgttcctatctgccaaatcattatacttcctacaagcagtgcagagagctgagtcttcagcaggtccaagaaatttgaacacactgaaggaagtcagccttcccacctgaagatcaacatgcctggcactctagcacttgaggatagctgaatgaagtaagttgttgatgttgcagtcctgtgaggatcacttcagaactgttataacagctgttttttgggagctggtgttggatggggtgtgttggtctaatgtgaagtggggctaaatgtgagatggaaagatgaccagtcttccatattactgactgggttcactgaagcaactcaaagacattatggtcttcttaccagttgtatcacagaagaatttagcctttgcttgtgtgttctatgtcttcactgtataggccctctgtcattcttagagccttaaacgttgagaagcttaaaacaccatttctgctttctgctgaaagggtaaccctttctcatctccgtttgtgagagactctgtcgtcagttaagattagtgtaaaaagaaaactaaactctgaagtagccattataaaagtgtgagaatgaagtcagttttctaaagagttggggaaaggtgatgctaaaggaggggattgagcaagtcctatcaaagagccttttatgaaaatacttagtcatctgtgacatcccatttggctcttccagaaatcctagtaaatagttgtaacaggatgttaagaggcatacattgtgtgttttaaatcctctgctactcattaggtatatgacctttgacaacttaaagtctctagacttctctgtttgtgagggttaaatgaaatcatgtatgtaaagtgctcacctattgcagtgcctggcacatgtcaagtaaaaggtaacccaagaagactcataagttcatttcccacaatataagtgaccactagcactatcaggtagcaggcagagttggcatgctttggttctatgtaagaaatccctaaggtaaaagtttataaatagaagagcatctgtgttggtattggtggttgttattattgtagtactataagtagtattcgtagtaacaatagtttattataattactaatgacactttttgattttttttatctttctgtgatgcttttcatgcctcttgtgcccctcactgtatcttgcctcttctactacttacttcctctgaatgtctgcctttgcttatctcttgcactcaagtgtgtatttctttgtctctttctttcttgtctttgctctttgttctctatctaaagtgtgtcttacccatttccatgtttctcttgctaatttctttcgtgtgtgcctttgcctcattttctctttttgttcacaagagtggtctgtgtcttgtcttagacatatctctcatttttcattttgttgctatttctctttgctctcctagatgtggctcttctttcacgctttatttcatgtctcctttttgggtcacatgctgtgtgctttttgtccttttcttgttctgtctacctctcctttctctgcctacctctcttttctctttgtgaactgtgattatttgttaccccttccccttctcgttcgttttaaatttcaccttttttctgagtctggcctcctttctgctgtttctactttttatctcacatttctcatttctgcatttcctttctgcctctcttgggctattctctctctcctcccctgcgtgcctcagcatctcttgctgtttgtgattttctatttcagtattaatctctgttggcttgtatttgttctctgcttcttccctttctactcacctttgagtatttcagcctcttcatgaatctatctccctctctttgatttcatgtaatctctccttaaatatttctttgcatatgtgggcaagtgtacgtgtgtgtgtgtcatgtgtggcagaggggcttcctaacccctgcctgataggtgcagaacgtcggctatcagagcaagcattgtggagcggttccttatgccaggctgccatgtgagatgatccaagaccaaaacaaggccctagactgcagtaaaacccagaactcaagtagggcagaaggtggaaggctcatatggatagaaggcccaaagtataagacagatggtttgagacttgagacccgaggactaagatggaaagcccatgttccaagatagatagaagcctcaggcctgaaaccaacaaaagcctcaagagccaagaaaacagagggtggcctgaattggaccgaaggcctgagttggatggaagtctcaaggcttgagttagaagtcttaagacctgggacaggacacatggaaggcctaagaactgagacttgtgacacaaggccaacgacctaagattagcccagggttgtagctggaagacctacaacccaaggatggaaggcccctgtcacaaagcctacctagatggatagaggacccaagcgaaaaaggtatctcaagactaacggccggaatctggaggcccatgacccagaacccaggaaggatagaagcttgaagacctggggaaatcccaagatgagaaccctaaaccctacctcttttctattgtttacacttcttactcttagatatttccagttctcctgtttatctttaagcctgattcttttgagatgtactttttgatgttgccggttacctttagattgacagtattatgcctgggccagtcttgagccagctttaaatcacagcttttacctatttgttaggctatagtgttttgtaaacttctgtttctattcacatcttctccacttgagagagacaccaaaatccagtcagtatctaatctggcttttgttaacttccctcaggagcagacattcatataggtgatactgtatttcagtcctttcttttgaccccagaagccctagactgagaagataaaatggtcaggttgttggggaaaaaaaagtgccaggctctctagagaaaaatgtgaagagatgctccaggccaatgagaagaattagacaagaaatacacagatgtgccagacttctgagaagcacctgccagcaacagcttccttctttgagcttaggtgagcaggattctggggtttgggatttctagtgatggttatggaaagggtgactgtgcctgggacaaagcgaggtcccaaggggacagcctgaactccctgctcatagtagtggccaaataatttggtggactgtgccaacgctactcctgggtttaatacccatctctaggcttaaagatgag

SEQ ID NO: 202 - DNA, 4088 bp, Homo sapiens
gcagggagttcaggctgtccccttgggacctcgctttgtcccaggcacagtcaccctttccataaccatcactagaaatcccaaaccccagaatcctgctcacctaagctcaaagaaggaagctgttgctggcaggtgcttctcagaagtctggcacatctgtgtatttcttgtctaattcttctcattggcctggagcatctcttcacatttttctctagagagcctggcacttttttttccccaacaacctgaccattttatcttctcagtctagggcttctggggtcaaaagaaaggactgaaatacagtatcacctatatgaatgtctgctcctgagggaagttaacaaaagccagattagatactgactggattttggtgtctctctcaagtggagaagatgtgaatagaaacagaagtttacaaaacactatagcctaacaaataggtaaaagctgtgatttaaagctggctcaagactggcccaggcataatactgtcaatctaaaggtaaccggcaacatcaaaaagtacatctcaaaagaatcaggcttaaagataaacaggagaactggaaatatctaagagtaagaagtgtaaacaatagaaaagaggtagggtttagggttctcatcttgggatttccccaggtcttcaagcttctatccttcctgggttctgggtcatgggcctccagattccggccgttagtcttgagatacctttttcgcttgggtcctctatccatctaggtaggctttgtgacaggggccttccatccttgggttgtaggtcttccagctacaaccctgggctaatcttaggtcgttggccttgtgtcacaagtctcagttcttaggccttccatgtgtcctgtcccaggtcttaagacttctaactcaagccttgagacttccatccaactcaggccttcggtccaattcaggccaccctctgttttcttggctcttgaggcttttgttggtttcaggcctgaggcttctatctatcttggaacatgggctttccatcttagtcctcgggtctcaagtctcaaaccatctgtcttatactttgggccttctatccatatgagccttccaccttctgccctacttgagttctgggttttactgcagtctagggccttgttttggtcttggatcatctcacatggcagcctggcataaggaaccgctccacaatgcttgctctgatagccgacgttctgcacctatcaggcaggggttaggaagcccctctgccacacatgacacacacacacgtacacttgcccacatatgcaaagaaatatttaaggagagattacatgaaatcaaagagagggagatagattcatgaagaggctgaaatactcaaaggtgagtagaaagggaagaagcagagaacaaatacaagccaacagagattaatactgaaatagaaaatcacaaacagcaagagatgctgaggcacgcaggggaggagagagagaatagcccaagagaggcagaaaggaaatgcagaaatgagaaatgtgagataaaaagtagaaacagcagaaaggaggccagactcagaaaaaaggtgaaatttaaaacgaacgagaaggggaaggggtaacaaataatcacagttcacaaagagaaaagagaggtaggcagagaaaggagaggtagacagaacaagaaaaggacaaaaagcacacagcatgtgacccaaaaaggagacatgaaataaagcgtgaaagaagagccacatctaggagagcaaagagaaatagcaacaaaatgaaaaatgagagatatgtctaagacaagacacagaccactcttgtgaacaaaaagagaaaatgaggcaaaggcacacacgaaagaaattagcaagagaaacatggaaatgggtaagacacactttagatagagaacaaagagcaaagacaagaaagaaagagacaaagaaatacacacttgagtgcaagagataagcaaaggcagacattcagaggaagtaagtagtagaagaggcaagatacagtgaggggcacaagaggcatgaaaagcatcacagaaagataaaaaaaatcaaaaagtgtcattagtaattataataaactattgttactacgaatactacttatagtactacaataataacaaccaccaataccaacacagatgctcttctatttataaacttttaccttagggatttcttacatagaaccaaagcatgccaactctgcctgctacctgatagtgctagtggtcacttatattgtgggaaatgaacttatgagtcttcttgggttaccttttacttgacatgtgccaggcactgcaataggtgagcactttacatacatgatttcatttaaccctcacaaacagagaagtctagagactttaagttgtcaaaggtcatatacctaatgagtagcagaggatttaaaacacacaatgtatgcctcttaacatcctgttacaactatttactaggatttctggaagagccaaatgggatgtcacagatgactaagtattttcataaaaggctctttgataggacttgctcaatcccctcctttagcatcacctttccccaactctttagaaaactgacttcattctcacacttttataatggctacttcagagtttagttttctttttacactaatcttaactgacgacagagtctctcacaaacggagatgagaaagggttaccctttcagcagaaagcagaaatggtgttttaagcttctcaacgtttaaggctctaagaatgacagagggcctatacagtgaagacatagaacacacaagcaaaggctaaattcttctgtgatacaactggtaagaagaccataatgtctttgagttgcttcagtgaacccagtcagtaatatggaagactggtcatctttccatctcacatttagccccacttcacattagaccaacacaccccatccaacaccagctcccaaaaaacagctgttataacagttctgaagtgatcctcacaggactgcaacatcaacaacttacttcattcagctatcctcaagtgctagagtgccaggcatgttgatcttcaggtgggaaggctgacttccttcagtgtgttcaaatttcttggacctgctgaagactcagctctctgcactgcttgtaggaagtataatgatttggcagataggaacaatgaagagctataaaaaaacatgagataaaccatgtaaatgccataaatattgagtactgtgctagagttacataagattcaaattaataagcaatagaaaatgtttccacagaactttgaaacctataaagtcaaaacttttaggtctttagagagaaaatttcctcattcaacagaataggaaactggcataaatgggaaaatgtcttgccaaatatcacttgatgagtcactagagacaccactaccagtcatagccttataccttagttaaagaccagaactgccgggcgcggtggctcacgcccataatcccagcactttgggaggttgaggtgggcggatcacctgaggtcaggagtttgagaccagcctgaccaacatggagaaacaccgtctctattaaaaatacaaaattagccgggcgtggtggtgcatgactgtaatcccagctacttgggaggctgaggcaggagaatcgcttgaacccgggaggcagaggttgcagtgagctgagattgcaccattgcactccagcctgggcaacaagagcaaaactccatctcaaaaaaaaaaaaaaaaaaaaagacttccatcctgttttaagtgccaatcagctaggaaagagtccctttaaatgattaataactgagatcacaaaaataatagatatgagagggaaaaacataaggtcttcccaatgtttaaggctcacttcgatgttttaagacccctcaagtttgctttaagtctcctggctcaggactaacaaaacacagccttagagcagcattttcaaaactcacaatattgctctttgagataaaggtgagtcactctggaaggcaaatattctcacaataagaaaattcaca

SEQ ID NO: 203 - DNA, 4049 bp, Homo sapiens
tgtgaattttcttattgtgagaatatttgccttccagagtgactcacctttatctcaaagagcaatattgtgagttttgaaaatgctgctctaaggctgtgttttgttagtcctgagccaggagacttaaagcaaacttgaggggtcttaaaacatcgaagtgagccttaaacattgggaagaccttatgtttttccctctcatatctattatttttgtgatctcagttattaatcatttaaagggactctttcctagctgattggcacttaaaacaggatggaagtctttttttttttttttttttttgagatggagttttgctcttgttgcccaggctggagtgcaatggtgcaatctcagctcactgcaacctctgcctcccgggttcaagcgattctcctgcctcagcctcccaagtagctgggattacagtcatgcaccaccacgcccggctaattttgtatttttaatagagacggtgtttctccatgttggtcaggctggtctcaaactcctgacctcaggtgatccgcccacctcaacctcccaaagtgctgggattatgggcgtgagccaccgcgcccggcagttctggtctttaactaaggtataaggctatgactggtagtggtgtctctagtgactcatcaagtgatatttggcaagacattttcccatttatgccagtttcctattctgttgaatgaggaaattttctctctaaagacctaaaagttttgactttataggtttcaaagttctgtggaaacattttctattgcttattaatttgaatcttatgtaactctagcacagtactcaatatttatggcatttacatggtttatctcatgtttttttatagctcttcattgttcctatctgccaaatcattatacttcctacaagcagtgcagagagctgagtcttcagcaggtccaagaaatttgaacacactgaaggaagtcagccttcccacctgaagatcaacatgcctggcactctagcacttgaggatagctgaatgaagtaagttgttgatgttgcagtcctgtgaggatcacttcagaactgttataacagctgttttttgggagctggtgttggatggggtgtgttggtctaatgtgaagtggggctaaatgtgagatggaaagatgaccagtcttccatattactgactgggttcactgaagcaactcaaagacattatggtcttcttaccagttgtatcacagaagaatttagcctttgcttgtgtgttctatgtcttcactgtataggccctctgtcattcttagagccttaaacgttgagaagcttaaaacaccatttctgctttctgctgaaagggtaaccctttctcatctccgtttgtgagagactctgtcgtcagttaagattagtgtaaaaagaaaactaaactctgaagtagccattataaaagtgtgagaatgaagtcagttttctaaagagttggggaaaggtgatgctaaaggaggggattgagcaagtcctatcaaagagccttttatgaaaatacttagtcatctgtgacatcccatttggctcttccagaaatcctagtaaatagttgtaacaggatgttaagaggcatacattgtgtgttttaaatcctctgctactcattaggtatatgacctttgacaacttaaagtctctagacttctctgtttgtgagggttaaatgaaatcatgtatgtaaagtgctcacctattgcagtgcctggcacatgtcaagtaaaaggtaacccaagaagactcataagttcatttcccacaatataagtgaccactagcactatcaggtagcaggcagagttggcatgctttggttctatgtaagaaatccctaaggtaaaagtttataaatagaagagcatctgtgttggtattggtggttgttattattgtagtactataagtagtattcgtagtaacaatagtttattataattactaatgacactttttgattttttttatctttctgtgatgcttttcatgcctcttgtgcccctcactgtatcttgcctcttctactacttacttcctctgaatgtctgcctttgcttatctcttgcactcaagtgtgtatttctttgtctctttctttcttgtctttgctctttgttctctatctaaagtgtgtcttacccatttccatgtttctcttgctaatttctttcgtgtgtgcctttgcctcattttctctttttgttcacaagagtggtctgtgtcttgtcttagacatatctctcatttttcattttgttgctatttctctttgctctcctagatgtggctcttctttcacgctttatttcatgtctcctttttgggtcacatgctgtgtgctttttgtccttttcttgttctgtctacctctcctttctctgcctacctctcttttctctttgtgaactgtgattatttgttaccccttccccttctcgttcgttttaaatttcaccttttttctgagtctggcctcctttctgctgtttctactttttatctcacatttctcatttctgcatttcctttctgcctctcttgggctattctctctctcctcccctgcgtgcctcagcatctcttgctgtttgtgattttctatttcagtattaatctctgttggcttgtatttgttctctgcttcttccctttctactcacctttgagtatttcagcctcttcatgaatctatctccctctctttgatttcatgtaatctctccttaaatatttctttgcatatgtgggcaagtgtacgtgtgtgtgtgtcatgtgtggcagaggggcttcctaacccctgcctgataggtgcagaacgtcggctatcagagcaagcattgtggagcggttccttatgccaggctgccatgtgagatgatccaagaccaaaacaaggccctagactgcagtaaaacccagaactcaagtagggcagaaggtggaaggctcatatggatagaaggcccaaagtataagacagatggtttgagacttgagacccgaggactaagatggaaagcccatgttccaagatagatagaagcctcaggcctgaaaccaacaaaagcctcaagagccaagaaaacagagggtggcctgaattggaccgaaggcctgagttggatggaagtctcaaggcttgagttagaagtcttaagacctgggacaggacacatggaaggcctaagaactgagacttgtgacacaaggccaacgacctaagattagcccagggttgtagctggaagacctacaacccaaggatggaaggcccctgtcacaaagcctacctagatggatagaggacccaagcgaaaaaggtatctcaagactaacggccggaatctggaggcccatgacccagaacccaggaaggatagaagcttgaagacctggggaaatcccaagatgagaaccctaaaccctacctcttttctattgtttacacttcttactcttagatatttccagttctcctgtttatctttaagcctgattcttttgagatgtactttttgatgttgccggttacctttagattgacagtattatgcctgggccagtcttgagccagctttaaatcacagcttttacctatttgttaggctatagtgttttgtaaacttctgtttctattcacatcttctccacttgagagagacaccaaaatccagtcagtatctaatctggcttttgttaacttccctcaggagcagacattcatataggtgatactgtatttcagtcctttcttttgaccccagaagccctagactgagaagataaaatggtcaggttgttggggaaaaaaaagtgccaggctctctagagaaaaatgtgaagagatgctccaggccaatgagaagaattagacaagaaatacacagatgtgccagacttctgagaagcacctgccagcaacagcttccttctttgagcttaggtgagcaggattctggggtttgggatttctagtgatggttatggaaagggtgactgtgcctggg

SEQ ID NO: 204 - DNA, 4095 bp, Homo sapiens
attttcatgggtaagaactcttgaaatgttataattgactagaaatctctgtagatttagaaatagagagttactaacaaattgttagaaagtctaggaactagaaagctaagttgagagttatctaggaagatctatctattgtactcataatctttagataaattctcctagggccagtagtctatgtgaattttctttttcttcttcttcttcttctttttttttgtattttagctgcaatgttaaacaacctatgtgaattttcttattgtgagaatatttgccttccagagtgactcacctttatctcaaagagcaatattgtgagttttgaaaatgctgctctaaggctgtgttttgttagtcctgagccaggagacttaaagcaaacttgaggggtcttaaaacatcgaagtgagccttaaacattgggaagaccttatgtttttccctctcatatctattatttttgtgatctcagttattaatcatttaaagggactctttcctagctgattggcacttaaaacaggatggaagtctttttttttttttttttttttgagatggagttttgctcttgttgcccaggctggagtgcaatggtgcaatctcagctcactgcaacctctgcctcccgggttcaagcgattctcctgcctcagcctcccaagtagctgggattacagtcatgcaccaccacgcccggctaattttgtatttttaatagagacggtgtttctccatgttggtcaggctggtctcaaactcctgacctcaggtgatccgcccacctcaacctcccaaagtgctgggattatgggcgtgagccaccgcgcccggcagttctggtctttaactaaggtataaggctatgactggtagtggtgtctctagtgactcatcaagtgatatttggcaagacattttcccatttatgccagtttcctattctgttgaatgaggaaattttctctctaaagacctaaaagttttgactttataggtttcaaagttctgtggaaacattttctattgcttattaatttgaatcttatgtaactctagcacagtactcaatatttatggcatttacatggtttatctcatgtttttttatagctcttcattgttcctatctgccaaatcattatacttcctacaagcagtgcagagagctgagtcttcagcaggtccaagaaatttgaacacactgaaggaagtcagccttcccacctgaagatcaacatgcctggcactctagcacttgaggatagctgaatgaagtaagttgttgatgttgcagtcctgtgaggatcacttcagaactgttataacagctgttttttgggagctggtgttggatggggtgtgttggtctaatgtgaagtggggctaaatgtgagatggaaagatgaccagtcttccatattactgactgggttcactgaagcaactcaaagacattatggtcttcttaccagttgtatcacagaagaatttagcctttgcttgtgtgttctatgtcttcactgtataggccctctgtcattcttagagccttaaacgttgagaagcttaaaacaccatttctgctttctgctgaaagggtaaccctttctcatctccgtttgtgagagactctgtcgtcagttaagattagtgtaaaaagaaaactaaactctgaagtagccattataaaagtgtgagaatgaagtcagttttctaaagagttggggaaaggtgatgctaaaggaggggattgagcaagtcctatcaaagagccttttatgaaaatacttagtcatctgtgacatcccatttggctcttccagaaatcctagtaaatagttgtaacaggatgttaagaggcatacattgtgtgttttaaatcctctgctactcattaggtatatgacctttgacaacttaaagtctctagacttctctgtttgtgagggttaaatgaaatcatgtatgtaaagtgctcacctattgcagtgcctggcacatgtcaagtaaaaggtaacccaagaagactcataagttcatttcccacaatataagtgaccactagcactatcaggtagcaggcagagttggcatgctttggttctatgtaagaaatccctaaggtaaaagtttataaatagaagagcatctgtgttggtattggtggttgttattattgtagtactataagtagtattcgtagtaacaatagtttattataattactaatgacactttttgattttttttatctttctgtgatgcttttcatgcctcttgtgcccctcactgtatcttgcctcttctactacttacttcctctgaatgtctgcctttgcttatctcttgcactcaagtgtgtatttctttgtctctttctttcttgtctttgctctttgttctctatctaaagtgtgtcttacccatttccatgtttctcttgctaatttctttcgtgtgtgcctttgcctcattttctctttttgttcacaagagtggtctgtgtcttgtcttagacatatctctcatttttcattttgttgctatttctctttgctctcctagatgtggctcttctttcacgctttatttcatgtctcctttttgggtcacatgctgtgtgctttttgtccttttcttgttctgtctacctctcctttctctgcctacctctcttttctctttgtgaactgtgattatttgttaccccttccccttctcgttcgttttaaatttcaccttttttctgagtctggcctcctttctgctgtttctactttttatctcacatttctcatttctgcatttcctttctgcctctcttgggctattctctctctcctcccctgcgtgcctcagcatctcttgctgtttgtgattttctatttcagtattaatctctgttggcttgtatttgttctctgcttcttccctttctactcacctttgagtatttcagcctcttcatgaatctatctccctctctttgatttcatgtaatctctccttaaatatttctttgcatatgtgggcaagtgtacgtgtgtgtgtgtcatgtgtggcagaggggcttcctaacccctgcctgataggtgcagaacgtcggctatcagagcaagcattgtggagcggttccttatgccaggctgccatgtgagatgatccaagaccaaaacaaggccctagactgcagtaaaacccagaactcaagtagggcagaaggtggaaggctcatatggatagaaggcccaaagtataagacagatggtttgagacttgagacccgaggactaagatggaaagcccatgttccaagatagatagaagcctcaggcctgaaaccaacaaaagcctcaagagccaagaaaacagagggtggcctgaattggaccgaaggcctgagttggatggaagtctcaaggcttgagttagaagtcttaagacctgggacaggacacatggaaggcctaagaactgagacttgtgacacaaggccaacgacctaagattagcccagggttgtagctggaagacctacaacccaaggatggaaggcccctgtcacaaagcctacctagatggatagaggacccaagcgaaaaaggtatctcaagactaacggccggaatctggaggcccatgacccagaacccaggaaggatagaagcttgaagacctggggaaatcccaagatgagaaccctaaaccctacctcttttctattgtttacacttcttactcttagatatttccagttctcctgtttatctttaagcctgattcttttgagatgtactttttgatgttgccggttacctttagattgacagtattatgcctgggccagtcttgagccagctttaaatcacagcttttacctatttgttaggctatagtgttttgtaaacttctgtttctattcacatcttctccacttgagagagacaccaaaatccagtcagtatctaatctggcttttgttaacttccctcaggagcagacattcatataggtgatactgtatttcagtcctttcttttgaccccagaagccctagactgagaagataaaatggtcagg

SEQ ID NO: 205 - DNA, 4064 bp, Homo sapiens
ctgaacgtataggctttgcccagcattcttcgtaaatagtgggtagctataaatttcatgaaatattttcatgggtaagaactcttgaaatgttataattgactagaaatctctgtagatttagaaatagagagttactaacaaattgttagaaagtctaggaactagaaagctaagttgagagttatctaggaagatctatctattgtactcataatctttagataaattctcctagggccagtagtctatgtgaattttctttttcttcttcttcttcttctttttttttgtattttagctgcaatgttaaacaacctatgtgaattttcttattgtgagaatatttgccttccagagtgactcacctttatctcaaagagcaatattgtgagttttgaaaatgctgctctaaggctgtgttttgttagtcctgagccaggagacttaaagcaaacttgaggggtcttaaaacatcgaagtgagccttaaacattgggaagaccttatgtttttccctctcatatctattatttttgtgatctcagttattaatcatttaaagggactctttcctagctgattggcacttaaaacaggatggaagtctttttttttttttttttttttgagatggagttttgctcttgttgcccaggctggagtgcaatggtgcaatctcagctcactgcaacctctgcctcccgggttcaagcgattctcctgcctcagcctcccaagtagctgggattacagtcatgcaccaccacgcccggctaattttgtatttttaatagagacggtgtttctccatgttggtcaggctggtctcaaactcctgacctcaggtgatccgcccacctcaacctcccaaagtgctgggattatgggcgtgagccaccgcgcccggcagttctggtctttaactaaggtataaggctatgactggtagtggtgtctctagtgactcatcaagtgatatttggcaagacattttcccatttatgccagtttcctattctgttgaatgaggaaattttctctctaaagacctaaaagttttgactttataggtttcaaagttctgtggaaacattttctattgcttattaatttgaatcttatgtaactctagcacagtactcaatatttatggcatttacatggtttatctcatgtttttttatagctcttcattgttcctatctgccaaatcattatacttcctacaagcagtgcagagagctgagtcttcagcaggtccaagaaatttgaacacactgaaggaagtcagccttcccacctgaagatcaacatgcctggcactctagcacttgaggatagctgaatgaagtaagttgttgatgttgcagtcctgtgaggatcacttcagaactgttataacagctgttttttgggagctggtgttggatggggtgtgttggtctaatgtgaagtggggctaaatgtgagatggaaagatgaccagtcttccatattactgactgggttcactgaagcaactcaaagacattatggtcttcttaccagttgtatcacagaagaatttagcctttgcttgtgtgttctatgtcttcactgtataggccctctgtcattcttagagccttaaacgttgagaagcttaaaacaccatttctgctttctgctgaaagggtaaccctttctcatctccgtttgtgagagactctgtcgtcagttaagattagtgtaaaaagaaaactaaactctgaagtagccattataaaagtgtgagaatgaagtcagttttctaaagagttggggaaaggtgatgctaaaggaggggattgagcaagtcctatcaaagagccttttatgaaaatacttagtcatctgtgacatcccatttggctcttccagaaatcctagtaaatagttgtaacaggatgttaagaggcatacattgtgtgttttaaatcctctgctactcattaggtatatgacctttgacaacttaaagtctctagacttctctgtttgtgagggttaaatgaaatcatgtatgtaaagtgctcacctattgcagtgcctggcacatgtcaagtaaaaggtaacccaagaagactcataagttcatttcccacaatataagtgaccactagcactatcaggtagcaggcagagttggcatgctttggttctatgtaagaaatccctaaggtaaaagtttataaatagaagagcatctgtgttggtattggtggttgttattattgtagtactataagtagtattcgtagtaacaatagtttattataattactaatgacactttttgattttttttatctttctgtgatgcttttcatgcctcttgtgcccctcactgtatcttgcctcttctactacttacttcctctgaatgtctgcctttgcttatctcttgcactcaagtgtgtatttctttgtctctttctttcttgtctttgctctttgttctctatctaaagtgtgtcttacccatttccatgtttctcttgctaatttctttcgtgtgtgcctttgcctcattttctctttttgttcacaagagtggtctgtgtcttgtcttagacatatctctcatttttcattttgttgctatttctctttgctctcctagatgtggctcttctttcacgctttatttcatgtctcctttttgggtcacatgctgtgtgctttttgtccttttcttgttctgtctacctctcctttctctgcctacctctcttttctctttgtgaactgtgattatttgttaccccttccccttctcgttcgttttaaatttcaccttttttctgagtctggcctcctttctgctgtttctactttttatctcacatttctcatttctgcatttcctttctgcctctcttgggctattctctctctcctcccctgcgtgcctcagcatctcttgctgtttgtgattttctatttcagtattaatctctgttggcttgtatttgttctctgcttcttccctttctactcacctttgagtatttcagcctcttcatgaatctatctccctctctttgatttcatgtaatctctccttaaatatttctttgcatatgtgggcaagtgtacgtgtgtgtgtgtcatgtgtggcagaggggcttcctaacccctgcctgataggtgcagaacgtcggctatcagagcaagcattgtggagcggttccttatgccaggctgccatgtgagatgatccaagaccaaaacaaggccctagactgcagtaaaacccagaactcaagtagggcagaaggtggaaggctcatatggatagaaggcccaaagtataagacagatggtttgagacttgagacccgaggactaagatggaaagcccatgttccaagatagatagaagcctcaggcctgaaaccaacaaaagcctcaagagccaagaaaacagagggtggcctgaattggaccgaaggcctgagttggatggaagtctcaaggcttgagttagaagtcttaagacctgggacaggacacatggaaggcctaagaactgagacttgtgacacaaggccaacgacctaagattagcccagggttgtagctggaagacctacaacccaaggatggaaggcccctgtcacaaagcctacctagatggatagaggacccaagcgaaaaaggtatctcaagactaacggccggaatctggaggcccatgacccagaacccaggaaggatagaagcttgaagacctggggaaatcccaagatgagaaccctaaaccctacctcttttctattgtttacacttcttactcttagatatttccagttctcctgtttatctttaagcctgattcttttgagatgtactttttgatgttgccggttacctttagattgacagtattatgcctgggccagtcttgagccagctttaaatcacagcttttacctatttgttaggctatagtgttttgtaaacttctgtttctattcacatcttctccacttgagagagacaccaaaatccagtcagtatctaatctggcttttgttaac

SEQ ID NO: 206 - DNA, 4155 bp, Homo sapiens
gtcacatcagtgacattgatcacatgggcaaatcattctgttccatgtggtccccaaagtctctcttaaagccttacagaagaactttgccaatcatttacatacttcaggatggcttgggatgccatggtgtataatacaacaagtgagaggtgtgtctttttatgctatggttgctgattgatggaagccgcataaatacaaatggaaacctgactaaaaatggcacaaagttatctgtcatcaggcaggagctaaagaaccaggaccctacattctctaggtcagtgttgggagaggctgattagcgagtgagaattggcagataaaggtgaccattcggtgcaataaatcctgaacgtataggctttgcccagcattcttcgtaaatagtgggtagctataaatttcatgaaatattttcatgggtaagaactcttgaaatgttataattgactagaaatctctgtagatttagaaatagagagttactaacaaattgttagaaagtctaggaactagaaagctaagttgagagttatctaggaagatctatctattgtactcataatctttagataaattctcctagggccagtagtctatgtgaattttctttttcttcttcttcttcttctttttttttgtattttagctgcaatgttaaacaacctatgtgaattttcttattgtgagaatatttgccttccagagtgactcacctttatctcaaagagcaatattgtgagttttgaaaatgctgctctaaggctgtgttttgttagtcctgagccaggagacttaaagcaaacttgaggggtcttaaaacatcgaagtgagccttaaacattgggaagaccttatgtttttccctctcatatctattatttttgtgatctcagttattaatcatttaaagggactctttcctagctgattggcacttaaaacaggatggaagtctttttttttttttttttttttgagatggagttttgctcttgttgcccaggctggagtgcaatggtgcaatctcagctcactgcaacctctgcctcccgggttcaagcgattctcctgcctcagcctcccaagtagctgggattacagtcatgcaccaccacgcccggctaattttgtatttttaatagagacggtgtttctccatgttggtcaggctggtctcaaactcctgacctcaggtgatccgcccacctcaacctcccaaagtgctgggattatgggcgtgagccaccgcgcccggcagttctggtctttaactaaggtataaggctatgactggtagtggtgtctctagtgactcatcaagtgatatttggcaagacattttcccatttatgccagtttcctattctgttgaatgaggaaattttctctctaaagacctaaaagttttgactttataggtttcaaagttctgtggaaacattttctattgcttattaatttgaatcttatgtaactctagcacagtactcaatatttatggcatttacatggtttatctcatgtttttttatagctcttcattgttcctatctgccaaatcattatacttcctacaagcagtgcagagagctgagtcttcagcaggtccaagaaatttgaacacactgaaggaagtcagccttcccacctgaagatcaacatgcctggcactctagcacttgaggatagctgaatgaagtaagttgttgatgttgcagtcctgtgaggatcacttcagaactgttataacagctgttttttgggagctggtgttggatggggtgtgttggtctaatgtgaagtggggctaaatgtgagatggaaagatgaccagtcttccatattactgactgggttcactgaagcaactcaaagacattatggtcttcttaccagttgtatcacagaagaatttagcctttgcttgtgtgttctatgtcttcactgtataggccctctgtcattcttagagccttaaacgttgagaagcttaaaacaccatttctgctttctgctgaaagggtaaccctttctcatctccgtttgtgagagactctgtcgtcagttaagattagtgtaaaaagaaaactaaactctgaagtagccattataaaagtgtgagaatgaagtcagttttctaaagagttggggaaaggtgatgctaaaggaggggattgagcaagtcctatcaaagagccttttatgaaaatacttagtcatctgtgacatcccatttggctcttccagaaatcctagtaaatagttgtaacaggatgttaagaggcatacattgtgtgttttaaatcctctgctactcattaggtatatgacctttgacaacttaaagtctctagacttctctgtttgtgagggttaaatgaaatcatgtatgtaaagtgctcacctattgcagtgcctggcacatgtcaagtaaaaggtaacccaagaagactcataagttcatttcccacaatataagtgaccactagcactatcaggtagcaggcagagttggcatgctttggttctatgtaagaaatccctaaggtaaaagtttataaatagaagagcatctgtgttggtattggtggttgttattattgtagtactataagtagtattcgtagtaacaatagtttattataattactaatgacactttttgattttttttatctttctgtgatgcttttcatgcctcttgtgcccctcactgtatcttgcctcttctactacttacttcctctgaatgtctgcctttgcttatctcttgcactcaagtgtgtatttctttgtctctttctttcttgtctttgctctttgttctctatctaaagtgtgtcttacccatttccatgtttctcttgctaatttctttcgtgtgtgcctttgcctcattttctctttttgttcacaagagtggtctgtgtcttgtcttagacatatctctcatttttcattttgttgctatttctctttgctctcctagatgtggctcttctttcacgctttatttcatgtctcctttttgggtcacatgctgtgtgctttttgtccttttcttgttctgtctacctctcctttctctgcctacctctcttttctctttgtgaactgtgattatttgttaccccttccccttctcgttcgttttaaatttcaccttttttctgagtctggcctcctttctgctgtttctactttttatctcacatttctcatttctgcatttcctttctgcctctcttgggctattctctctctcctcccctgcgtgcctcagcatctcttgctgtttgtgattttctatttcagtattaatctctgttggcttgtatttgttctctgcttcttccctttctactcacctttgagtatttcagcctcttcatgaatctatctccctctctttgatttcatgtaatctctccttaaatatttctttgcatatgtgggcaagtgtacgtgtgtgtgtgtcatgtgtggcagaggggcttcctaacccctgcctgataggtgcagaacgtcggctatcagagcaagcattgtggagcggttccttatgccaggctgccatgtgagatgatccaagaccaaaacaaggccctagactgcagtaaaacccagaactcaagtagggcagaaggtggaaggctcatatggatagaaggcccaaagtataagacagatggtttgagacttgagacccgaggactaagatggaaagcccatgttccaagatagatagaagcctcaggcctgaaaccaacaaaagcctcaagagccaagaaaacagagggtggcctgaattggaccgaaggcctgagttggatggaagtctcaaggcttgagttagaagtcttaagacctgggacaggacacatggaaggcctaagaactgagacttgtgacacaaggccaacgacctaagattagcccagggttgtagctggaagacctacaacccaaggatggaaggcccctgtcacaaagcctacctagatggatagaggacccaagcgaaaaaggtatctcaagactaacggccggaatctggaggcccatgacccagaacccaggaaggatagaagcttgaagacctggggaaatcccaagatgagaaccctaaaccctacctcttttcta

SEQ ID NO: 207 - DNA, 4040 bp, Homo sapiens
gccttctatccatatgagccttccaccttctgccctacttgagttctgggttttactgcagtctagggccttgttttggtcttggatcatctcacatggcagcctggcataaggaaccgctccacaatgcttgctctgatagccgacgttctgcacctatcaggcaggggttaggaagcccctctgccacacatgacacacacacacgtacacttgcccacatatgcaaagaaatatttaaggagagattacatgaaatcaaagagagggagatagattcatgaagaggctgaaatactcaaaggtgagtagaaagggaagaagcagagaacaaatacaagccaacagagattaatactgaaatagaaaatcacaaacagcaagagatgctgaggcacgcaggggaggagagagagaatagcccaagagaggcagaaaggaaatgcagaaatgagaaatgtgagataaaaagtagaaacagcagaaaggaggccagactcagaaaaaaggtgaaatttaaaacgaacgagaaggggaaggggtaacaaataatcacagttcacaaagagaaaagagaggtaggcagagaaaggagaggtagacagaacaagaaaaggacaaaaagcacacagcatgtgacccaaaaaggagacatgaaataaagcgtgaaagaagagccacatctaggagagcaaagagaaatagcaacaaaatgaaaaatgagagatatgtctaagacaagacacagaccactcttgtgaacaaaaagagaaaatgaggcaaaggcacacacgaaagaaattagcaagagaaacatggaaatgggtaagacacactttagatagagaacaaagagcaaagacaagaaagaaagagacaaagaaatacacacttgagtgcaagagataagcaaaggcagacattcagaggaagtaagtagtagaagaggcaagatacagtgaggggcacaagaggcatgaaaagcatcacagaaagataaaaaaaatcaaaaagtgtcattagtaattataataaactattgttactacgaatactacttatagtactacaataataacaaccaccaataccaacacagatgctcttctatttataaacttttaccttagggatttcttacatagaaccaaagcatgccaactctgcctgctacctgatagtgctagtggtcacttatattgtgggaaatgaacttatgagtcttcttgggttaccttttacttgacatgtgccaggcactgcaataggtgagcactttacatacatgatttcatttaaccctcacaaacagagaagtctagagactttaagttgtcaaaggtcatatacctaatgagtagcagaggatttaaaacacacaatgtatgcctcttaacatcctgttacaactatttactaggatttctggaagagccaaatgggatgtcacagatgactaagtattttcataaaaggctctttgataggacttgctcaatcccctcctttagcatcacctttccccaactctttagaaaactgacttcattctcacacttttataatggctacttcagagtttagttttctttttacactaatcttaactgacgacagagtctctcacaaacggagatgagaaagggttaccctttcagcagaaagcagaaatggtgttttaagcttctcaacgtttaaggctctaagaatgacagagggcctatacagtgaagacatagaacacacaagcaaaggctaaattcttctgtgatacaactggtaagaagaccataatgtctttgagttgcttcagtgaacccagtcagtaatatggaagactggtcatctttccatctcacatttagccccacttcacattagaccaacacaccccatccaacaccagctcccaaaaaacagctgttataacagttctgaagtgatcctcacaggactgcaacatcaacaacttacttcattcagctatcctcaagtgctagagtgccaggcatgttgatcttcaggtgggaaggctgacttccttcagtgtgttcaaatttcttggacctgctgaagactcagctctctgcactgcttgtaggaagtataatgatttggcagataggaacaatgaagagctataaaaaaacatgagataaaccatgtaaatgccataaatattgagtactgtgctagagttacataagattcaaattaataagcaatagaaaatgtttccacagaactttgaaacctataaagtcaaaacttttaggtctttagagagaaaatttcctcattcaacagaataggaaactggcataaatgggaaaatgtcttgccaaatatcacttgatgagtcactagagacaccactaccagtcatagccttataccttagttaaagaccagaactgccgggcgcggtggctcacgcccataatcccagcactttgggaggttgaggtgggcggatcacctgaggtcaggagtttgagaccagcctgaccaacatggagaaacaccgtctctattaaaaatacaaaattagccgggcgtggtggtgcatgactgtaatcccagctacttgggaggctgaggcaggagaatcgcttgaacccgggaggcagaggttgcagtgagctgagattgcaccattgcactccagcctgggcaacaagagcaaaactccatctcaaaaaaaaaaaaaaaaaaaaagacttccatcctgttttaagtgccaatcagctaggaaagagtccctttaaatgattaataactgagatcacaaaaataatagatatgagagggaaaaacataaggtcttcccaatgtttaaggctcacttcgatgttttaagacccctcaagtttgctttaagtctcctggctcaggactaacaaaacacagccttagagcagcattttcaaaactcacaatattgctctttgagataaaggtgagtcactctggaaggcaaatattctcacaataagaaaattcacataggttgtttaacattgcagctaaaatacaaaaaaaaagaagaagaagaagaagaaaaagaaaattcacatagactactggccctaggagaatttatctaaagattatgagtacaatagatagatcttcctagataactctcaacttagctttctagttcctagactttctaacaatttgttagtaactctctatttctaaatctacagagatttctagtcaattataacatttcaagagttcttacccatgaaaatatttcatgaaatttatagctacccactatttacgaagaatgctgggcaaagcctatacgttcaggatttattgcaccgaatggtcacctttatctgccaattctcactcgctaatcagcctctcccaacactgacctagagaatgtagggtcctggttctttagctcctgcctgatgacagataactttgtgccatttttagtcaggtttccatttgtatttatgcggcttccatcaatcagcaaccatagcataaaaagacacacctctcacttgttgtattatacaccatggcatcccaagccatcctgaagtatgtaaatgattggcaaagttcttctgtaaggctttaagagagactttggggaccacatggaacagaatgatttgcccatgtgatcaatgtcactgatgtgacagttgtccatgttctcctaaaagaacaacttagctgtaagcctctgccacgtgctatagtcccactccaaacacccgaacacatgcaacccgctaccctctttacatcatcactttaaccagttaatctcacacccagttgcttcccaggttagttaggaagctgtttttaccaaatcatatgcagaataatgatgaatacgacctcagtgaaacactaagtgcaatgtatactggaaaacaaaatcaaaattaagactacttattatgcttttagggacagcttacgcaccttgacgtgtggtggttgtttttgagactttatcttcctatctgggaccaggaaagtatcttgacaga

SEQ ID NO: 208 - DNA, 4041 bp, Homo sapiens
gaagagccaaatgggatgtcacagatgactaagtattttcataaaaggctctttgataggacttgctcaatcccctcctttagcatcacctttccccaactctttagaaaactgacttcattctcacacttttataatggctacttcagagtttagttttctttttacactaatcttaactgacgacagagtctctcacaaacggagatgagaaagggttaccctttcagcagaaagcagaaatggtgttttaagcttctcaacgtttaaggctctaagaatgacagagggcctatacagtgaagacatagaacacacaagcaaaggctaaattcttctgtgatacaactggtaagaagaccataatgtctttgagttgcttcagtgaacccagtcagtaatatggaagactggtcatctttccatctcacatttagccccacttcacattagaccaacacaccccatccaacaccagctcccaaaaaacagctgttataacagttctgaagtgatcctcacaggactgcaacatcaacaacttacttcattcagctatcctcaagtgctagagtgccaggcatgttgatcttcaggtgggaaggctgacttccttcagtgtgttcaaatttcttggacctgctgaagactcagctctctgcactgcttgtaggaagtataatgatttggcagataggaacaatgaagagctataaaaaaacatgagataaaccatgtaaatgccataaatattgagtactgtgctagagttacataagattcaaattaataagcaatagaaaatgtttccacagaactttgaaacctataaagtcaaaacttttaggtctttagagagaaaatttcctcattcaacagaataggaaactggcataaatgggaaaatgtcttgccaaatatcacttgatgagtcactagagacaccactaccagtcatagccttataccttagttaaagaccagaactgccgggcgcggtggctcacgcccataatcccagcactttgggaggttgaggtgggcggatcacctgaggtcaggagtttgagaccagcctgaccaacatggagaaacaccgtctctattaaaaatacaaaattagccgggcgtggtggtgcatgactgtaatcccagctacttgggaggctgaggcaggagaatcgcttgaacccgggaggcagaggttgcagtgagctgagattgcaccattgcactccagcctgggcaacaagagcaaaactccatctcaaaaaaaaaaaaaaaaaaaaagacttccatcctgttttaagtgccaatcagctaggaaagagtccctttaaatgattaataactgagatcacaaaaataatagatatgagagggaaaaacataaggtcttcccaatgtttaaggctcacttcgatgttttaagacccctcaagtttgctttaagtctcctggctcaggactaacaaaacacagccttagagcagcattttcaaaactcacaatattgctctttgagataaaggtgagtcactctggaaggcaaatattctcacaataagaaaattcacataggttgtttaacattgcagctaaaatacaaaaaaaaagaagaagaagaagaagaaaaagaaaattcacatagactactggccctaggagaatttatctaaagattatgagtacaatagatagatcttcctagataactctcaacttagctttctagttcctagactttctaacaatttgttagtaactctctatttctaaatctacagagatttctagtcaattataacatttcaagagttcttacccatgaaaatatttcatgaaatttatagctacccactatttacgaagaatgctgggcaaagcctatacgttcaggatttattgcaccgaatggtcacctttatctgccaattctcactcgctaatcagcctctcccaacactgacctagagaatgtagggtcctggttctttagctcctgcctgatgacagataactttgtgccatttttagtcaggtttccatttgtatttatgcggcttccatcaatcagcaaccatagcataaaaagacacacctctcacttgttgtattatacaccatggcatcccaagccatcctgaagtatgtaaatgattggcaaagttcttctgtaaggctttaagagagactttggggaccacatggaacagaatgatttgcccatgtgatcaatgtcactgatgtgacagttgtccatgttctcctaaaagaacaacttagctgtaagcctctgccacgtgctatagtcccactccaaacacccgaacacatgcaacccgctaccctctttacatcatcactttaaccagttaatctcacacccagttgcttcccaggttagttaggaagctgtttttaccaaatcatatgcagaataatgatgaatacgacctcagtgaaacactaagtgcaatgtatactggaaaacaaaatcaaaattaagactacttattatgcttttagggacagcttacgcaccttgacgtgtggtggttgtttttgagactttatcttcctatctgggaccaggaaagtatcttgacagaacctcctgacctagggttgttgcccagtggtagtgagcttttcccctggaggatcctcatgccccatctccacctagggatcgtcaaagggaatggatcactaacactgtaaaacaacaagcctattcttctgaggaagatctgaaaagagataaaagaaaaagtattgaaatgcagtacactgggaaagtctgttctaatgggcaactagtggttgagttcaaccatatttttacccttttcttcatgtggattgaagagtggacatttacagttgtgcggagctgttatattctggctaccaacttagcaaaaaaaaaaaaaattatcctattcattccagctctattctgtatgctttccctcatttccaagagaaatttagaactgagtaattgccaatattcccatgctgcattttattctccagtctttattactgagcgatcctctacaatgtgggttgttaatacccttgtgttctcagcacaaaatatagtaggggggtcaagaaatcaagaggttgaaactaatggaaggagaaactaatgctttctcaaccaagagagccatgaagccacacagaaaaggtcggatgtggtctaaccctatgagttatgtaagaattctcctccacaatgcctctggcttcctttataaagagctattttaagaactgagaaatccacctctatcaaagtgcctgtcagctagttctgtagcatccccctcttttaatttgtactttaagtagtgccatgccataatattgccaagataaagagaattgtttcctactcaatccacatggtaacatttcttcaacaacctgtataatagggcgccaccaaagttctaggatattcggagaaaccaagaatggtcacaagcacatagaactccagttataacaacagctggccaggcgtggtggctcacgcctgtaatcccagcagtttgggaggtcgaggcgggtgaatcacctgaggtcaggagtttgagaccagcctgaccaacatggagaaaccccgtctctactaaaaatacaaaattagcctggcgtggtcgcgcatgcctgtaatctcagctactcgagaggctgaggcaggagaataacttgaacccaggagacagaggttgcagtgagctgagattgcgccattgcactccagcctgggcaacaagagcgaaactgcgaaaaaaaaaaaatacacgccacaaaaacagttaagcaaatctatgcagaaggaaaaacaaggtacagaaaaccagggattcagtaaattccttatacaggcccccggggctctcctattccactttttaacaatttcaattgtttttcaagctaagaaattttgatttcttaaaacaaggaaatggcagtgataatggaattaggcctaccaaaactgagctaatacagatg

SEQ ID NO: 209 - DNA, 4047 bp, Homo sapiens
taagttctcaggatttgtttacaaataagactaacttcatctgtattagctcagttttggtaggcctaattccattatcactgccatttccttgttttaagaaatcaaaatttcttagcttgaaaaacaattgaaattgttaaaaagtggaataggagagccccgggggcctgtataaggaatttactgaatccctggttttctgtaccttgtttttccttctgcatagatttgcttaactgtttttgtggcgtgtattttttttttttcgcagtttcgctcttgttgcccaggctggagtgcaatggcgcaatctcagctcactgcaacctctgtctcctgggttcaagttattctcctgcctcagcctctcgagtagctgagattacaggcatgcgcgaccacgccaggctaattttgtatttttagtagagacggggtttctccatgttggtcaggctggtctcaaactcctgacctcaggtgattcacccgcctcgacctcccaaactgctgggattacaggcgtgagccaccacgcctggccagctgttgttataactggagttctatgtgcttgtgaccattcttggtttctccgaatatcctagaactttggtggcgccctattatacaggttgttgaagaaatgttaccatgtggattgagtaggaaacaattctctttatcttggcaatattatggcatggcactacttaaagtacaaattaaaagagggggatgctacagaactagctgacaggcactttgatagaggtggatttctcagttcttaaaatagctctttataaaggaagccagaggcattgtggaggagaattcttacataactcatagggttagaccacatccgaccttttctgtgtggcttcatggctctcttggttgagaaagcattagtttctccttccattagtttcaacctcttgatttcttgacccccctactatattttgtgctgagaacacaagggtattaacaacccacattgtagaggatcgctcagtaataaagactggagaataaaatgcagcatgggaatattggcaattactcagttctaaatttctcttggaaatgagggaaagcatacagaatagagctggaatgaataggataattttttttttttttgctaagttggtagccagaatataacagctccgcacaactgtaaatgtccactcttcaatccacatgaagaaaagggtaaaaatatggttgaactcaaccactagttgcccattagaacagactttcccagtgtactgcatttcaatactttttcttttatctcttttcagatcttcctcagaagaataggcttgttgttttacagtgttagtgatccattccctttgacgatccctaggtggagatggggcatgaggatcctccaggggaaaagctcactaccactgggcaacaaccctaggtcaggaggttctgtcaagatactttcctggtcccagataggaagataaagtctcaaaaacaaccaccacacgtcaaggtgcgtaagctgtccctaaaagcataataagtagtcttaattttgattttgttttccagtatacattgcacttagtgtttcactgaggtcgtattcatcattattctgcatatgatttggtaaaaacagcttcctaactaacctgggaagcaactgggtgtgagattaactggttaaagtgatgatgtaaagagggtagcgggttgcatgtgttcgggtgtttggagtgggactatagcacgtggcagaggcttacagctaagttgttcttttaggagaacatggacaactgtcacatcagtgacattgatcacatgggcaaatcattctgttccatgtggtccccaaagtctctcttaaagccttacagaagaactttgccaatcatttacatacttcaggatggcttgggatgccatggtgtataatacaacaagtgagaggtgtgtctttttatgctatggttgctgattgatggaagccgcataaatacaaatggaaacctgactaaaaatggcacaaagttatctgtcatcaggcaggagctaaagaaccaggaccctacattctctaggtcagtgttgggagaggctgattagcgagtgagaattggcagataaaggtgaccattcggtgcaataaatcctgaacgtataggctttgcccagcattcttcgtaaatagtgggtagctataaatttcatgaaatattttcatgggtaagaactcttgaaatgttataattgactagaaatctctgtagatttagaaatagagagttactaacaaattgttagaaagtctaggaactagaaagctaagttgagagttatctaggaagatctatctattgtactcataatctttagataaattctcctagggccagtagtctatgtgaattttctttttcttcttcttcttcttctttttttttgtattttagctgcaatgttaaacaacctatgtgaattttcttattgtgagaatatttgccttccagagtgactcacctttatctcaaagagcaatattgtgagttttgaaaatgctgctctaaggctgtgttttgttagtcctgagccaggagacttaaagcaaacttgaggggtcttaaaacatcgaagtgagccttaaacattgggaagaccttatgtttttccctctcatatctattatttttgtgatctcagttattaatcatttaaagggactctttcctagctgattggcacttaaaacaggatggaagtctttttttttttttttttttttgagatggagttttgctcttgttgcccaggctggagtgcaatggtgcaatctcagctcactgcaacctctgcctcccgggttcaagcgattctcctgcctcagcctcccaagtagctgggattacagtcatgcaccaccacgcccggctaattttgtatttttaatagagacggtgtttctccatgttggtcaggctggtctcaaactcctgacctcaggtgatccgcccacctcaacctcccaaagtgctgggattatgggcgtgagccaccgcgcccggcagttctggtctttaactaaggtataaggctatgactggtagtggtgtctctagtgactcatcaagtgatatttggcaagacattttcccatttatgccagtttcctattctgttgaatgaggaaattttctctctaaagacctaaaagttttgactttataggtttcaaagttctgtggaaacattttctattgcttattaatttgaatcttatgtaactctagcacagtactcaatatttatggcatttacatggtttatctcatgtttttttatagctcttcattgttcctatctgccaaatcattatacttcctacaagcagtgcagagagctgagtcttcagcaggtccaagaaatttgaacacactgaaggaagtcagccttcccacctgaagatcaacatgcctggcactctagcacttgaggatagctgaatgaagtaagttgttgatgttgcagtcctgtgaggatcacttcagaactgttataacagctgttttttgggagctggtgttggatggggtgtgttggtctaatgtgaagtggggctaaatgtgagatggaaagatgaccagtcttccatattactgactgggttcactgaagcaactcaaagacattatggtcttcttaccagttgtatcacagaagaatttagcctttgcttgtgtgttctatgtcttcactgtataggccctctgtcattcttagagccttaaacgttgagaagcttaaaacaccatttctgctttctgctgaaagggtaaccctttctcatctccgtttgtgagagactctgtcgtcagttaagattagtgtaaaaagaaaactaaactctgaagtagccattataaaagtgtgagaatgaagtcagttttctaaagagttggggaaaggtgatgctaaaggaggggattgagcaagtcctatcaaagagccttttatgaaaatact

SEQ ID NO: 210 - DNA, 4046 bp, Homo sapiens
cttcattcagctatcctcaagtgctagagtgccaggcatgttgatcttcaggtgggaaggctgacttccttcagtgtgttcaaatttcttggacctgctgaagactcagctctctgcactgcttgtaggaagtataatgatttggcagataggaacaatgaagagctataaaaaaacatgagataaaccatgtaaatgccataaatattgagtactgtgctagagttacataagattcaaattaataagcaatagaaaatgtttccacagaactttgaaacctataaagtcaaaacttttaggtctttagagagaaaatttcctcattcaacagaataggaaactggcataaatgggaaaatgtcttgccaaatatcacttgatgagtcactagagacaccactaccagtcatagccttataccttagttaaagaccagaactgccgggcgcggtggctcacgcccataatcccagcactttgggaggttgaggtgggcggatcacctgaggtcaggagtttgagaccagcctgaccaacatggagaaacaccgtctctattaaaaatacaaaattagccgggcgtggtggtgcatgactgtaatcccagctacttgggaggctgaggcaggagaatcgcttgaacccgggaggcagaggttgcagtgagctgagattgcaccattgcactccagcctgggcaacaagagcaaaactccatctcaaaaaaaaaaaaaaaaaaaaagacttccatcctgttttaagtgccaatcagctaggaaagagtccctttaaatgattaataactgagatcacaaaaataatagatatgagagggaaaaacataaggtcttcccaatgtttaaggctcacttcgatgttttaagacccctcaagtttgctttaagtctcctggctcaggactaacaaaacacagccttagagcagcattttcaaaactcacaatattgctctttgagataaaggtgagtcactctggaaggcaaatattctcacaataagaaaattcacataggttgtttaacattgcagctaaaatacaaaaaaaaagaagaagaagaagaagaaaaagaaaattcacatagactactggccctaggagaatttatctaaagattatgagtacaatagatagatcttcctagataactctcaacttagctttctagttcctagactttctaacaatttgttagtaactctctatttctaaatctacagagatttctagtcaattataacatttcaagagttcttacccatgaaaatatttcatgaaatttatagctacccactatttacgaagaatgctgggcaaagcctatacgttcaggatttattgcaccgaatggtcacctttatctgccaattctcactcgctaatcagcctctcccaacactgacctagagaatgtagggtcctggttctttagctcctgcctgatgacagataactttgtgccatttttagtcaggtttccatttgtatttatgcggcttccatcaatcagcaaccatagcataaaaagacacacctctcacttgttgtattatacaccatggcatcccaagccatcctgaagtatgtaaatgattggcaaagttcttctgtaaggctttaagagagactttggggaccacatggaacagaatgatttgcccatgtgatcaatgtcactgatgtgacagttgtccatgttctcctaaaagaacaacttagctgtaagcctctgccacgtgctatagtcccactccaaacacccgaacacatgcaacccgctaccctctttacatcatcactttaaccagttaatctcacacccagttgcttcccaggttagttaggaagctgtttttaccaaatcatatgcagaataatgatgaatacgacctcagtgaaacactaagtgcaatgtatactggaaaacaaaatcaaaattaagactacttattatgcttttagggacagcttacgcaccttgacgtgtggtggttgtttttgagactttatcttcctatctgggaccaggaaagtatcttgacagaacctcctgacctagggttgttgcccagtggtagtgagcttttcccctggaggatcctcatgccccatctccacctagggatcgtcaaagggaatggatcactaacactgtaaaacaacaagcctattcttctgaggaagatctgaaaagagataaaagaaaaagtattgaaatgcagtacactgggaaagtctgttctaatgggcaactagtggttgagttcaaccatatttttacccttttcttcatgtggattgaagagtggacatttacagttgtgcggagctgttatattctggctaccaacttagcaaaaaaaaaaaaaattatcctattcattccagctctattctgtatgctttccctcatttccaagagaaatttagaactgagtaattgccaatattcccatgctgcattttattctccagtctttattactgagcgatcctctacaatgtgggttgttaatacccttgtgttctcagcacaaaatatagtaggggggtcaagaaatcaagaggttgaaactaatggaaggagaaactaatgctttctcaaccaagagagccatgaagccacacagaaaaggtcggatgtggtctaaccctatgagttatgtaagaattctcctccacaatgcctctggcttcctttataaagagctattttaagaactgagaaatccacctctatcaaagtgcctgtcagctagttctgtagcatccccctcttttaatttgtactttaagtagtgccatgccataatattgccaagataaagagaattgtttcctactcaatccacatggtaacatttcttcaacaacctgtataatagggcgccaccaaagttctaggatattcggagaaaccaagaatggtcacaagcacatagaactccagttataacaacagctggccaggcgtggtggctcacgcctgtaatcccagcagtttgggaggtcgaggcgggtgaatcacctgaggtcaggagtttgagaccagcctgaccaacatggagaaaccccgtctctactaaaaatacaaaattagcctggcgtggtcgcgcatgcctgtaatctcagctactcgagaggctgaggcaggagaataacttgaacccaggagacagaggttgcagtgagctgagattgcgccattgcactccagcctgggcaacaagagcgaaactgcgaaaaaaaaaaaatacacgccacaaaaacagttaagcaaatctatgcagaaggaaaaacaaggtacagaaaaccagggattcagtaaattccttatacaggcccccggggctctcctattccactttttaacaatttcaattgtttttcaagctaagaaattttgatttcttaaaacaaggaaatggcagtgataatggaattaggcctaccaaaactgagctaatacagatgaagttagtcttatttgtaaacaaatcctgagaacttaatacccatctgccaaaggaaagtgggaataatttaaaaggccactaatcaaaaggtgttaagttcattaaatctatcttgctgtgtggtgagaaaagaaataatttagtgctttgcatctctcattcttcattggggatcaagtatgcttgcccttacagacctcactggagcccagctctgagggataaatgaaacaggccgaactcattatgtaaagttaaaatgtatgtgtacatgcaaaagaaaaagtataggaattgatgaaaactggctcacgttctgcttttctttctttttaagagactgggtcccgctctgccacctaggctggagtgcagtggctaatgatggctcactgcagccttgaactcctgggctcaagcaatcctgctgcctcagcctccagagtaggtaggactacaggcacgtaccaccatgcccaactaattttattttattgtagagacatgggtcttcaactcctggcctcaagtgatccccccacctcaac

SEQ ID NO: 211 - DNA, 4048 bp, Homo sapiens
ggcatggtggctcctgcttgtaattccagggctttgggaggttgaggtggggggatcacttgaggccaggagttgaagacccatgtctctacaataaaataaaattagttgggcatggtggtacgtgcctgtagtcctacctactctggaggctgaggcagcaggattgcttgagcccaggagttcaaggctgcagtgagccatcattagccactgcactccagcctaggtggcagagcgggacccagtctcttaaaaagaaagaaaagcagaacgtgagccagttttcatcaattcctatactttttcttttgcatgtacacatacattttaactttacataatgagttcggcctgtttcatttatccctcagagctgggctccagtgaggtctgtaagggcaagcatacttgatccccaatgaagaatgagagatgcaaagcactaaattatttcttttctcaccacacagcaagatagatttaatgaacttaacaccttttgattagtggccttttaaattattcccactttcctttggcagatgggtattaagttctcaggatttgtttacaaataagactaacttcatctgtattagctcagttttggtaggcctaattccattatcactgccatttccttgttttaagaaatcaaaatttcttagcttgaaaaacaattgaaattgttaaaaagtggaataggagagccccgggggcctgtataaggaatttactgaatccctggttttctgtaccttgtttttccttctgcatagatttgcttaactgtttttgtggcgtgtattttttttttttcgcagtttcgctcttgttgcccaggctggagtgcaatggcgcaatctcagctcactgcaacctctgtctcctgggttcaagttattctcctgcctcagcctctcgagtagctgagattacaggcatgcgcgaccacgccaggctaattttgtatttttagtagagacggggtttctccatgttggtcaggctggtctcaaactcctgacctcaggtgattcacccgcctcgacctcccaaactgctgggattacaggcgtgagccaccacgcctggccagctgttgttataactggagttctatgtgcttgtgaccattcttggtttctccgaatatcctagaactttggtggcgccctattatacaggttgttgaagaaatgttaccatgtggattgagtaggaaacaattctctttatcttggcaatattatggcatggcactacttaaagtacaaattaaaagagggggatgctacagaactagctgacaggcactttgatagaggtggatttctcagttcttaaaatagctctttataaaggaagccagaggcattgtggaggagaattcttacataactcatagggttagaccacatccgaccttttctgtgtggcttcatggctctcttggttgagaaagcattagtttctccttccattagtttcaacctcttgatttcttgacccccctactatattttgtgctgagaacacaagggtattaacaacccacattgtagaggatcgctcagtaataaagactggagaataaaatgcagcatgggaatattggcaattactcagttctaaatttctcttggaaatgagggaaagcatacagaatagagctggaatgaataggataattttttttttttttgctaagttggtagccagaatataacagctccgcacaactgtaaatgtccactcttcaatccacatgaagaaaagggtaaaaatatggttgaactcaaccactagttgcccattagaacagactttcccagtgtactgcatttcaatactttttcttttatctcttttcagatcttcctcagaagaataggcttgttgttttacagtgttagtgatccattccctttgacgatccctaggtggagatggggcatgaggatcctccaggggaaaagctcactaccactgggcaacaaccctaggtcaggaggttctgtcaagatactttcctggtcccagataggaagataaagtctcaaaaacaaccaccacacgtcaaggtgcgtaagctgtccctaaaagcataataagtagtcttaattttgattttgttttccagtatacattgcacttagtgtttcactgaggtcgtattcatcattattctgcatatgatttggtaaaaacagcttcctaactaacctgggaagcaactgggtgtgagattaactggttaaagtgatgatgtaaagagggtagcgggttgcatgtgttcgggtgtttggagtgggactatagcacgtggcagaggcttacagctaagttgttcttttaggagaacatggacaactgtcacatcagtgacattgatcacatgggcaaatcattctgttccatgtggtccccaaagtctctcttaaagccttacagaagaactttgccaatcatttacatacttcaggatggcttgggatgccatggtgtataatacaacaagtgagaggtgtgtctttttatgctatggttgctgattgatggaagccgcataaatacaaatggaaacctgactaaaaatggcacaaagttatctgtcatcaggcaggagctaaagaaccaggaccctacattctctaggtcagtgttgggagaggctgattagcgagtgagaattggcagataaaggtgaccattcggtgcaataaatcctgaacgtataggctttgcccagcattcttcgtaaatagtgggtagctataaatttcatgaaatattttcatgggtaagaactcttgaaatgttataattgactagaaatctctgtagatttagaaatagagagttactaacaaattgttagaaagtctaggaactagaaagctaagttgagagttatctaggaagatctatctattgtactcataatctttagataaattctcctagggccagtagtctatgtgaattttctttttcttcttcttcttcttctttttttttgtattttagctgcaatgttaaacaacctatgtgaattttcttattgtgagaatatttgccttccagagtgactcacctttatctcaaagagcaatattgtgagttttgaaaatgctgctctaaggctgtgttttgttagtcctgagccaggagacttaaagcaaacttgaggggtcttaaaacatcgaagtgagccttaaacattgggaagaccttatgtttttccctctcatatctattatttttgtgatctcagttattaatcatttaaagggactctttcctagctgattggcacttaaaacaggatggaagtctttttttttttttttttttttgagatggagttttgctcttgttgcccaggctggagtgcaatggtgcaatctcagctcactgcaacctctgcctcccgggttcaagcgattctcctgcctcagcctcccaagtagctgggattacagtcatgcaccaccacgcccggctaattttgtatttttaatagagacggtgtttctccatgttggtcaggctggtctcaaactcctgacctcaggtgatccgcccacctcaacctcccaaagtgctgggattatgggcgtgagccaccgcgcccggcagttctggtctttaactaaggtataaggctatgactggtagtggtgtctctagtgactcatcaagtgatatttggcaagacattttcccatttatgccagtttcctattctgttgaatgaggaaattttctctctaaagacctaaaagttttgactttataggtttcaaagttctgtggaaacattttctattgcttattaatttgaatcttatgtaactctagcacagtactcaatatttatggcatttacatggtttatctcatgtttttttatagctcttcattgttcctatctgccaaatcattatacttcctacaagcagtgcagagagctgagtcttcagcaggtccaagaaatttgaacacactgaaggaagtcagccttcccacctgaagatcaaca

SEQ ID NO: 212 - DNA, 4053 bp, Homo sapiens
agctatctggagaaaaaggtagtttggggaatttattgttgtagtgcttctgtctttggattgaacttcccacaactctcctttttaaagcagaacacagctgggcatggtggctcctgcttgtaattccagggctttgggaggttgaggtggggggatcacttgaggccaggagttgaagacccatgtctctacaataaaataaaattagttgggcatggtggtacgtgcctgtagtcctacctactctggaggctgaggcagcaggattgcttgagcccaggagttcaaggctgcagtgagccatcattagccactgcactccagcctaggtggcagagcgggacccagtctcttaaaaagaaagaaaagcagaacgtgagccagttttcatcaattcctatactttttcttttgcatgtacacatacattttaactttacataatgagttcggcctgtttcatttatccctcagagctgggctccagtgaggtctgtaagggcaagcatacttgatccccaatgaagaatgagagatgcaaagcactaaattatttcttttctcaccacacagcaagatagatttaatgaacttaacaccttttgattagtggccttttaaattattcccactttcctttggcagatgggtattaagttctcaggatttgtttacaaataagactaacttcatctgtattagctcagttttggtaggcctaattccattatcactgccatttccttgttttaagaaatcaaaatttcttagcttgaaaaacaattgaaattgttaaaaagtggaataggagagccccgggggcctgtataaggaatttactgaatccctggttttctgtaccttgtttttccttctgcatagatttgcttaactgtttttgtggcgtgtattttttttttttcgcagtttcgctcttgttgcccaggctggagtgcaatggcgcaatctcagctcactgcaacctctgtctcctgggttcaagttattctcctgcctcagcctctcgagtagctgagattacaggcatgcgcgaccacgccaggctaattttgtatttttagtagagacggggtttctccatgttggtcaggctggtctcaaactcctgacctcaggtgattcacccgcctcgacctcccaaactgctgggattacaggcgtgagccaccacgcctggccagctgttgttataactggagttctatgtgcttgtgaccattcttggtttctccgaatatcctagaactttggtggcgccctattatacaggttgttgaagaaatgttaccatgtggattgagtaggaaacaattctctttatcttggcaatattatggcatggcactacttaaagtacaaattaaaagagggggatgctacagaactagctgacaggcactttgatagaggtggatttctcagttcttaaaatagctctttataaaggaagccagaggcattgtggaggagaattcttacataactcatagggttagaccacatccgaccttttctgtgtggcttcatggctctcttggttgagaaagcattagtttctccttccattagtttcaacctcttgatttcttgacccccctactatattttgtgctgagaacacaagggtattaacaacccacattgtagaggatcgctcagtaataaagactggagaataaaatgcagcatgggaatattggcaattactcagttctaaatttctcttggaaatgagggaaagcatacagaatagagctggaatgaataggataattttttttttttttgctaagttggtagccagaatataacagctccgcacaactgtaaatgtccactcttcaatccacatgaagaaaagggtaaaaatatggttgaactcaaccactagttgcccattagaacagactttcccagtgtactgcatttcaatactttttcttttatctcttttcagatcttcctcagaagaataggcttgttgttttacagtgttagtgatccattccctttgacgatccctaggtggagatggggcatgaggatcctccaggggaaaagctcactaccactgggcaacaaccctaggtcaggaggttctgtcaagatactttcctggtcccagataggaagataaagtctcaaaaacaaccaccacacgtcaaggtgcgtaagctgtccctaaaagcataataagtagtcttaattttgattttgttttccagtatacattgcacttagtgtttcactgaggtcgtattcatcattattctgcatatgatttggtaaaaacagcttcctaactaacctgggaagcaactgggtgtgagattaactggttaaagtgatgatgtaaagagggtagcgggttgcatgtgttcgggtgtttggagtgggactatagcacgtggcagaggcttacagctaagttgttcttttaggagaacatggacaactgtcacatcagtgacattgatcacatgggcaaatcattctgttccatgtggtccccaaagtctctcttaaagccttacagaagaactttgccaatcatttacatacttcaggatggcttgggatgccatggtgtataatacaacaagtgagaggtgtgtctttttatgctatggttgctgattgatggaagccgcataaatacaaatggaaacctgactaaaaatggcacaaagttatctgtcatcaggcaggagctaaagaaccaggaccctacattctctaggtcagtgttgggagaggctgattagcgagtgagaattggcagataaaggtgaccattcggtgcaataaatcctgaacgtataggctttgcccagcattcttcgtaaatagtgggtagctataaatttcatgaaatattttcatgggtaagaactcttgaaatgttataattgactagaaatctctgtagatttagaaatagagagttactaacaaattgttagaaagtctaggaactagaaagctaagttgagagttatctaggaagatctatctattgtactcataatctttagataaattctcctagggccagtagtctatgtgaattttctttttcttcttcttcttcttctttttttttgtattttagctgcaatgttaaacaacctatgtgaattttcttattgtgagaatatttgccttccagagtgactcacctttatctcaaagagcaatattgtgagttttgaaaatgctgctctaaggctgtgttttgttagtcctgagccaggagacttaaagcaaacttgaggggtcttaaaacatcgaagtgagccttaaacattgggaagaccttatgtttttccctctcatatctattatttttgtgatctcagttattaatcatttaaagggactctttcctagctgattggcacttaaaacaggatggaagtctttttttttttttttttttttgagatggagttttgctcttgttgcccaggctggagtgcaatggtgcaatctcagctcactgcaacctctgcctcccgggttcaagcgattctcctgcctcagcctcccaagtagctgggattacagtcatgcaccaccacgcccggctaattttgtatttttaatagagacggtgtttctccatgttggtcaggctggtctcaaactcctgacctcaggtgatccgcccacctcaacctcccaaagtgctgggattatgggcgtgagccaccgcgcccggcagttctggtctttaactaaggtataaggctatgactggtagtggtgtctctagtgactcatcaagtgatatttggcaagacattttcccatttatgccagtttcctattctgttgaatgaggaaattttctctctaaagacctaaaagttttgactttataggtttcaaagttctgtggaaacattttctattgcttattaatttgaatcttatgtaactctagcacagtactcaatatttatggcatttacatggtttatctcatgtttttttatagctcttcattgttcctatctgccaaatcat

SEQ ID NO: 213 - DNA, 4066 bp, Homo sapiens
gagctataaaaaaacatgagataaaccatgtaaatgccataaatattgagtactgtgctagagttacataagattcaaattaataagcaatagaaaatgtttccacagaactttgaaacctataaagtcaaaacttttaggtctttagagagaaaatttcctcattcaacagaataggaaactggcataaatgggaaaatgtcttgccaaatatcacttgatgagtcactagagacaccactaccagtcatagccttataccttagttaaagaccagaactgccgggcgcggtggctcacgcccataatcccagcactttgggaggttgaggtgggcggatcacctgaggtcaggagtttgagaccagcctgaccaacatggagaaacaccgtctctattaaaaatacaaaattagccgggcgtggtggtgcatgactgtaatcccagctacttgggaggctgaggcaggagaatcgcttgaacccgggaggcagaggttgcagtgagctgagattgcaccattgcactccagcctgggcaacaagagcaaaactccatctcaaaaaaaaaaaaaaaaaaaaagacttccatcctgttttaagtgccaatcagctaggaaagagtccctttaaatgattaataactgagatcacaaaaataatagatatgagagggaaaaacataaggtcttcccaatgtttaaggctcacttcgatgttttaagacccctcaagtttgctttaagtctcctggctcaggactaacaaaacacagccttagagcagcattttcaaaactcacaatattgctctttgagataaaggtgagtcactctggaaggcaaatattctcacaataagaaaattcacataggttgtttaacattgcagctaaaatacaaaaaaaaagaagaagaagaagaagaaaaagaaaattcacatagactactggccctaggagaatttatctaaagattatgagtacaatagatagatcttcctagataactctcaacttagctttctagttcctagactttctaacaatttgttagtaactctctatttctaaatctacagagatttctagtcaattataacatttcaagagttcttacccatgaaaatatttcatgaaatttatagctacccactatttacgaagaatgctgggcaaagcctatacgttcaggatttattgcaccgaatggtcacctttatctgccaattctcactcgctaatcagcctctcccaacactgacctagagaatgtagggtcctggttctttagctcctgcctgatgacagataactttgtgccatttttagtcaggtttccatttgtatttatgcggcttccatcaatcagcaaccatagcataaaaagacacacctctcacttgttgtattatacaccatggcatcccaagccatcctgaagtatgtaaatgattggcaaagttcttctgtaaggctttaagagagactttggggaccacatggaacagaatgatttgcccatgtgatcaatgtcactgatgtgacagttgtccatgttctcctaaaagaacaacttagctgtaagcctctgccacgtgctatagtcccactccaaacacccgaacacatgcaacccgctaccctctttacatcatcactttaaccagttaatctcacacccagttgcttcccaggttagttaggaagctgtttttaccaaatcatatgcagaataatgatgaatacgacctcagtgaaacactaagtgcaatgtatactggaaaacaaaatcaaaattaagactacttattatgcttttagggacagcttacgcaccttgacgtgtggtggttgtttttgagactttatcttcctatctgggaccaggaaagtatcttgacagaacctcctgacctagggttgttgcccagtggtagtgagcttttcccctggaggatcctcatgccccatctccacctagggatcgtcaaagggaatggatcactaacactgtaaaacaacaagcctattcttctgaggaagatctgaaaagagataaaagaaaaagtattgaaatgcagtacactgggaaagtctgttctaatgggcaactagtggttgagttcaaccatatttttacccttttcttcatgtggattgaagagtggacatttacagttgtgcggagctgttatattctggctaccaacttagcaaaaaaaaaaaaaattatcctattcattccagctctattctgtatgctttccctcatttccaagagaaatttagaactgagtaattgccaatattcccatgctgcattttattctccagtctttattactgagcgatcctctacaatgtgggttgttaatacccttgtgttctcagcacaaaatatagtaggggggtcaagaaatcaagaggttgaaactaatggaaggagaaactaatgctttctcaaccaagagagccatgaagccacacagaaaaggtcggatgtggtctaaccctatgagttatgtaagaattctcctccacaatgcctctggcttcctttataaagagctattttaagaactgagaaatccacctctatcaaagtgcctgtcagctagttctgtagcatccccctcttttaatttgtactttaagtagtgccatgccataatattgccaagataaagagaattgtttcctactcaatccacatggtaacatttcttcaacaacctgtataatagggcgccaccaaagttctaggatattcggagaaaccaagaatggtcacaagcacatagaactccagttataacaacagctggccaggcgtggtggctcacgcctgtaatcccagcagtttgggaggtcgaggcgggtgaatcacctgaggtcaggagtttgagaccagcctgaccaacatggagaaaccccgtctctactaaaaatacaaaattagcctggcgtggtcgcgcatgcctgtaatctcagctactcgagaggctgaggcaggagaataacttgaacccaggagacagaggttgcagtgagctgagattgcgccattgcactccagcctgggcaacaagagcgaaactgcgaaaaaaaaaaaatacacgccacaaaaacagttaagcaaatctatgcagaaggaaaaacaaggtacagaaaaccagggattcagtaaattccttatacaggcccccggggctctcctattccactttttaacaatttcaattgtttttcaagctaagaaattttgatttcttaaaacaaggaaatggcagtgataatggaattaggcctaccaaaactgagctaatacagatgaagttagtcttatttgtaaacaaatcctgagaacttaatacccatctgccaaaggaaagtgggaataatttaaaaggccactaatcaaaaggtgttaagttcattaaatctatcttgctgtgtggtgagaaaagaaataatttagtgctttgcatctctcattcttcattggggatcaagtatgcttgcccttacagacctcactggagcccagctctgagggataaatgaaacaggccgaactcattatgtaaagttaaaatgtatgtgtacatgcaaaagaaaaagtataggaattgatgaaaactggctcacgttctgcttttctttctttttaagagactgggtcccgctctgccacctaggctggagtgcagtggctaatgatggctcactgcagccttgaactcctgggctcaagcaatcctgctgcctcagcctccagagtaggtaggactacaggcacgtaccaccatgcccaactaattttattttattgtagagacatgggtcttcaactcctggcctcaagtgatccccccacctcaacctcccaaagccctggaattacaagcaggagccaccatgcccagctgtgttctgctttaaaaaggagagttgtgggaagttcaatccaaagacagaagcactacaacaataaattccccaaactacctttttctccagatagctggcaacccatccaagtagattagctggagcttggccaga

SEQ ID NO: 214 - DNA, 4055 bp, Homo sapiens
cataagattcaaattaataagcaatagaaaatgtttccacagaactttgaaacctataaagtcaaaacttttaggtctttagagagaaaatttcctcattcaacagaataggaaactggcataaatgggaaaatgtcttgccaaatatcacttgatgagtcactagagacaccactaccagtcatagccttataccttagttaaagaccagaactgccgggcgcggtggctcacgcccataatcccagcactttgggaggttgaggtgggcggatcacctgaggtcaggagtttgagaccagcctgaccaacatggagaaacaccgtctctattaaaaatacaaaattagccgggcgtggtggtgcatgactgtaatcccagctacttgggaggctgaggcaggagaatcgcttgaacccgggaggcagaggttgcagtgagctgagattgcaccattgcactccagcctgggcaacaagagcaaaactccatctcaaaaaaaaaaaaaaaaaaaaagacttccatcctgttttaagtgccaatcagctaggaaagagtccctttaaatgattaataactgagatcacaaaaataatagatatgagagggaaaaacataaggtcttcccaatgtttaaggctcacttcgatgttttaagacccctcaagtttgctttaagtctcctggctcaggactaacaaaacacagccttagagcagcattttcaaaactcacaatattgctctttgagataaaggtgagtcactctggaaggcaaatattctcacaataagaaaattcacataggttgtttaacattgcagctaaaatacaaaaaaaaagaagaagaagaagaagaaaaagaaaattcacatagactactggccctaggagaatttatctaaagattatgagtacaatagatagatcttcctagataactctcaacttagctttctagttcctagactttctaacaatttgttagtaactctctatttctaaatctacagagatttctagtcaattataacatttcaagagttcttacccatgaaaatatttcatgaaatttatagctacccactatttacgaagaatgctgggcaaagcctatacgttcaggatttattgcaccgaatggtcacctttatctgccaattctcactcgctaatcagcctctcccaacactgacctagagaatgtagggtcctggttctttagctcctgcctgatgacagataactttgtgccatttttagtcaggtttccatttgtatttatgcggcttccatcaatcagcaaccatagcataaaaagacacacctctcacttgttgtattatacaccatggcatcccaagccatcctgaagtatgtaaatgattggcaaagttcttctgtaaggctttaagagagactttggggaccacatggaacagaatgatttgcccatgtgatcaatgtcactgatgtgacagttgtccatgttctcctaaaagaacaacttagctgtaagcctctgccacgtgctatagtcccactccaaacacccgaacacatgcaacccgctaccctctttacatcatcactttaaccagttaatctcacacccagttgcttcccaggttagttaggaagctgtttttaccaaatcatatgcagaataatgatgaatacgacctcagtgaaacactaagtgcaatgtatactggaaaacaaaatcaaaattaagactacttattatgcttttagggacagcttacgcaccttgacgtgtggtggttgtttttgagactttatcttcctatctgggaccaggaaagtatcttgacagaacctcctgacctagggttgttgcccagtggtagtgagcttttcccctggaggatcctcatgccccatctccacctagggatcgtcaaagggaatggatcactaacactgtaaaacaacaagcctattcttctgaggaagatctgaaaagagataaaagaaaaagtattgaaatgcagtacactgggaaagtctgttctaatgggcaactagtggttgagttcaaccatatttttacccttttcttcatgtggattgaagagtggacatttacagttgtgcggagctgttatattctggctaccaacttagcaaaaaaaaaaaaaattatcctattcattccagctctattctgtatgctttccctcatttccaagagaaatttagaactgagtaattgccaatattcccatgctgcattttattctccagtctttattactgagcgatcctctacaatgtgggttgttaatacccttgtgttctcagcacaaaatatagtaggggggtcaagaaatcaagaggttgaaactaatggaaggagaaactaatgctttctcaaccaagagagccatgaagccacacagaaaaggtcggatgtggtctaaccctatgagttatgtaagaattctcctccacaatgcctctggcttcctttataaagagctattttaagaactgagaaatccacctctatcaaagtgcctgtcagctagttctgtagcatccccctcttttaatttgtactttaagtagtgccatgccataatattgccaagataaagagaattgtttcctactcaatccacatggtaacatttcttcaacaacctgtataatagggcgccaccaaagttctaggatattcggagaaaccaagaatggtcacaagcacatagaactccagttataacaacagctggccaggcgtggtggctcacgcctgtaatcccagcagtttgggaggtcgaggcgggtgaatcacctgaggtcaggagtttgagaccagcctgaccaacatggagaaaccccgtctctactaaaaatacaaaattagcctggcgtggtcgcgcatgcctgtaatctcagctactcgagaggctgaggcaggagaataacttgaacccaggagacagaggttgcagtgagctgagattgcgccattgcactccagcctgggcaacaagagcgaaactgcgaaaaaaaaaaaatacacgccacaaaaacagttaagcaaatctatgcagaaggaaaaacaaggtacagaaaaccagggattcagtaaattccttatacaggcccccggggctctcctattccactttttaacaatttcaattgtttttcaagctaagaaattttgatttcttaaaacaaggaaatggcagtgataatggaattaggcctaccaaaactgagctaatacagatgaagttagtcttatttgtaaacaaatcctgagaacttaatacccatctgccaaaggaaagtgggaataatttaaaaggccactaatcaaaaggtgttaagttcattaaatctatcttgctgtgtggtgagaaaagaaataatttagtgctttgcatctctcattcttcattggggatcaagtatgcttgcccttacagacctcactggagcccagctctgagggataaatgaaacaggccgaactcattatgtaaagttaaaatgtatgtgtacatgcaaaagaaaaagtataggaattgatgaaaactggctcacgttctgcttttctttctttttaagagactgggtcccgctctgccacctaggctggagtgcagtggctaatgatggctcactgcagccttgaactcctgggctcaagcaatcctgctgcctcagcctccagagtaggtaggactacaggcacgtaccaccatgcccaactaattttattttattgtagagacatgggtcttcaactcctggcctcaagtgatccccccacctcaacctcccaaagccctggaattacaagcaggagccaccatgcccagctgtgttctgctttaaaaaggagagttgtgggaagttcaatccaaagacagaagcactacaacaataaattccccaaactacctttttctccagatagctggcaacccatccaagtagattagctggagcttggccagattctcaaagggaaagatatgattaatttggagcctcttatagctgtttgcagtcc

SEQ ID NO: 215 - DNA, 4023 bp, Homo sapiens
accactaccagtcatagccttataccttagttaaagaccagaactgccgggcgcggtggctcacgcccataatcccagcactttgggaggttgaggtgggcggatcacctgaggtcaggagtttgagaccagcctgaccaacatggagaaacaccgtctctattaaaaatacaaaattagccgggcgtggtggtgcatgactgtaatcccagctacttgggaggctgaggcaggagaatcgcttgaacccgggaggcagaggttgcagtgagctgagattgcaccattgcactccagcctgggcaacaagagcaaaactccatctcaaaaaaaaaaaaaaaaaaaaagacttccatcctgttttaagtgccaatcagctaggaaagagtccctttaaatgattaataactgagatcacaaaaataatagatatgagagggaaaaacataaggtcttcccaatgtttaaggctcacttcgatgttttaagacccctcaagtttgctttaagtctcctggctcaggactaacaaaacacagccttagagcagcattttcaaaactcacaatattgctctttgagataaaggtgagtcactctggaaggcaaatattctcacaataagaaaattcacataggttgtttaacattgcagctaaaatacaaaaaaaaagaagaagaagaagaagaaaaagaaaattcacatagactactggccctaggagaatttatctaaagattatgagtacaatagatagatcttcctagataactctcaacttagctttctagttcctagactttctaacaatttgttagtaactctctatttctaaatctacagagatttctagtcaattataacatttcaagagttcttacccatgaaaatatttcatgaaatttatagctacccactatttacgaagaatgctgggcaaagcctatacgttcaggatttattgcaccgaatggtcacctttatctgccaattctcactcgctaatcagcctctcccaacactgacctagagaatgtagggtcctggttctttagctcctgcctgatgacagataactttgtgccatttttagtcaggtttccatttgtatttatgcggcttccatcaatcagcaaccatagcataaaaagacacacctctcacttgttgtattatacaccatggcatcccaagccatcctgaagtatgtaaatgattggcaaagttcttctgtaaggctttaagagagactttggggaccacatggaacagaatgatttgcccatgtgatcaatgtcactgatgtgacagttgtccatgttctcctaaaagaacaacttagctgtaagcctctgccacgtgctatagtcccactccaaacacccgaacacatgcaacccgctaccctctttacatcatcactttaaccagttaatctcacacccagttgcttcccaggttagttaggaagctgtttttaccaaatcatatgcagaataatgatgaatacgacctcagtgaaacactaagtgcaatgtatactggaaaacaaaatcaaaattaagactacttattatgcttttagggacagcttacgcaccttgacgtgtggtggttgtttttgagactttatcttcctatctgggaccaggaaagtatcttgacagaacctcctgacctagggttgttgcccagtggtagtgagcttttcccctggaggatcctcatgccccatctccacctagggatcgtcaaagggaatggatcactaacactgtaaaacaacaagcctattcttctgaggaagatctgaaaagagataaaagaaaaagtattgaaatgcagtacactgggaaagtctgttctaatgggcaactagtggttgagttcaaccatatttttacccttttcttcatgtggattgaagagtggacatttacagttgtgcggagctgttatattctggctaccaacttagcaaaaaaaaaaaaaattatcctattcattccagctctattctgtatgctttccctcatttccaagagaaatttagaactgagtaattgccaatattcccatgctgcattttattctccagtctttattactgagcgatcctctacaatgtgggttgttaatacccttgtgttctcagcacaaaatatagtaggggggtcaagaaatcaagaggttgaaactaatggaaggagaaactaatgctttctcaaccaagagagccatgaagccacacagaaaaggtcggatgtggtctaaccctatgagttatgtaagaattctcctccacaatgcctctggcttcctttataaagagctattttaagaactgagaaatccacctctatcaaagtgcctgtcagctagttctgtagcatccccctcttttaatttgtactttaagtagtgccatgccataatattgccaagataaagagaattgtttcctactcaatccacatggtaacatttcttcaacaacctgtataatagggcgccaccaaagttctaggatattcggagaaaccaagaatggtcacaagcacatagaactccagttataacaacagctggccaggcgtggtggctcacgcctgtaatcccagcagtttgggaggtcgaggcgggtgaatcacctgaggtcaggagtttgagaccagcctgaccaacatggagaaaccccgtctctactaaaaatacaaaattagcctggcgtggtcgcgcatgcctgtaatctcagctactcgagaggctgaggcaggagaataacttgaacccaggagacagaggttgcagtgagctgagattgcgccattgcactccagcctgggcaacaagagcgaaactgcgaaaaaaaaaaaatacacgccacaaaaacagttaagcaaatctatgcagaaggaaaaacaaggtacagaaaaccagggattcagtaaattccttatacaggcccccggggctctcctattccactttttaacaatttcaattgtttttcaagctaagaaattttgatttcttaaaacaaggaaatggcagtgataatggaattaggcctaccaaaactgagctaatacagatgaagttagtcttatttgtaaacaaatcctgagaacttaatacccatctgccaaaggaaagtgggaataatttaaaaggccactaatcaaaaggtgttaagttcattaaatctatcttgctgtgtggtgagaaaagaaataatttagtgctttgcatctctcattcttcattggggatcaagtatgcttgcccttacagacctcactggagcccagctctgagggataaatgaaacaggccgaactcattatgtaaagttaaaatgtatgtgtacatgcaaaagaaaaagtataggaattgatgaaaactggctcacgttctgcttttctttctttttaagagactgggtcccgctctgccacctaggctggagtgcagtggctaatgatggctcactgcagccttgaactcctgggctcaagcaatcctgctgcctcagcctccagagtaggtaggactacaggcacgtaccaccatgcccaactaattttattttattgtagagacatgggtcttcaactcctggcctcaagtgatccccccacctcaacctcccaaagccctggaattacaagcaggagccaccatgcccagctgtgttctgctttaaaaaggagagttgtgggaagttcaatccaaagacagaagcactacaacaataaattccccaaactacctttttctccagatagctggcaacccatccaagtagattagctggagcttggccagattctcaaagggaaagatatgattaatttggagcctcttatagctgtttgcagtcctcaggtctcacatgctcagaatgtccttaagaagaaagacagggttcagtaggctaccaaagcaccggtaggataccaaaagagttacaaaaaccccaatgaaaaaaacctaggaagtataaactgaagcattagaca

SEQ ID NO: 216 - DNA, 4364 bp, Homo sapiens
aaaggtgagtcactctggaaggcaaatattctcacaataagaaaattcacataggttgtttaacattgcagctaaaatacaaaaaaaaagaagaagaagaagaagaaaaagaaaattcacatagactactggccctaggagaatttatctaaagattatgagtacaatagatagatcttcctagataactctcaacttagctttctagttcctagactttctaacaatttgttagtaactctctatttctaaatctacagagatttctagtcaattataacatttcaagagttcttacccatgaaaatatttcatgaaatttatagctacccactatttacgaagaatgctgggcaaagcctatacgttcaggatttattgcaccgaatggtcacctttatctgccaattctcactcgctaatcagcctctcccaacactgacctagagaatgtagggtcctggttctttagctcctgcctgatgacagataactttgtgccatttttagtcaggtttccatttgtatttatgcggcttccatcaatcagcaaccatagcataaaaagacacacctctcacttgttgtattatacaccatggcatcccaagccatcctgaagtatgtaaatgattggcaaagttcttctgtaaggctttaagagagactttggggaccacatggaacagaatgatttgcccatgtgatcaatgtcactgatgtgacagttgtccatgttctcctaaaagaacaacttagctgtaagcctctgccacgtgctatagtcccactccaaacacccgaacacatgcaacccgctaccctctttacatcatcactttaaccagttaatctcacacccagttgcttcccaggttagttaggaagctgtttttaccaaatcatatgcagaataatgatgaatacgacctcagtgaaacactaagtgcaatgtatactggaaaacaaaatcaaaattaagactacttattatgcttttagggacagcttacgcaccttgacgtgtggtggttgtttttgagactttatcttcctatctgggaccaggaaagtatcttgacagaacctcctgacctagggttgttgcccagtggtagtgagcttttcccctggaggatcctcatgccccatctccacctagggatcgtcaaagggaatggatcactaacactgtaaaacaacaagcctattcttctgaggaagatctgaaaagagataaaagaaaaagtattgaaatgcagtacactgggaaagtctgttctaatgggcaactagtggttgagttcaaccatatttttacccttttcttcatgtggattgaagagtggacatttacagttgtgcggagctgttatattctggctaccaacttagcaaaaaaaaaaaaaattatcctattcattccagctctattctgtatgctttccctcatttccaagagaaatttagaactgagtaattgccaatattcccatgctgcattttattctccagtctttattactgagcgatcctctacaatgtgggttgttaatacccttgtgttctcagcacaaaatatagtaggggggtcaagaaatcaagaggttgaaactaatggaaggagaaactaatgctttctcaaccaagagagccatgaagccacacagaaaaggtcggatgtggtctaaccctatgagttatgtaagaattctcctccacaatgcctctggcttcctttataaagagctattttaagaactgagaaatccacctctatcaaagtgcctgtcagctagttctgtagcatccccctcttttaatttgtactttaagtagtgccatgccataatattgccaagataaagagaattgtttcctactcaatccacatggtaacatttcttcaacaacctgtataatagggcgccaccaaagttctaggatattcggagaaaccaagaatggtcacaagcacatagaactccagttataacaacagctggccaggcgtggtggctcacgcctgtaatcccagcagtttgggaggtcgaggcgggtgaatcacctgaggtcaggagtttgagaccagcctgaccaacatggagaaaccccgtctctactaaaaatacaaaattagcctggcgtggtcgcgcatgcctgtaatctcagctactcgagaggctgaggcaggagaataacttgaacccaggagacagaggttgcagtgagctgagattgcgccattgcactccagcctgggcaacaagagcgaaactgcgaaaaaaaaaaaatacacgccacaaaaacagttaagcaaatctatgcagaaggaaaaacaaggtacagaaaaccagggattcagtaaattccttatacaggcccccggggctctcctattccactttttaacaatttcaattgtttttcaagctaagaaattttgatttcttaaaacaaggaaatggcagtgataatggaattaggcctaccaaaactgagctaatacagatgaagttagtcttatttgtaaacaaatcctgagaacttaatacccatctgccaaaggaaagtgggaataatttaaaaggccactaatcaaaaggtgttaagttcattaaatctatcttgctgtgtggtgagaaaagaaataatttagtgctttgcatctctcattcttcattggggatcaagtatgcttgcccttacagacctcactggagcccagctctgagggataaatgaaacaggccgaactcattatgtaaagttaaaatgtatgtgtacatgcaaaagaaaaagtataggaattgatgaaaactggctcacgttctgcttttctttctttttaagagactgggtcccgctctgccacctaggctggagtgcagtggctaatgatggctcactgcagccttgaactcctgggctcaagcaatcctgctgcctcagcctccagagtaggtaggactacaggcacgtaccaccatgcccaactaattttattttattgtagagacatgggtcttcaactcctggcctcaagtgatccccccacctcaacctcccaaagccctggaattacaagcaggagccaccatgcccagctgtgttctgctttaaaaaggagagttgtgggaagttcaatccaaagacagaagcactacaacaataaattccccaaactacctttttctccagatagctggcaacccatccaagtagattagctggagcttggccagattctcaaagggaaagatatgattaatttggagcctcttatagctgtttgcagtcctcaggtctcacatgctcagaatgtccttaagaagaaagacagggttcagtaggctaccaaagcaccggtaggataccaaaagagttacaaaaaccccaatgaaaaaaacctaggaagtataaactgaagcattagacataggtatctcctgtctctactttctagcctgcttggtctccctaaagtcctctaatgacaagccctggcagtacacgggaagattagacaagtgaagaaaaagaactacatgaaaatatgggtcaaaccaataccgaccttaagggctgacactaaatttgtggctaatggtcatcctgttgctgaaaatacttcaagattcaaggtggtgtggcaactgctactactgcttagaggtgcaattgtcttgactgtttttaataattggctatctacctttactatagcataggagctcactaaaggggatctaagccaaatttgcagtcttgaaagcactttgcatggtactgtatagtatggtgtgaaaagcacccagtatgttaaacctgagtaccttaaatgaatacaggcttccagatccctgatcagggattactgtatcatgaggaaacctttatgtcaatgtcaaacaggaatatatggaacatcacttattcaacactattctctagctttaaaaaggccaaactgttctatgatgttctcaatataagcagaacaagcttcaaaatctcttgccaacatccttccccatcctaatttaatctaagattagatacttgacttccaaatgcaggcttccagttaaacatggcggttcatacatgtttatgcatttactctactgcttcctaaaactccattaatgagagtaaatgtgcactccatatgcaagcaaatacacctaaagaaattttaaataaacggatcctagctcaaattcatttatacactggcatctaaaagggaacaactattccagtctccccaagtcttcttaagcatatttatggagtatcttgctttagcatcaaagccctctagttttgcctgttactatggtgatgacatactcaaagag

SEQ ID NO: 217 - DNA, 56 bp, Homo sapiens
catttggttagatcaaggaatagcatctgttgtaggaagagggctctttgttcttt

SEQ ID NO: 218 - DNA, 48 bp, Homo sapiens
aggataaaccagaaaacaatgaatttggtgatcaacaagaagaaaatg

SEQ ID NO: 219 - DNA, 22 bp, Homo sapiens
agaagcagagcacaagtccagg

SEQ ID NO: 220 - DNA, 49 bp, Homo sapiens
agccacatattttaactagttaaaagagagagtaaaaatttggagggag

SEQ ID NO: 221 - DNA, 47 bp, Homo sapiens
atagttcaagctggctgctgggtggaaaacggaagttggcagaccaa

SEQ ID NO: 222 - DNA, 24 bp, Homo sapiens
tcggtcggtgtttagctgagctca

SEQ ID NO: 223 - DNA, 26 bp, Homo sapiens
agcgacacaggaactgagaccgcccc

SEQ ID NO: 224 - DNA, 42 bp, Homo sapiens
gcaggcaaggccaggaggcacggatagaagaaacagtggact

SEQ ID NO: 225 - DNA, 42 bp, Homo sapiens
gggacaatgggaaggtccctttgttactcgagctattagaaa

SEQ ID NO: 226 - DNA, 45 bp, Homo sapiens
agcctttcccacggttcctggtgtggcaggaagaactctaggcct

SEQ ID NO: 227 - DNA, 41 bp, Homo sapiens
ctgtgttaaccctgagatcaaggtctgcacagggtgctgtc

SEQ ID NO: 228 - DNA, 77 bp, Homo sapiens
tttaaagagaacagatttgtagatgagttctcgaaaatatttcaggaatcaatatagagaatatgttatacatggtg

SEQ ID NO: 229 - DNA, 27 bp, Homo sapiens
taccacaaccaaagtcctactgcacac

SEQ ID NO: 230 - DNA, 46 bp, Homo sapiens
ggcagagtggaacccagatggacacaaaatctggttgatataataa

SEQ ID NO: 231 - DNA, 55 bp, Homo sapiens
gcgtcaaggacagggatgccgctctggggaggggaagctgagcatgattttggaa

SEQ ID NO: 232 - DNA, 42 bp, Homo sapiens
gtacacacatgcagagttcagcctacatgttcattgaggaaa

SEQ ID NO: 233 - DNA, 52 bp, Homo sapiens
ggagcaaaataagtagaacttcttgggacaggagatctagggtactccagaa

SEQ ID NO: 234 - DNA, 46 bp, Homo sapiens
gtacaaataatttgtatctctatgaaataagcatactttgctcaca

SEQ ID NO: 235 - DNA, 42 bp, Homo sapiens
gcacgtggcctccctgcccaccctggtaccttgctccaagtc

SEQ ID NO: 236 - DNA, 54 bp, Homo sapiens
aaatttataaaattgtttatgtttctacatatcagatatttagtatgtttctag

SEQ ID NO: 237 - DNA, 43 bp, Homo sapiens
ctgccgtttctgaccataattttcccatatcagtacccctaag

SEQ ID NO: 238 - DNA, 36 bp, Homo sapiens
gtaagactggctcaggcctcagacttgcctgccagg

SEQ ID NO: 239 - DNA, 45 bp, Homo sapiens
ttgccacaggacagttacttaaatcaagacaatttccaggcagga

SEQ ID NO: 240 - DNA, 33 bp, Homo sapiens
tgagttactacttctatcctatgaaaaataaca

SEQ ID NO: 241 - DNA, 54 bp, Homo sapiens
cagcagagaactctcattgctctgactcttcaaagccaaggcaataatcatggg

SEQ ID NO: 242 - DNA, 56 bp, Homo sapiens
tcaggaaggcctcagtcaggggtgatgttgaggccaagacccaatccagataggga

SEQ ID NO: 243 - DNA, 42 bp, Homo sapiens
tagactgctccattatataaacccaggccctaataccttgat

SEQ ID NO: 244 - DNA, 51 bp, Homo sapiens
acctattatagtagggattaaaaacttagatacctatagggttcaggcagt

SEQ ID NO: 245 - DNA, 55 bp, Homo sapiens
gcatgttcaatatttgcatgccagggggtgtacattaatataatgaattcactga

SEQ ID NO: 246 - DNA, 41 bp, Homo sapiens
tggggccagagttgggtaagccatgatcccttttggcctcg

SEQ ID NO: 247 - DNA, 38 bp, Homo sapiens
tgcacatgaaataagcaactggcgaatttatggtgacc

SEQ ID NO: 248 - DNA, 45 bp, Homo sapiens
ggggtgtttcctataaaatgtcatttacgatttctctattgcaga

SEQ ID NO: 249 - DNA, 46 bp, Homo sapiens
atttagagtttagtaatcaccatatttaggtcatttttccaaagca

SEQ ID NO: 250 - DNA, 40 bp, Homo sapiens
tctcagtgcagagcggggaagctgaagcagccagccaggg

SEQ ID NO: 251 - DNA, 43 bp, Homo sapiens
gcagggaagtagggacacttttagggacacatagctgatatct

SEQ ID NO: 252 - DNA, 47 bp, Homo sapiens
tctactgtgtttctattttctgaagtttcatcttttttttttctccc

SEQ ID NO: 253 - DNA, 46 bp, Homo sapiens
tgagttgaaggaacttgctaatgctcactcccaattaatggcagag

SEQ ID NO: 254 - DNA, 45 bp, Homo sapiens
gaggctattccacccctctgatggttagctttcagggggaaggga

SEQ ID NO: 255 - DNA, 51 bp, Homo sapiens
tttagacatgaatgaatgaacaaaagaaaagggacaagggctggtgagctc

SEQ ID NO: 256 - DNA, 39 bp, Homo sapiens
ctggacatacaaacagaaatattagtcaccaatatcaag

SEQ ID NO: 257 - DNA, 41 bp, Homo sapiens
ctcttggcttgagcttttttttttttgtttttttttgagaa

SEQ ID NO: 258 - DNA, 41 bp, Homo sapiens
aggcctgggttgggaatgacagggctagttttgctgtgttg

SEQ ID NO: 259 - DNA, 49 bp, Homo sapiens
tcagtccggaactcagaacaggctggttctagctgtcgattcaatagtt

SEQ ID NO: 260 - DNA, 41 bp, Homo sapiens
ggaagaaaagcctagaaaaaggttcagttacctctgggtgg

SEQ ID NO: 261 - DNA, 36 bp, Homo sapiens
tttccttttggctcttcaggaataaagagactgggt

SEQ ID NO: 262 - DNA, 26 bp, Homo sapiens
tagaacctgaaaatattgggatcttg

SEQ ID NO: 263 - DNA, 31 bp, Homo sapiens
catcaacagatgactggattaacaaaatgtg

SEQ ID NO: 264 - DNA, 23 bp, Homo sapiens
tgttactatctggccagcccaag

SEQ ID NO: 265 - DNA, 46 bp, Homo sapiens
cagaaatgcaggctctagtggccagatcttcctgtgtttcaaagag

SEQ ID NO: 266 - DNA, 60 bp, Homo sapiens
agacttttttgtgtcccataagtacagtggcctcaggcactgtgcctgcactgcctgctg

SEQ ID NO: 267 - DNA, 37 bp, Homo sapiens
gcttatctttggctttcattggggaaatcagggacta

SEQ ID NO: 268 - DNA, 46 bp, Homo sapiens
ttctcaggcttaattgttggctgaaagcatcttctttatttctgac

SEQ ID NO: 269 - DNA, 84 bp, Homo sapiens
cctactcattcttcagatgccagctccagtgcgactttcttgagaaacttcttttcaccttgatcttttgtgagcagctcttct

SEQ ID NO: 270 - DNA, 41 bp, Homo sapiens
ttctctctttctcctcttcttcccatccctttcccacagca

SEQ ID NO: 271 - DNA, 25 bp, Homo sapiens
atctctggaaataaccctctttcat

SEQ ID NO: 272 - DNA, 29 bp, Homo sapiens
tgtttttcccttttctcaaattccttgac

SEQ ID NO: 273 - DNA, 45 bp, Homo sapiens
ttggtagagagagctcccctctgagaacctgaagagatgtaaaga

SEQ ID NO: 274 - DNA, 47 bp, Homo sapiens
aaattacaagtacttttccaaaccttggggtattggagtccatggct

SEQ ID NO: 275 - DNA, 24 bp, Homo sapiens
tgtttctctgcatttgtctgaatt

SEQ ID NO: 276 - DNA, 62 bp, Homo sapiens
cccccattgagaatacatgcatgagacacatctctagagacgcatctgggcttactgtggga

SEQ ID NO: 277 - DNA, 60 bp, Homo sapiens
ataggtctctaacttcttgacttctcaatagcctcaatgactggttccttcctgtatttg

SEQ ID NO: 278 - DNA, 39 bp, Homo sapiens
ttattaatatgcttttcttactaaattggctttcagaat

SEQ ID NO: 279 - DNA, 30 bp, Homo sapiens
aaaaagaggcaggatgccatggggttgaag

SEQ ID NO: 280 - DNA, 26 bp, Homo sapiens
tgggaattctcaggcctggtctgaga

SEQ ID NO: 281 - DNA, 47 bp, Homo sapiens
gtgtatgtctcactacaaagcaagaaagagctacgcacagtcaagga

SEQ ID NO: 282 - DNA, 25 bp, Homo sapiens
tcatattggcaaagggatagacaca

SEQ ID NO: 283 - DNA, 51 bp, Homo sapiens
tcagtgttgggtaagtagtatgaatttggtttgttttcctggctgtcttta

SEQ ID NO: 284 - DNA, 49 bp, Homo sapiens
gacccccagtgctgcttcaggtgaatgagcacacagagcattttcagaa

SEQ ID NO: 285 - DNA, 60 bp, Homo sapiens
ccagcatcagttttggtgaggtacctgcacccctgaacaaaatcagggttctctgaatga

SEQ ID NO: 286 - DNA, 57 bp, Homo sapiens
ggagcagattcctgatgtggtcctggtggggcacggtctgcactgacaccaagcaga

SEQ ID NO: 287 - DNA, 37 bp, Homo sapiens
tctggggcaggatgggctgccctgcagactggcagct

SEQ ID NO: 288 - DNA, 44 bp, Homo sapiens
gtggtagtgaaggcattagatgccaggaactcaggcggttggta

SEQ ID NO: 289 - DNA, 45 bp, Homo sapiens
tggggagatctagccaggaaggagaacttcactgcacctctggga

SEQ ID NO: 290 - DNA, 46 bp, Homo sapiens
agctgggggctgtttgcaaagccgtctccctgaagctgggcctcaa

SEQ ID NO: 291 - DNA, 35 bp, Homo sapiens
tgcttttattttcactgctattagcaaagtttgca

SEQ ID NO: 292 - DNA, 27 bp, Homo sapiens
aactttatgactacagggaatgaagat

SEQ ID NO: 293 - DNA, 46 bp, Homo sapiens
agacagtgatgcgggtagagtctgggggctacttttgatgggaaag

SEQ ID NO: 294 - DNA, 40 bp, Homo sapiens
tcaaacccattgtgaattgctatcttttcccccagccatc

SEQ ID NO: 295 - DNA, 47 bp, Homo sapiens
tccacagatgtcacagatgaaagactaaaagctgcttctgcacgcac

SEQ ID NO: 296 - DNA, 46 bp, Homo sapiens
tcagagaatgcattgtcctgagaagtggtaaaggaaggaagtggaa

SEQ ID NO: 297 - DNA, 66 bp, Homo sapiens
ggaattataaagcaggaccccctcatccccctcaggagctaacagtccaattgagggaagcaagag

SEQ ID NO: 298 - DNA, 28 bp, Homo sapiens
tgctgcatgacatttgggcattttgggg

SEQ ID NO: 299 - DNA, 104 bp, Homo sapiens
taggtcttgttctatggtaggcacagaagaacaaggggtgtgtgtgtgtgtgtgtgtgtgtgtgtgtgtgtgtgtgtgtgtgtgtgtatgtgagagagagagag

SEQ ID NO: 300 - DNA, 48 bp, Homo sapiens
taatactatatataatgtgtaccacacattttgattgtaataactaat

SEQ ID NO: 301 - DNA, 28 bp, Homo sapiens
gactcagcttcaatctgagctctgattt

SEQ ID NO: 302 - DNA, 34 bp, Homo sapiens
caagggacatgctcactctccctttccagaagag

SEQ ID NO: 303 - DNA, 53 bp, Homo sapiens
ctgcaataaagtttaatttataaattaggtacagtgacagatgagcaacagta

SEQ ID NO: 304 - DNA, 43 bp, Homo sapiens
gtcagaggggatttggaaatctcaaaggctgagcacagagcgc

SEQ ID NO: 305 - DNA, 50 bp, Homo sapiens
aagagcaagtgtggccaagacccaggaaggatgggaggagggtggctgtg

SEQ ID NO: 306 - DNA, 40 bp, Homo sapiens
ccccagtggagtcatagagtcccctactctgccccaaggt

SEQ ID NO: 307 - DNA, 43 bp, Homo sapiens
gaagggggtggcctggctatggatggggagaaggccctctggg

SEQ ID NO: 308 - DNA, 46 bp, Homo sapiens
cacagccggagtcccttgtgactaagctgtgcatttgcaggagcgc

SEQ ID NO: 309 - DNA, 35 bp, Homo sapiens
gtggagttaattggtctagggtagggccaaatcac

SEQ ID NO: 310 - DNA, 43 bp, Homo sapiens
caggctctcatgtctgcatgtgaaaatcaggttctggggagtt

SEQ ID NO: 311 - DNA, 46 bp, Homo sapiens
tgtttgcttgagatcctctatttttatagttcaatattattaaggt

SEQ ID NO: 312 - DNA, 58 bp, Homo sapiens
cctcccgttaaatgacttggacaggttaccagcatctcgaggcttgatatcctgtagc

SEQ ID NO: 313 - DNA, 45 bp, Homo sapiens
ctgagaaaaggcttcttgccttcttcagggcgtgatggtgcaatc

SEQ ID NO: 314 - DNA, 46 bp, Homo sapiens
gaaagcatcttgaggattaactaatccaaatgtatcgctttataga

SEQ ID NO: 315 - DNA, 48 bp, Homo sapiens
aggatggaggtgaaggagattggcccagagagctacagagttgaggag

SEQ ID NO: 316 - DNA, 33 bp, Homo sapiens
tggagatgggtgggggggaccgaaggaagctgt

SEQ ID NO: 317 - DNA, 37 bp, Homo sapiens
ccacagttctttctgtccttttcccttcctatctgat

SEQ ID NO: 318 - DNA, 24 bp, Homo sapiens
aatgaatgaacaaacgagcattca

SEQ ID NO: 319 - DNA, 38 bp, Homo sapiens
tgcgtgggcatacgagagagagagagagagagagagag

SEQ ID NO: 320 - DNA, 23 bp, Homo sapiens
gtcttgtcagcagctgtgactgg

SEQ ID NO: 321 - DNA, 37 bp, Homo sapiens
agctgtgccttctttgacctagccatggatgtccttt

SEQ ID NO: 322 - DNA, 34 bp, Homo sapiens
agaagggatgcaccttccagggaggccactgtga

SEQ ID NO: 323 - DNA, 58 bp, Homo sapiens
ctttctggaagcatctaaagtttgcgcttaaataagcccatgtcagaggtcctcagag

SEQ ID NO: 324 - DNA, 47 bp, Homo sapiens
ggatgatgcgctggcctcagaaaggaattagcttaaggaatgtccac

SEQ ID NO: 325 - DNA, 37 bp, Homo sapiens
agtccagtgagccggtgagaagggggaggcaaggtag

SEQ ID NO: 326 - DNA, 23 bp, Homo sapiens
ccccaggctcagccaccatcatg

SEQ ID NO: 327 - DNA, 47 bp, Homo sapiens
gtttacttgatggccgtgattctacccacttctttgaaagccctgga

SEQ ID NO: 328 - DNA, 21 bp, Homo sapiens
tgtacacattcttgagccctg

SEQ ID NO: 329 - DNA, 58 bp, Homo sapiens
aacactgcgggccctgggcagtagctgccggcttgggaatgcagaaggaagcagggag

SEQ ID NO: 330 - DNA, 43 bp, Homo sapiens
taacctgtgttgcaggtacaaccggatgccagccccgtgccag

SEQ ID NO: 331 - DNA, 46 bp, Homo sapiens
gggctttgctccgttgtcctcggccaagcacctgccctggctgcaa

SEQ ID NO: 332 - DNA, 41 bp, Homo sapiens
gccctggacttctccgaggccccaagcttcacccagcccct

SEQ ID NO: 333 - DNA, 46 bp, Homo sapiens
atggtgggcgcaaaggaccaggcggtgttcaaatgtgaggtctcag

SEQ ID NO: 334 - DNA, 50 bp, Homo sapiens
ccacacttgaggctgcaaaagctccctccgtaaactccggggacccagaa

SEQ ID NO: 335 - DNA, 49 bp, Homo sapiens
atagaatcatagaaatgtagagctagaaattattttggagattttgcat

SEQ ID NO: 336 - DNA, 75 bp, Homo sapiens
tggtagaagaaaaagaaggctccctcaagtaggtaacaccaaacttgaagcttaaaataaaggagatttaggaac

SEQ ID NO: 337 - DNA, 25 bp, Homo sapiens
gaggtcagaagcagtgctattcaga

SEQ ID NO: 338 - DNA, 27 bp, Homo sapiens
gttttaggtactggaaggccagtgtgt

SEQ ID NO: 339 - DNA, 41 bp, Homo sapiens
cagccaggcctggccgctgggcctgaccggccccccagccc

SEQ ID NO: 340 - DNA, 46 bp, Homo sapiens
caaattgaagaaccgtgtaaaaccatttttatgtggcttcaacgtc

SEQ ID NO: 341 - DNA, 42 bp, Homo sapiens
gatgccagaggagactgttcttaggcagagggagcagtgatg

SEQ ID NO: 342 - DNA, 118 bp, Homo sapiens
tattgggaattgagtggccgtgcgtgcaccagggtgagttaggtgtgcagcacctgagagggcttattaaggggccttggccctactgaggggtctagtctggatgcttccccccagg

SEQ ID NO: 343 - DNA, 45 bp, Homo sapiens
cagcaggatccacctcgtggacaagtggaacgggctgagcaaggt

SEQ ID NO: 344 - DNA, 40 bp, Homo sapiens
tttgtgaagctcccgtgcaaggagcccagcggggatggcc

SEQ ID NO: 345 - DNA, 65 bp, Homo sapiens
tctgagctttggtggcttttgattgacccctttcctgccccagcatgaaggtggagtagccagaa

SEQ ID NO: 346 - DNA, 48 bp, Homo sapiens
ctttgaagccttaaagggcccaggggctggctccctgtgggtgttggg

SEQ ID NO: 347 - DNA, 46 bp, Homo sapiens
tgccccatgtcacatagctccaagcggttgaatcaggatttcaagt

SEQ ID NO: 348 - DNA, 46 bp, Homo sapiens
tggatatcccaaaggcgattggtttggggccgagtggtgtgaaggc

SEQ ID NO: 349 - DNA, 42 bp, Homo sapiens
ggccccgatgcgctgcgcgtgaggagcggggacgtggtggag

SEQ ID NO: 350 - DNA, 44 bp, Homo sapiens
ggcgtgggtgtcccgggagtgtgggtgtcccgggggagtgggtg

SEQ ID NO: 351 - DNA, 48 bp, Homo sapiens
cgtgggtgtcccgggagcgtgggtgtcccgggggcgtgggtgtcccgg

SEQ ID NO: 352 - DNA, 45 bp, Homo sapiens
gtgtgggtgttccggaggcgagggtgtcccgggagtgtgcgtgtc

SEQ ID NO: 353 - DNA, 42 bp, Homo sapiens
cccgggagtgtgggtgttccggaggtgagggtgtcccgggag

SEQ ID NO: 354 - DNA, 50 bp, Homo sapiens
agtgtgggtgttccggaggcgagggtgtcccgggagtgtgggtgttccgg

SEQ ID NO: 355 - DNA, 50 bp, Homo sapiens
agtgtgggtgtcccgggggagtgggtgtcccgggagtgtgggtgttccgg

SEQ ID NO: 356 - DNA, 50 bp, Homo sapiens
agtgtgggtgttccagaggcgagggtatcccagaagtgtgagtgtcccgg

SEQ ID NO: 357 - DNA, 50 bp, Homo sapiens
agtgtgggtgttccagaggcgagggtgtcccgggagtgtgggtgtcccag

SEQ ID NO: 358 - DNA, 50 bp, Homo sapiens
agtgtgggtgttccggaggcgagggtgtcccgggagcgtgggtgtcccgg

SEQ ID NO: 359 - DNA, 47 bp, Homo sapiens
cacactcagggcgcacttcacactcacgggtcacctcacacccacag

SEQ ID NO: 360 - DNA, 86 bp, Homo sapiens
tcctggcaccaaatcccatatattcttctgcagttaatggggtagaggagggcatgggagggagggagaggtggggagggagacag

SEQ ID NO: 361 - DNA, 54 bp, Homo sapiens
agagaaagggagagggaaggagaaacggagacacagtgagatgggaggccaaga

SEQ ID NO: 362 - DNA, 44 bp, Homo sapiens
tccatttttgtttcaaaggggggtaatttattagcttcctcaaa

SEQ ID NO: 363 - DNA, 33 bp, Homo sapiens
aaattaatttttagtaggttgtgtaagtgaagt

SEQ ID NO: 364 - DNA, 47 bp, Homo sapiens
ttgtaactttgttcttgtgaaagttgtttctttttcaaccaccacta

SEQ ID NO: 365 - DNA, 39 bp, Homo sapiens
tccgtgaccctcctaactggggacgagcgaaccctaagg

SEQ ID NO: 366 - DNA, 76 bp, Homo sapiens
tgccccgagagcttcaagtgcacactcactgcacatctttgtgatgccctacaacgtcgtcccccatatcctgatg

SEQ ID NO: 367 - DNA, 44 bp, Homo sapiens
tacattgagtgttcatctgaatgtacgttgaatatgcggtgagt

SEQ ID NO: 368 - DNA, 47 bp, Homo sapiens
aattaatttttgcaagtgaagatagttgaaatgttagctaaaatgat

SEQ ID NO: 369 - DNA, 46 bp, Homo sapiens
gcagcagtttggccactacaaatcattctccttatcttgtgtccag

SEQ ID NO: 370 - DNA, 46 bp, Homo sapiens
gcctgcagatgtggatctaatgattgactgccttgtttcttgcttt

SEQ ID NO: 371 - DNA, 141 bp, Homo sapiens
gtgcatcctcttctactctaatgagcactgcatgtgtggagggtggagtgtgtctgtatcagagatcaagttatatgaaaatctgtttttataaagaaaaaaactacattgaataatttttaaacattaagtatcagtaac

SEQ ID NO: 372 - DNA, 90 bp, Homo sapiens
atacagtagatttatattgttgatgttttactcatgtttatgtcagacttaatttatatttgtagaatctactgtttctgatgatttaga

SEQ ID NO: 373 - DNA, 36 bp, Homo sapiens
gaagaattactacgtactcctggagcctctctccgg

SEQ ID NO: 374 - DNA, 47 bp, Homo sapiens
tgcccaactataacacattcatggagtttgcctctgtcagcaatatg

SEQ ID NO: 375 - DNA, 32 bp, Homo sapiens
attttacattttttgtacttttgtcatggaag

SEQ ID NO: 376 - DNA, 44 bp, Homo sapiens
ttctttactgcacacaaactagggtgtgacagtaaggtagccag

SEQ ID NO: 377 - DNA, 87 bp, Homo sapiens
atgcaattcaaataaaaacgaaactgtgtcaattagttgaagtaatgatggcaaggagagatgacctctcattttgccaagagatga

SEQ ID NO: 378 - DNA, 56 bp, Homo sapiens
tttattactgcttttttttgactgatagactttcagtaaaattaaatgtgaaagag

SEQ ID NO: 379 - DNA, 46 bp, Homo sapiens
ttcacttctagctggtctccctctgcagcctgaagaaggagatggt

SEQ ID NO: 380 - DNA, 42 bp, Homo sapiens
aaggcacagaatttgacacacttgcagaaacagtattggctg

SEQ ID NO: 381 - DNA, 51 bp, Homo sapiens
atgtcaagtaatgattatgtacagaatgtgcagggctgattgtcttctttt

SEQ ID NO: 382 - DNA, 27 bp, Homo sapiens
tgccaatcatgttctcttcacaaaaga

SEQ ID NO: 383 - DNA, 46 bp, Homo sapiens
aggtttttccttgatatagcatctgattgtcctacaagtgatgcag

SEQ ID NO: 384 - DNA, 69 bp, Homo sapiens
aaacgttaagtattttctaccaagctgggacttccaaagctgggaatcctattttttattatgttgcac

SEQ ID NO: 385 - DNA, 45 bp, Homo sapiens
gtttggcttgccaggagcatatattgtttttgtaagaataattaa

SEQ ID NO: 386 - DNA, 57 bp, Homo sapiens
ataattagtgaggaagtcatgtgttctaaacttgacctgccatttgctctttggaag

SEQ ID NO: 387 - DNA, 45 bp, Homo sapiens
ctggaatgaatgtgaacttattgttgtgcaggtaaagatgtgtga

SEQ ID NO: 388 - DNA, 40 bp, Homo sapiens
ttttctctgggaaacttaaaggtcgtcttgttctgtagag

SEQ ID NO: 389 - DNA, 39 bp, Homo sapiens
gaacagttatttgttttctagaagggatctggacagatg

SEQ ID NO: 390 - DNA, 46 bp, Homo sapiens
gactttgtttgccaaaaccacagttgatagaaatagaaaggtacag

SEQ ID NO: 391 - DNA, 46 bp, Homo sapiens
caaagccatatgaaattgtagtggaccttacccataccgggcctag

SEQ ID NO: 392 - DNA, 46 bp, Homo sapiens
ttaaccattgcaaaccagggcacgccgctcaccttcatgcaccagg

SEQ ID NO: 393 - DNA, 231 bp, Homo sapiens
gtataacttagaattcctgggaattagtaaaagatacaagctgagcactggcactgtagtcccagctactcgggaggctgaggcgggaggacagcttgagctcaggagttcaaggctgcagtgtgctataatcatgtctgtgaatagccaatgcacaccagcctggggaacatagtgagactctgactaaaagttttttaaaaaagaaaaaagatatgtaaacagaaataa

SEQ ID NO: 394 - DNA, 46 bp, Homo sapiens
aaaacagatgtacccatctattcaagcaaaaatatggggaagcctt

SEQ ID NO: 395 - DNA, 98 bp, Homo sapiens
actgcgctagacactagggatagagttgtaaaaaacacagtttcctccttcagaaagcatgtagacactcacccagctcttcatctggttcaaaattg

SEQ ID NO: 396 - DNA, 45 bp, Homo sapiens
catcttccctacctcttccacgttgttactttcttagtagccaca

SEQ ID NO: 397 - DNA, 84 bp, Homo sapiens
gccaagtactgttttaggcgctagagatagagtactaacaaagcccataaaactcactgccttcatggagcttactttctgggg

SEQ ID NO: 398 - DNA, 46 bp, Homo sapiens
cattttgttggactcaatttcaactctaactttaactttgcattgg

SEQ ID NO: 399 - DNA, 43 bp, Homo sapiens
attacataatcataatcaagtttcaattttccaactaatggag

SEQ ID NO: 400 - DNA, 45 bp, Homo sapiens
agcagggaatgggactctgagacatattagataaatacctataag

SEQ ID NO: 401 - DNA, 46 bp, Homo sapiens
gttgtgtttcccaaagtctttcctgttgtgtaagtatctccttttg

SEQ ID NO: 402 - DNA, 46 bp, Homo sapiens
attgttaagtttcttgatgccttgattgacacgtacctgcctggaa

SEQ ID NO: 403 - DNA, 38 bp, Homo sapiens
gccatttgcacagagctctgccttctgtggttttccct

SEQ ID NO: 404 - DNA, 65 bp, Homo sapiens
accatagaggtcaagcctcagtgacttgacaccataaagccacagacaaggtacttgggggggag

SEQ ID NO: 405 - DNA, 42 bp, Homo sapiens
atcttaacattactgaattaaaactatggcttctaagtcctt

SEQ ID NO: 406 - DNA, 52 bp, Homo sapiens
ttttttctccagttgattatcttttaatttttaattttgctaaaggtggttt

SEQ ID NO: 407 - DNA, 48 bp, Homo sapiens
tgcattagctccatagcaaaatggaatggtacgtgacatttagggtag

SEQ ID NO: 408 - DNA, 49 bp, Homo sapiens
actgctgggtgcactgcacttcgctggggctagggagggtgtctggggc

SEQ ID NO: 409 - DNA, 45 bp, Homo sapiens
tctggaaagccttccagccgctggtgaagaactaccagccctgta

SEQ ID NO: 410 - DNA, 46 bp, Homo sapiens
ggttctgaatgtgaaccagatagctttccctggaccagccggccca

SEQ ID NO: 411 - DNA, 46 bp, Homo sapiens
ctaccagctggaagggatctttgcccaggaattccccgacttggag

SEQ ID NO: 412 - DNA, 50 bp, Homo sapiens
agagagggctgcagtacaagtatctggacgagagctccggaggctggcgg

SEQ ID NO: 413 - DNA, 53 bp, Homo sapiens
ggaagtcttatctcctgtctccagccagacctgatcggtttctgtccctggag

SEQ ID NO: 414 - DNA, 45 bp, Homo sapiens
tgccataggcatagatagggtgcatgacgagggaggactggacac

SEQ ID NO: 415 - DNA, 40 bp, Homo sapiens
tttcaaggggaaaccttgtttattgttcccaccactgatt

SEQ ID NO: 416 - DNA, 46 bp, Homo sapiens
gacaccctgtttcaaggggaaaccttgtttattgttcccaccactg

SEQ ID NO: 417 - DNA, 45 bp, Homo sapiens
ctctttctttctccagttctccttggtctgtaataggaatgcccc

SEQ ID NO: 418 - DNA, 47 bp, Homo sapiens
cccttctctccttttttttacaataaccaagttgagaacactcagat

SEQ ID NO: 419 - DNA, 46 bp, Homo sapiens
tagctgtactgggccccaggtgacgaggcatcatagtctcagtcag

SEQ ID NO: 420 - DNA, 45 bp, Homo sapiens
agctgtactgggccccaggtgacgaggcatcatagtctcagtcag

SEQ ID NO: 421 - DNA, 71 bp, Homo sapiens
gagactgaaaagtttacggattctgctagctgtactgggccccaggtgacgaggcatcatagtctcagtca

SEQ ID NO: 422 - DNA, 71 bp, Homo sapiens
gagagactgaaaagtttacggattctgctagctgtactgggccccaggtgacgaggcatcatagtctcagt

SEQ ID NO: 423 - DNA, 45 bp, Homo sapiens
tcttaccttctttgtttaagggcttttttacaacatactggcaga

SEQ ID NO: 424 - DNA, 43 bp, Homo sapiens
aatatgcggctgcttcagagcaatacgccgctgtttgtgctgc

SEQ ID NO: 425 - DNA, 46 bp, Homo sapiens
ccaaccctgcctggatctccctgcttcacccctgtggcccaccagg

SEQ ID NO: 426 - DNA, 42 bp, Homo sapiens
agctgaaagtccccgaatgggtggataccgtcaagctggcca

SEQ ID NO: 427 - DNA, 41 bp, Homo sapiens
cgtcagagaaacggcgtcatgcccagccacttcagccgagg

SEQ ID NO: 428 - DNA, 25 bp, Homo sapiens
ctccaagccctggaggggctgaaaa

SEQ ID NO: 429 - DNA, 45 bp, Homo sapiens
cattagcctgctcgttaacttttcccaattgatttttcggggctt

SEQ ID NO: 430 - DNA, 47 bp, Homo sapiens
caacaccccgtcagctcccaggggggctcccactactgcccccagct

SEQ ID NO: 431 - DNA, 48 bp, Homo sapiens
acctgctcaaggacagctggcaggggctgtggccacgctaacccagga

SEQ ID NO: 432 - DNA, 25 bp, Homo sapiens
tggggcttcccagaggagcccggat

SEQ ID NO: 433 - DNA, 42 bp, Homo sapiens
cctgacactggcccttggggccttcctgaatcaccgcaagaa

SEQ ID NO: 434 - DNA, 40 bp, Homo sapiens
ttgaggggcacgcaggattctgagcaccaggggcagaggc

SEQ ID NO: 435 - DNA, 42 bp, Homo sapiens
ggatgagctcaggggcctctagaaagagctgggaccctggga

SEQ ID NO: 436 - DNA, 46 bp, Homo sapiens
aaaatgaggactgaattagctcataaatggaacacggcgcttaact

SEQ ID NO: 437 - DNA, 46 bp, Homo sapiens
tgacagtttctccttccccagactggccaatcacaggcaggaagat

SEQ ID NO: 438 - DNA, 45 bp, Homo sapiens
gaccctgacccaccttgaacttgttccacacaggatgccaggcca

SEQ ID NO: 439 - DNA, 41 bp, Homo sapiens
ggcgctgatggacgagaccatgaaggagttgaaggcctaca

SEQ ID NO: 440 - DNA, 47 bp, Homo sapiens
tggtgcagtaccgcggcgaggtgcaggccatgctcggccagagcacc

SEQ ID NO: 441 - DNA, 31 bp, Homo sapiens
agcgcctggcagtgtaccaggccggggcccg

SEQ ID NO: 442 - DNA, 42 bp, Homo sapiens
gggctccctggccggccagccgctacaggagcgggcccaggc

SEQ ID NO: 443 - DNA, 45 bp, Homo sapiens
cgaggtgaaggagcaggtggcggaggtgcgcgccaagctggagga

SEQ ID NO: 444 - DNA, 75 bp, Homo sapiens
gaagacatgcagcgccagtgggccgggctggtggagaaggtgcaggctgccgtgggcaccagcgccgcccctgtg

SEQ ID NO: 445 - DNA, 32 bp, Homo sapiens
accaagccctccagcaaggattcaggttggtg

SEQ ID NO: 446 - DNA, 46 bp, Homo sapiens
tggcccacccagcccagcggtcctcctaatcccacagacagtgggg

SEQ ID NO: 447 - DNA, 47 bp, Homo sapiens
cactagttatggacaagggaagaagatgatgctggagtgttctggta

SEQ ID NO: 448 - DNA, 44 bp, Homo sapiens
tcatatattatacccaatcatgatatctgcatgtgtctctggcg

SEQ ID NO: 449 - DNA, 70 bp, Homo sapiens
aaagggatggttgctaagaagaaggcagagggggatttgcctgtagagagaagagtagaggcaaggtgac

SEQ ID NO: 450 - DNA, 44 bp, Homo sapiens
atttcatgtcctgaagaaaagtccataaatgagtaaaggtagca

SEQ ID NO: 451 - DNA, 46 bp, Homo sapiens
aaaatgaaagggtatgactgtgttcccataaaactgtatttataaa

SEQ ID NO: 452 - DNA, 42 bp, Homo sapiens
ggtgttttcctgagtgtaaaattaaaactccaaaagattctg

SEQ ID NO: 453 - DNA, 65 bp, Homo sapiens
cagcaggacgtcacagagaaggggtgaaatcagtagaagatgataaactcaggttgagtttgagg

SEQ ID NO: 454 - DNA, 49 bp, Homo sapiens
aagagcaaaagcagagagaccaattacgaagaaattacattaacctgag

SEQ ID NO: 455 - DNA, 52 bp, Homo sapiens
ttagtccctccaaattcattgtgcatgcgtgtgtgtgtgtgtgtgtgtgtgt

SEQ ID NO: 456 - DNA, 23 bp, Homo sapiens
aaggtgaaattatagaaaaagaa

SEQ ID NO: 457 - DNA, 57 bp, Homo sapiens
tttatttttttaatccatctatcctaacaatctctatgttttagttggtatatttag

SEQ ID NO: 458 - DNA, 43 bp, Homo sapiens
cagtgtcatgcttggaacagaggctcactggagccttctcctg

SEQ ID NO: 459 - DNA, 53 bp, Homo sapiens
agcaactaaactttgtccaaaaataaaataaaataaaatctctcctggcccag

SEQ ID NO: 460 - DNA, 48 bp, Homo sapiens
tgtttaaaaatgacttgtttggcacaagttttaaataactgaaacatg

SEQ ID NO: 461 - DNA, 47 bp, Homo sapiens
aaataataaatgttaatattgtaatgcccataatactttaagagaga

SEQ ID NO: 462 - DNA, 46 bp, Homo sapiens
agttttctggcctaaatcatttctttcatggagcctatgcacctga

SEQ ID NO: 463 - DNA, 42 bp, Homo sapiens
aaatgagcaacagtatcaaattcagcaagctgagagcttaag

SEQ ID NO: 464 - DNA, 43 bp, Homo sapiens
acatttataatttgtatgatgtgtctattaaatgctgcctaat

SEQ ID NO: 465 - DNA, 37 bp, Homo sapiens
aatccttttttttcttcccttgcccagacaagagtga

SEQ ID NO: 466 - DNA, 28 bp, Homo sapiens
ttttggcaaatgtatcatggcgatgtaa

SEQ ID NO: 467 - DNA, 45 bp, Homo sapiens
acagaggatgtcacccccatcccctctgacagcactcgcaggaag

SEQ ID NO: 468 - DNA, 76 bp, Homo sapiens
agctcagcctgtttccctttctggaaagtgagttaagaccacgtcaggaaattcgaggaactggcagatggggcca

SEQ ID NO: 469 - DNA, 127 bp, Homo sapiens
cccagtggatgtgcagcggctggtctggtcacttttggcagttaagtttgttaagggaggctgcaagaggcaccttgtgacttaaaaatctctccctgaatatctctgtcaccttgatatgaatgtc

SEQ ID NO: 470 - DNA, 41 bp, Homo sapiens
ctaggaccaagacccctggacctggggcccagtcggccctc

SEQ ID NO: 471 - DNA, 44 bp, Homo sapiens
accgaggctggtgggagagtcagactttaaacaacagagcacca

SEQ ID NO: 472 - DNA, 47 bp, Homo sapiens
gaatcctcaccatatgctgctatgttggctgcccaggatgtggccca

SEQ ID NO: 473 - DNA, 45 bp, Homo sapiens
ctgccatatctttgcatccttcaatgacacttttgtccatgtcac

SEQ ID NO: 474 - DNA, 60 bp, Homo sapiens
tcgaaaggggaaggaaaagaaggaagaacaggtcatcagcctcggacctcaggtggctga

SEQ ID NO: 475 - DNA, 106 bp, Homo sapiens
tgacagtatgattgcaattattatgaaggtcataataggttagagttatttagtctcaggacccatcagatttctgagatgggtcttttccattagcctgcctttt

SEQ ID NO: 476 - DNA, 38 bp, Homo sapiens
gttttgccactgtctttactgtgaccataggctgagac

SEQ ID NO: 477 - DNA, 29 bp, Homo sapiens
taggaacacctgagacagactagggtagt

SEQ ID NO: 478 - DNA, 140 bp, Homo sapiens
atactcatgcttacgtatttgagatatgctggagcctttctatgcttctcgaggcagaactttgggcttctctcctgtggcgcgttccttacaatagttaacgcactgggtcgtgctcattggtctgatttgaagatagg

SEQ ID NO: 479 - DNA, 74 bp, Homo sapiens
ggtgagtgcgggtccagccttttaaggcctcggccccgcaatacggccacggccacggccgcgtttgagctgca

SEQ ID NO: 480 - DNA, 47 bp, Homo sapiens
ttccaagagcagcaggtcttctactgcttctccgcacctcgggggaa

SEQ ID NO: 481 - DNA, 46 bp, Homo sapiens
ctgtgggtcaacgtgtcagctgccggcaggtgggctgtgctgtacc

SEQ ID NO: 482 - DNA, 37 bp, Homo sapiens
aaatatggtgaaaagagtcagaggaaaaaggagtgag

SEQ ID NO: 483 - DNA, 16 bp, Homo sapiens
gtaggaggtagcgcgg

SEQ ID NO: 484 - DNA, 36 bp, Homo sapiens
gagatcctttcactatttacatcattcagccctcaa

SEQ ID NO: 485 - DNA, 48 bp, Homo sapiens
tcaatccaggtgtacccatcttcagaaataatggaccccaatgtctca

SEQ ID NO: 486 - DNA, 69 bp, Homo sapiens
tttggagtttgaggtatacctagagtacctccagaacagatttgagagtagtgaggaacaagccagagc

SEQ ID NO: 487 - DNA, 49 bp, Homo sapiens
acccaactagaaaaaaatcctaagctcattgtaattaggattggggtaa

SEQ ID NO: 488 - DNA, 32 bp, Homo sapiens
tcttattcagacttcccttgttttacttgcat

SEQ ID NO: 489 - DNA, 13 bp, Homo sapiens
tcataaccatctt

SEQ ID NO: 490 - DNA, 48 bp, Homo sapiens
ctgctaccacagagcagtcaggaagctgggttctgctagattctgggg

SEQ ID NO: 491 - DNA, 48 bp, Homo sapiens
tcttttttctcattttccttacagatcttgaagggcctcaacctgaag

SEQ ID NO: 492 - DNA, 51 bp, Homo sapiens
tttgccctatttaaaacttcaggatggaaatgaacacacagaaaggaactg

SEQ ID NO: 493 - DNA, 43 bp, Homo sapiens
gtgtgtttgatgatggagtttgtccctgtccctgaaaccttgc

SEQ ID NO: 494 - DNA, 23 bp, Homo sapiens
gttttcatttgaaatatgtctta

SEQ ID NO: 495 - DNA, 36 bp, Homo sapiens
aacaaatgtgtttttctatatagttccttgccttaa

SEQ ID NO: 496 - DNA, 44 bp, Homo sapiens
caaggaagccaaagttttcaaactgctgcatactttgacaagga

SEQ ID NO: 497 - DNA, 38 bp, Homo sapiens
ttctctttaccttctaaaagccattattatgatgttag

SEQ ID NO: 498 - DNA, 67 bp, Homo sapiens
ccaattctaaatccgacttgaatattcctggacttacaaaatgccaagggggtgactggaagttgtg

SEQ ID NO: 499 - DNA, 47 bp, Homo sapiens
ggtcaagttcccaactgagtcatcttgtgagtggataatcaggaaaa

SEQ ID NO: 500 - DNA, 45 bp, Homo sapiens
ggcatttttaaatcccagacagtggatatgacccacactgccaga

SEQ ID NO: 501 - DNA, 54 bp, Homo sapiens
accgcccgttccagtgccaaaaatgcgaccgagcattttccaggtcggaccacc

SEQ ID NO: 502 - DNA, 46 bp, Homo sapiens
cacacttgtgattacgcgggctgcggcaaaacctacacaaagagtt

SEQ ID NO: 503 - DNA, 44 bp, Homo sapiens
tgccacccggttcctgcatgccagaggagcccaagccaaagagg

SEQ ID NO: 504 - DNA, 50 bp, Homo sapiens
ccccacccggggcccaattacccatccttcctgcccgatcagatgcagcc

SEQ ID NO: 505 - DNA, 45 bp, Homo sapiens
ggtggcgccctacaacggcgggccgccgcgcacgtgccccaagat

SEQ ID NO: 506 - DNA, 41 bp, Homo sapiens
agcgcccctggcagcgagtacggcagcccgtcggtcatcag

SEQ ID NO: 507 - DNA, 71 bp, Homo sapiens
ctggcggacatcaacgacgtgagcccctcgggcggcttcgtggccgagctcctgcggccagaattggaccc

SEQ ID NO: 508 - DNA, 63 bp, Homo sapiens
ctcggagagagaccgaggagttcaacgatctcctggacctggactttattctctccaattcgc

SEQ ID NO: 509 - DNA, 53 bp, Homo sapiens
ccccagtgcttcccggccgcccctatgacctggcggcggcgaccgtggccaca

SEQ ID NO: 510 - DNA, 43 bp, Homo sapiens
tctccgctccctgccttgctcgcaggcagccacctggcgagtc

SEQ ID NO: 511 - DNA, 42 bp, Homo sapiens
cagctgcttcgggctgccgaggaccttctgggcccccacatt

SEQ ID NO: 512 - DNA, 34 bp, Homo sapiens
ttttgggttttggcttcgtttcttctcttcgttg

SEQ ID NO: 513 - DNA, 52 bp, Homo sapiens
agtgcttttttaatacattgataccaaatctctcctgctctcaaaaaaaaaa

SEQ ID NO: 514 - DNA, 60 bp, Homo sapiens
gtgcccagatgaacctaaagtcaccagtaatagtgctaatgtagtaatgggcccaagctt

SEQ ID NO: 515 - DNA, 17 bp, Homo sapiens
attagtattcagtattt

SEQ ID NO: 516 - DNA, 47 bp, Homo sapiens
aattttataatacctatacatattcttacctgcattaatgtgaatag

SEQ ID NO: 517 - DNA, 95 bp, Homo sapiens
cagggtccttataaatggaaaaggcagacaggagattcagtgtcagactgatacaatgagggaaagactaccagcagttgatggctttgaagata

SEQ ID NO: 518 - DNA, 45 bp, Homo sapiens
tgattctgtaccttaagtcaagaggaaggatggcttgattttagg

SEQ ID NO: 519 - DNA, 45 bp, Homo sapiens
gatagagcatagccattgtgtttggctatttgcgaaggttggcaa

SEQ ID NO: 520 - DNA, 47 bp, Homo sapiens
tttttaagaaagacatctggattgtagggtggactcgataacctggt

SEQ ID NO: 521 - DNA, 49 bp, Homo sapiens
gtgtgttggtgcagtgttgactatgaaaagcaggcctgaactaggtgga

SEQ ID NO: 522 - DNA, 60 bp, Homo sapiens
tggcccctttttacagactattgctcacaatctcaggtgtccatatttgcagctattagg

SEQ ID NO: 523 - DNA, 54 bp, Homo sapiens
ggacctgtgtaggagaaaaagaccctatgttcctcccattaccctttggattgc

SEQ ID NO: 524 - DNA, 23 bp, Homo sapiens
tttcttttgtctttgtcagtaga

SEQ ID NO: 525 - DNA, 38 bp, Homo sapiens
gctcccagcaaacccctagtctagccccagccctactc

SEQ ID NO: 526 - DNA, 24 bp, Homo sapiens
tcacagccaattagagcagaagat

SEQ ID NO: 527 - DNA, 72 bp, Homo sapiens
tggcgggcttgccgcattgttaaagatggcgggttttgccgcctagtgccacgcagagcgggagaaaaggtg

SEQ ID NO: 528 - DNA, 42 bp, Homo sapiens
tggtggacatgtgcggtcacacaggaaaagatggcggctgaa

SEQ ID NO: 529 - DNA, 75 bp, Homo sapiens
ttttatcagtacaagggactagttaaaaatggaaggttaggaaagactaaggtgcagggcttaaaatggcgattt

SEQ ID NO: 530 - DNA, 37 bp, Homo sapiens
tgttaggagctttgcgtgattgttgtatcgggaggca

SEQ ID NO: 531 - DNA, 49 bp, Homo sapiens
cgctttggcagagaatgactctgcagttaagctaagggcgtgttcagat

SEQ ID NO: 532 - DNA, 32 bp, Homo sapiens
tctggaatatctacacttttttttgctgctga

SEQ ID NO: 533 - DNA, 52 bp, Homo sapiens
tgtggatcagttttttactcttccactctcttttctatattttgcccatcgg

SEQ ID NO: 534 - DNA, 4056 bp, Homo sapiens
tttacattttccttccctgtgatgctatggtgtgttatttcattcttgctcgtttgtggtggtggtttttccttcaaatcagctttattgatgtgtaattaacatacgatgaaacacaggttctttgggaggccaaggcaggaggatcacttgagcccaggagtttaagacaggcccatgtaacaaagtgagactttgtctctacagaaaaaaaaaaaaaaaatcagaaaattagccaggcgtggtggtgcatgcctgtggtcccatctacatgggaggttgaggaaggaagattgctggagcccaggaggtcaaggctgcaatgagctgtgttcataccactgcactctagtctgggtgacagagcaagcccctgtctcaaaaaagcaaaacaaaacaaaaacacctattttaaatgtacagtttagtgagttttgataaacgtgcattccatgtgtggtttttaaaaatgtaatcacattttttattgcggtaaaatataataacataaaattgaccatgccaaccatgtttaagtgcacagtgcagtggcactaagtacatttacattgttgtgcaaccgttaccaccatccccgatagaactctttcatcttgcttcagtgaaaatctgtgcccattaaacactaactcaccacttactgcccccctcgcccttggcaactactgttctactttctgtctctaaggctctgactactatagatacctcatataagtggaatcatacagtgtttgtccttttgtgtctggcttattatgcgaggacttagcataatgtcctcaaggttcatccgtgttgtatcatgtgccagaatttccttcctttttcaggccgaataatattcctttgtacgtatatgtgctacattttgttcatccatctattcattcattgatagacatttgggttgtttctgggttttgtgtttttatatatgtttttttaaaaataaacatctttagagacagttcagtaaagcagtggaaacagggaagtctccatttaacccctgaggatctggctcacctgcaccttctcatcagcattaagcagagggaggcacgagcaggagccacctgcacactcaatgaggagctgaacagggatcaattacctttttttttagttattaggatgctgctagctgagaatctgccttgccttgattaccccaatgtctggtgcccaagtcccttgagtcctccagcaggaactcctgtggcatcactcaggagtctagtctaagaagctagctctgaccagggcagtggtggccaggcttctgtgagtgggccagcctcccccgggtaggacacaagccataccagcagggctgtatgtgaactgtggaaaatagagagcaaagtgggtaggtgggtgtagggtgctgttttcctggaaatatctacctaatctcgctcttctcttacctctaggtgtttgtaaattttgctaaacagcagactgaaagtcatgacctccctctgcaccctcgagctgctggagccagtcgacaagcccaggtacccctgctgcttatgcagtccacagcttgaggcagttccttggctcagagcccagctggttcactgggcttgagttgctccaaggctcagatatgcctcctacagagagccccacccacaccacggtccctaccaagtccccaccacatcctcatcacatccttgctaagtccctgccactgtgtgttctgtgctgaagaacttttcattcagtagttgtaggggttcctattgtaatcaggaaaccatctggatagcatgggagagcatttttgaaaagaactttcccatgtttttgcttacagcaaaaaagcttggatttggggaataaggagcagagaaggtaatagagaatattagaatgttttgggtgcttgacatctatgtctggacatgtgtttgagtttcaagggaagggacttaactggcacatcatttcagtgtcagacacatttggttagatcaaggaatagcatctgttgtaggaagagggctctttgttctttataaaaattacaagaagatggagaaagaagcaataggaggtatgtctcctggcttgtgataactcttggaataggtgcttgtaggttcctgccctggcacagtgccccatgtaaggagcacaccacccaagaaggagagagctagagcaagtactggaggaggcaccagcatcccaatgccttggcttaagcctgggattgtagagggatgaattagccactctcttctgacttacctggagagtaaatcaaatcaaatcaagaagcaaggatatgcaaaaaccttatttccccataaagtttttattctgcccagtttctggattgcaagaaaaaccaaatacagctaatgattgaaacactgctgtctaaagcagtgcttgtgatgaattttttcccttcctcttgaccagcagagacctaatggctacttggcaaaactgactttgtcttcccaccccttacctgccagagggcccagaaatgcctaaggctcctttagttacagaaagtttgcttttactgagatcttccagccactgattcccatttatagatctggtgattgctgttgacatcagttgaaaattatttttaaaaaccacttgcagttgcaaatcctttttataactctgtaactcagaatatagaattgggtagcaaaattgtttcccagaattaccaatggtctccccacccctgcctggcatgttccctcttaaaggactaatcccaccacatcacctctgggccaggcagaacatcaggggtgctgatgttctgtgatctacagcagttaattccaaacttttctcccttattggatgagatcatttttctattgtgttttttacatttttgttcacaaagattagaaaacctgcaacacacttattggcatatttttctgataattttcatccaaaacctaattctgactttacaacatactatctttacaaaggtttgcaaaaattctttcatatagcattgtatatgtctgtcatgaaataatagtaagtatattattgtttacattataccacttcaaaataatttcctttaaagtattcttcaaacaagaaaaaggcaatttctctcaagaagttttagagagaatttacaacttgctcctaagcaaatgtgagaacttcaggaggttcatctggccattggctttacaactccaaattgtgagccaggaccacacagatatttctctagaaatcagcgtttgcttaccaagaacatttttactctccaaaggactccatcctggaaaacatgttttgggataaggtcttatgcaatcttatactctgttattaaaaccagtgagggtcaaggtgttaatagattaagtagtgacagatgatcagacaacttagaaacatcctaaataggttaataattatgtgaccatcgcatgtgcattcccaaattaggaacaactcagatcaatttctaatccttattcttacactgttccagttcccccatataactcgtatctttgtgttagtttcagaagtttctgaagtaccctcagccttgatggggatcctcgcaccacctcaaatcctgttctcagccctaagaactgtgttagtcatcctcttaagaggatgtgtgattttaaatcagataatgggataaaccacatttcgtctagactggtcaggcctttgtccagtcccctcctcgcccacactaccccagctccacagcgggcattggttcaggaattcaacccacactttataactggagacagtatctctccagttaaaaaggtcaccttggtgtccgcttctcaaggaacatggacatctttattaatcaaagcccaagctttgatctggagcctaatatcctgcactccagctctcatctctcccctcccccagtcacactttcatgcttcccagagccacccctacaggaagtggtcaagggaattctatacctcagggctgacctaaattaggatttcttggctt

SEQ ID NO: 535 - DNA, 4048 bp, Homo sapiens
ggtgctgctgacatctgtccagcatctgcttgactggggcctcttcctctctcctgaaagccatcctcagcatggcccaatgcccagtgggcaggacgagtcctgagcacgcttcactggctcagacaggatgaatttgattctttggcctccatagccagccctactgggtttacagaaaagggacaggcaggggtgaagccaggtcatggctgagtccatctcaacagatccagcttcacctgcaagtgaccacgcaggtgacttcctcatggtgacaaaaggagtcatggcagggtagagatatcataccatggcaggggaaagatatcatagaattttccatgagcacatttatgagacatcaagttacaactgtgtccaagtgaggcacagtctgacatccagaaggtaaaactgagctggacgctagaaagaaactataggcttaagacacagaattgggattatatggtagggtagctcccactaatttggaaacgtaccctacttgcttccctgagtagttttaattggcccagccatgcctttggtggcttttgtcattgtggggaactgtaatggtctctctgtaccatcctatatcatccatcctttattcatagaccctaagctataagaagaaaaggatgagattagactaaatgtctatgtatagtttattttccatcttggcaatatattttttagtgggggtgaatatattagccaaagggagttggtggaacccaactcactctacccctgctccctgcaggcctctcgctgtgggtagttatctgactggctcctctttcattgctatctttgccaataaatacagatagagaagtttacttccatcgggacacatgcatcttttctagttacttcccaaatgtctgaaaattattgataaatcatgaatcattttcttaaacctgatcttccctctgtttttaaactcacatgtgaggtgatctgatccaaaatgaaagctgacttttggcgtaacagggattcaattaatcctagacatggaaacatggaagaatctgacaggattcagtttctaaccgaagggcccctgttttgattcccaaatatcccatgcatttctgaagccaaataggagaagagaagaagcagcttccttttcccgttggcagaagcttctccagccctagctctatggtcatccctccactccttgaaggatactcagtaattgctttttttcttgcagtattttaaccaatatttctgaagtccatcaaaatatgggctactgtcctcagtttgatgcaattgatgagctgctcacaggacgagaacatctttacctttatgcccggcttcgaggtgtaccagcagaagaaatcgaaaaggtgaaaaatgttttgttgtggccacataggagtctggttaattacaagcctgtttcatgagagtgcattctcttggagatgagaaactgaagcgtgctattcattcattcattccaacaaatgtttactatgtgtctactgtgtgccaagtactgttctagaaaccaggagtatagcagtgaacaagacagacaaaaaaaaatccccactctcatatctaacaaaatgttgtatgcatttatcctctgactcagcaatcacacgtctaagagtttatcctgaagatgcatctcccacagtgcaaaatgaatatgtataaggtgatccattgcatttgtaattgcaaaatgctggaagttacctaaatgtttagtcattgtagattggctgaataatttatggtacagacacacaataaagtcttacgcaactataaaaaagaagaagaaaagtctcagtaaactgatatggagatatttccagtaaatactgttaaatgataaaaagcaaagtggaaaacagaacatagagaacgctactttgtatgtaagaaagaaggaaaaacaagaaagtaaacgtatgtctgcttacctttgcaaatagaacgtagaaaggataaaccagaaaacaatgaatttggtgatcaacaagaagaaaatgggaagaaagaaaaatgggaggaaacagtacttctggggatatatttttgtatagttttaatttttggaagcatgttaatgttccacatattcaaaaaaaatcagtaagaatgggaagtaggcaaaaatgaaaacaaaaagaaaacctaacactgacagcaaactaaataaagtaacccaattttatttcaaataaatatcataatcttgcaaaagggggatagagctaacacaaacaactgctgaacacagtgtttgactctatatcctcattcttgggcagggtggagcgggggagaagaactacaaataatttctgagttctttttagtttgttttttatagtggtataggcaaagtgattctgaaaattttagatgtgttacaggattaaataaattaataaatgttttgatgttattgggacccagaattctcaccgtggaagaagggacttacaaatatggaaaagggaaaagcaagaaagaactgtgaggtcatggataggaaccggaggtagcactgggaattcaggaatatttatatgcttgtgtttgtgggtgcatgcagatgtgttcatgtttcatgcacataggcatgtatatatagacatatatttgcatgtgtgtatctgtcttccgaaaggctcaagaagcaaaaacaccccagtagccatgagcacacttagcactcaggcttttgtcttaataacattccccactaaaagtaaccctgattcctccaataaatgataagttccagggctggaatggcataggtataaaatgaacctggaatatcttatgccagaaagtaaggaagtgcttttaaaaaaaaaataaggggctgggcatggtggctcacacctgtaatcgcagcactttgggaggccaaggtaggaagatcgcttgagcccaggagttccagattagcctgtgcaacatagggagaccctgtctctacaaaaaattagcaaacaaattagctgggcctggtggtgcacgcctatagtcccagctactcaggtggctgaggtgggaggaatgcttgagcccaggaggttgaggctgcagtgagctgtgatcaagccactgctctccagcctgggaaacagagcaagactctgtctcttaaaataataataatataattttaaagaaataaaagtaactctgtacagattgcttattggttacatgggagaaacataataattttacaatggagaaattagacagcaccttaactgggtgatcaaaattaaccataaggggcagatggacatctcatgccccgagatgtgataccctgtgaaggacacaatttcacttatgtagaatccagattggagatatgtaacctgaatcttatcatgaggaaacatctgacaagctccaaagaaggaatattccttaaaaaaaaaaaaaggagactgtattcttcaaaaacataagagtcataaaagacaaagaaagagctatggaaatatctctgatcgcaggaggctaaacaggcataatgactgaatagcagacaatagactacatcttgtgcagaagagaaaaaaaatgatagaaggatattattggaccaactgacaaaactgaactatgaacagtagattaggtaaatgtatcataacattaagtttactgacattgataatgtactgtggttatgtaagagaagatctctattcttaggaaatatgccctgaagtatttaggagtgaagggctgtgatgagtaatttaccctcaaatgggtcacaaaaaattgtgtgtgagagagagaagggttttattagttaataattctatgaactatttttattcctatatgtttgtgtgagtttgaaactatttccaaataaaaagttaaaaatggagattacattctagtgggagggatagacgatctgtagataaataggtaaaatatccagtacattagagagtgaaaagtcctcagggaaaagtaacgcagggaggaactgctgggg

SEQ ID NO: 536 - DNA, 4022 bp, Homo sapiens
aataagtaagtggcaaaaaagagaaaggaaaaagatagggtgggaaagaggcagcgggacagtgtctgagtccagcacacgccagggcgagccaggtcaactgcagctgtcatattctaactgtgaattatcatctttgatcactgccctttgagatgccaatgaacttttcaagaaatatctagttctcttggctctccagctgttcttatcagccccatccaggatggaacagctttggcagcccgtatcagaacaagcagcttgacaggggcatgccatgccaggagagaggatcctaaggaagcgtggtccagtccgcacaggctctggggctttaagataaaacctcctgtctaactttagtaggactttctgttgcttcacctgccagagccctgaacgagggataaattgacttaattaactagaacacactgcaaatggtgaaagcatttagcaaaacaaagaatgccatccaagccccaaaataaaagcagaataaatagaatgcaataaacagcaaccatcccaaactgagttctcagcagcaaatctccagtatgaaattttggattttgtgcgtgtgtgcttaaaggtggatgacaatgacagttcatgggattgagctctggggtccagagttggcatctgttcatttcccattttgtcattttacccttgattgactgaatgtcagtgccttaactttgggctgtggagtgagtcggaactcccccgaggtgtgcaggtggttgttagagtctcatttttgcagggtggaagacaggagggctgcagccttcattccacactgacatggtcattgccgtgtgttctgggtccagatcaggcatattgacctgacatatgacctgacaacaggaccactcagaaagtccagcatgcgggatatgatttggagagccagtgggggaaatcataggtcctttctctgcatgtgtattcaggcaatgtcccagggctgggcggcttccgcattgcttggatatcggaaaatgcaaaaatgcccctgaagactgagacttcagtcttcaaaatgaatgtttgggaaagaaagttaacggcactgctgtacttgtggtattcattgcattattttattttggctttcagcttaaagagcaaattctgggtcaatgaacagaggtaagaaactatttttatcagaattaaaatctcagattgattcattgttgaaataattgcacacttttaaaaggcacacctcacagccatgaggaggggctgttctgtaggtgctcaggaagtcacaagacacgtcctgaagaatatgtggctagggacatcccagactcagaagacactcagtggtgcctcttcttggaggacataagtgggggtggcattccctgatgtggcgtttcagagcattctcacccaaaaaaagcttctaaaacctccaagtatataacagtttataatactccaacaagagggccttgtagcctaaacccgggacactccttggcccattccttttaagcttcagggagtgtgggccagccccagactcaccccattcctgaggcatcctggaggttgaaatatttccagaggtttagaacctcaccaagtgggactctaggagcctgctgcctcccagcctccctcaggaactgcacctccagaacaggtgcggggctgacatgtatgtgctttcctgggcagattctagaccgtacacatgaaatctggctttcaggattgctctccagagggacctgtggggcctcggctgagacagagagtaggagtgaggcagtgattcaaggccctgagaaagagctcctcctctgcttggtataaccagctaattcattctgttctgttgactttggcttctgccctgcctttgaagggtttgaggccagggagtgatgcactcagactggtgtttccacacagtcacttcagacttccagggcagtacaggagatagatcccagggccagtgaagaagcagagcacaagtccaggcaggagaggctaagggcctccctgaacaggtgtgaggcacagaagccccgagaggtagggatgacaggatgaagatgggtcctgtgctgctagaagtacctgcaaagcacagaggtggcacagaaaaggagtccttggctgggatgggaggagatgacatgtgacatgtgaaagaggacctggagttggctcgatgctcccaaaagggaaaggtgccgaggggagctagcagccatgcaaaggcagagacatgcaggcagtctgggccatgaggagctctggaagtgactcgatatgtccagaataggccactccagggaagggctgaggaaggatgaagttggagaggggcacagaccagatgcagaagggcctcagaggccaggatgagggtttggactccttcctggaggcagcagcagtgggaaaagagttaaaagctggtttgtaaagtggagccatgttgctcgctggtccaggcaattcccccgaaagttcatgtttccctacaaaacccgagagagctactagtaggcgtgaagttcgtggccctggtctgaggatttcctgtttccttgtcaggtatggaggaatttccattggaggaaagctcccagtcgtccccatcacgggggaagcacttgttgggtttttaagcgaccttggccggatcatgaatgtgagcggggtatgtaaacagactggagatttgagtaggatttttgacttgcttaactaccatgaatgagaaactctcatgagtgataacaggaaaaaaaaattaaaaccgtcttgtttgtttgtttacatggtttttagggccctatcactagagaggcctctaaagaaatacctgatttccttaaacatctagaaactgaagacaacattaaggtacttgacctatgtataatctgctctggagctaaaaatttacctgagctggttattttatttttactttcctaccttcattaaattccatccctcctcctgctgaaatctagcaaggaatgtcttccagctaccaaacccttcctgcttctcaaatttcctttccttcactgatttctgctttaactagctgttagtgcagcgtctcagatgtcctctccaccctctaggtgtggtttaataacaaaggctggcatgccctggtcagctttctcaatgtggcccacaacgccatcttacgggccagcctgcctaaggacaggagccccgaggagtatggaatcaccgtcattagccaacccctgaacctgaccaaggagcagctctcagagattacagtgtaagccaccacagccccagcctcaccactttcttgtcaccttctccactctttgaacatcctgagaggattctcaccaccgcgaagtgctgatttggatggtaatgctgtttagtcaggcacatatgaacatccgactttcaaataagtgcctcacacttcacataccagacctcttggtcattctttctccccaacatttatgtggcaagtaagtttacatttggttccattcccttttggcttttgatagcaagttgctcctggagcttatacaattattatctttgctatgtgcaaagcagctgccaggaactggcaaagttcagtaaacctttcagctccctcggagtaattatcttagattccaggaatttcctcagaagagcatactttggagatgtcgacagagctttgctaccctcaagctgaggctcttcttgcacagtttcagccagtggagacagtggccttgtgcgttttgtagtatgttcactctatttgaggcctacatggaggaggggttggtaggagcacctttgttagtgcaaacttcagcaacgttgtggggtcctgattttactatcctagcacacgctgagtgccagtgaacatgcccagggtcatccactaaaacctgggccttggctccttggtgtcttcctctggacaccctagggccctagactgtcctctgttaattctc

SEQ ID NO: 537 - DNA, 4049 bp, Homo sapiens
aatttatcataagctatcgcagccagcagcaatttttccaacctggattccaccaggggagcttggccggtgtctgagtgccactttcagcttgagaagcaggtgactcagtgaaaagagcaaggaggagacagaggcagattcagttcctaggccctgggccacccacctgcaagtttgcagcccagtcagtgcaagtcagctaactgttctgaacctcagtttctctgtctgtaaattaagctaaaaattcttctttcaaagagtgtcaggatgaagtgagatcgtgtatgtagggcatttaacatagtgcccgacacacagggagcattcggtaggtgccagctctcctcctggcaggagagagagaaacaaggtgaaaagagtgaattaaagaagaggaaagtcaaatgggaaaacagggggaggagatagaaagtgtatgaaaaggaaagaatggtgcgcaataacggcggtgtaatgccaccaaaatcccctcaactacttctgggcagcacccttgacagagtgaatgcttttatgagaatgtaagcggaatgtgttcccagatttgcagtaatattgccacctggtggacaaacccatgcacctttgaattttccaaaatatttcgatgaactagcttccagtcctagatgtattttgaaagtgatttgtaaattgtaaggaactattcaaattctttcattaatgtcacaaatcaactgtgtcatctgtatgccacccactattctgggtgctggggacacaacagctcacaaatcaggcaaagtccctgctctcaccaaaatgatatcctacgggggattacagatacaaatacgtaaacagatccatcgggaggaaactctcagatggaaatgagagctatgaagataacacaacagtacatgacaatacagagtgactggaaccaggaacatttctccgaggaataaaatttgaagcgagccatgagagggtctacaggtagagttcccaggcagagtgaacagccaagcacaaagctgcaccaggagagagaggtgctcgccgagagacagggaggggagtgtggcaggtgagctcagagaggggcagggccacacacatcggccacatgggccttggtagtgagtcgagatttgatcccagggtttattggagtggataagtaagcaaggtgactgaggtgctcgggtttacatttttatagttcaagctggctgctgggtggaaaacggaagttggcagaccaaggacagaatcaggcagacccatgtggaagtttctctagtggtctaggtggtggcttgggtagcgtggcagtattggagctggagaaacgcagatggattggagatttgttttggagtgacgccattctgtcttgtcaatggattggcgaaaaaagaggcatcaaagatgagttacacatcattgaagtgagaactagggagatgccagtactttatttagtattttctcagcagctcaatccataaataatttttggaagacaacaagcagtttcacaaactacttataagtcctcaagttccaaggtaattaacgtgggtgtctcattgcctcagagaacacagcgcagcacggaaattctacaagacctgacggacaggaacatctccgacttcttggtaaaaacgtatcctgctcttataagaagcaggtaagaagaaatccttttatgctttttatcctggctccctgtagaagatattaactagggacagaagataattttctctctcaatttatgtatgatcagggcagtagatttttttcttttttatctgatttgagggccccattcaacataaaaagcaattgaggcacatacaagtaaaatgtaacttaagattaattctttttttgttgtttgtttgtttgtttttacatttagggcaagcagtcttaaattttaacccacgtattattaaaagttatatcagaagaccatagaagttattcaaaaatgcagccacatattttaactagttaaaagagagagtaaaaatttggagggaggtggaggagtataggggaaaaggtagaagaaaaagagaaaataagtaagtggcaaaaaagagaaaggaaaaagatagggtgggaaagaggcagcgggacagtgtctgagtccagcacacgccagggcgagccaggtcaactgcagctgtcatattctaactgtgaattatcatctttgatcactgccctttgagatgccaatgaacttttcaagaaatatctagttctcttggctctccagctgttcttatcagccccatccaggatggaacagctttggcagcccgtatcagaacaagcagcttgacaggggcatgccatgccaggagagaggatcctaaggaagcgtggtccagtccgcacaggctctggggctttaagataaaacctcctgtctaactttagtaggactttctgttgcttcacctgccagagccctgaacgagggataaattgacttaattaactagaacacactgcaaatggtgaaagcatttagcaaaacaaagaatgccatccaagccccaaaataaaagcagaataaatagaatgcaataaacagcaaccatcccaaactgagttctcagcagcaaatctccagtatgaaattttggattttgtgcgtgtgtgcttaaaggtggatgacaatgacagttcatgggattgagctctggggtccagagttggcatctgttcatttcccattttgtcattttacccttgattgactgaatgtcagtgccttaactttgggctgtggagtgagtcggaactcccccgaggtgtgcaggtggttgttagagtctcatttttgcagggtggaagacaggagggctgcagccttcattccacactgacatggtcattgccgtgtgttctgggtccagatcaggcatattgacctgacatatgacctgacaacaggaccactcagaaagtccagcatgcgggatatgatttggagagccagtgggggaaatcataggtcctttctctgcatgtgtattcaggcaatgtcccagggctgggcggcttccgcattgcttggatatcggaaaatgcaaaaatgcccctgaagactgagacttcagtcttcaaaatgaatgtttgggaaagaaagttaacggcactgctgtacttgtggtattcattgcattattttattttggctttcagcttaaagagcaaattctgggtcaatgaacagaggtaagaaactatttttatcagaattaaaatctcagattgattcattgttgaaataattgcacacttttaaaaggcacacctcacagccatgaggaggggctgttctgtaggtgctcaggaagtcacaagacacgtcctgaagaatatgtggctagggacatcccagactcagaagacactcagtggtgcctcttcttggaggacataagtgggggtggcattccctgatgtggcgtttcagagcattctcacccaaaaaaagcttctaaaacctccaagtatataacagtttataatactccaacaagagggccttgtagcctaaacccgggacactccttggcccattccttttaagcttcagggagtgtgggccagccccagactcaccccattcctgaggcatcctggaggttgaaatatttccagaggtttagaacctcaccaagtgggactctaggagcctgctgcctcccagcctccctcaggaactgcacctccagaacaggtgcggggctgacatgtatgtgctttcctgggcagattctagaccgtacacatgaaatctggctttcaggattgctctccagagggacctgtggggcctcggctgagacagagagtaggagtgaggcagtgattcaaggccctgagaaagagctcctcctctgcttggtataaccagctaattcattctgttctgttgactttggcttctgccctgcctttgaagggtttgaggccagggagtgatgcactcagactggtgtttccacacagtcacttcagac

SEQ ID NO: 538 - DNA, 4047 bp, Homo sapiens
cctccactcaaaaccctccagcatcaggacgtcaaggctgtgatactgtaccctgagctcttggccagggcgagggaggggaggccaagcctacctacatggtgtttcatttcctaaacgaacccttacttccacgcggtctgtccagcttagaaacttattttcagtagtgttggtccttggtccctggacaaaatgtaacagccaaagtcctagaaaaaggcaagccagttcctgccattttctttcacttctgcatttcctcactattatacgtgccttccattggagcaaaactgaatgccacgcatatgcacaggagctgtgcgcgctctgtctctctcactcactctttttctctctctctctttctctctcaatctctctgtctctatctatctcttactctttatctctcactctctcactctttctcactctttctctcaatctctttctcattctctctctatctttctctctctctctctttctcacacacacacactcacaaacccacactcttattcacatctgctcaccctagccactcaaacacaatccctcattcagcctggaataagtccagagggcgtgggcctgattcagagacaatcagttgttctcatctgggaaatggggcaatgtggtcatctctagggaccctccctgctctaacattctttgaatgtggtgggtcctgaggtggaagcactctgtccctgacttctagtatatgtggagatagggttacacaaatattttattgggcagaacttttataaaacaatttatcataagctatcgcagccagcagcaatttttccaacctggattccaccaggggagcttggccggtgtctgagtgccactttcagcttgagaagcaggtgactcagtgaaaagagcaaggaggagacagaggcagattcagttcctaggccctgggccacccacctgcaagtttgcagcccagtcagtgcaagtcagctaactgttctgaacctcagtttctctgtctgtaaattaagctaaaaattcttctttcaaagagtgtcaggatgaagtgagatcgtgtatgtagggcatttaacatagtgcccgacacacagggagcattcggtaggtgccagctctcctcctggcaggagagagagaaacaaggtgaaaagagtgaattaaagaagaggaaagtcaaatgggaaaacagggggaggagatagaaagtgtatgaaaaggaaagaatggtgcgcaataacggcggtgtaatgccaccaaaatcccctcaactacttctgggcagcacccttgacagagtgaatgcttttatgagaatgtaagcggaatgtgttcccagatttgcagtaatattgccacctggtggacaaacccatgcacctttgaattttccaaaatatttcgatgaactagcttccagtcctagatgtattttgaaagtgatttgtaaattgtaaggaactattcaaattctttcattaatgtcacaaatcaactgtgtcatctgtatgccacccactattctgggtgctggggacacaacagctcacaaatcaggcaaagtccctgctctcaccaaaatgatatcctacgggggattacagatacaaatacgtaaacagatccatcgggaggaaactctcagatggaaatgagagctatgaagataacacaacagtacatgacaatacagagtgactggaaccaggaacatttctccgaggaataaaatttgaagcgagccatgagagggtctacaggtagagttcccaggcagagtgaacagccaagcacaaagctgcaccaggagagagaggtgctcgccgagagacagggaggggagtgtggcaggtgagctcagagaggggcagggccacacacatcggccacatgggccttggtagtgagtcgagatttgatcccagggtttattggagtggataagtaagcaaggtgactgaggtgctcgggtttacatttttatagttcaagctggctgctgggtggaaaacggaagttggcagaccaaggacagaatcaggcagacccatgtggaagtttctctagtggtctaggtggtggcttgggtagcgtggcagtattggagctggagaaacgcagatggattggagatttgttttggagtgacgccattctgtcttgtcaatggattggcgaaaaaagaggcatcaaagatgagttacacatcattgaagtgagaactagggagatgccagtactttatttagtattttctcagcagctcaatccataaataatttttggaagacaacaagcagtttcacaaactacttataagtcctcaagttccaaggtaattaacgtgggtgtctcattgcctcagagaacacagcgcagcacggaaattctacaagacctgacggacaggaacatctccgacttcttggtaaaaacgtatcctgctcttataagaagcaggtaagaagaaatccttttatgctttttatcctggctccctgtagaagatattaactagggacagaagataattttctctctcaatttatgtatgatcagggcagtagatttttttcttttttatctgatttgagggccccattcaacataaaaagcaattgaggcacatacaagtaaaatgtaacttaagattaattctttttttgttgtttgtttgtttgtttttacatttagggcaagcagtcttaaattttaacccacgtattattaaaagttatatcagaagaccatagaagttattcaaaaatgcagccacatattttaactagttaaaagagagagtaaaaatttggagggaggtggaggagtataggggaaaaggtagaagaaaaagagaaaataagtaagtggcaaaaaagagaaaggaaaaagatagggtgggaaagaggcagcgggacagtgtctgagtccagcacacgccagggcgagccaggtcaactgcagctgtcatattctaactgtgaattatcatctttgatcactgccctttgagatgccaatgaacttttcaagaaatatctagttctcttggctctccagctgttcttatcagccccatccaggatggaacagctttggcagcccgtatcagaacaagcagcttgacaggggcatgccatgccaggagagaggatcctaaggaagcgtggtccagtccgcacaggctctggggctttaagataaaacctcctgtctaactttagtaggactttctgttgcttcacctgccagagccctgaacgagggataaattgacttaattaactagaacacactgcaaatggtgaaagcatttagcaaaacaaagaatgccatccaagccccaaaataaaagcagaataaatagaatgcaataaacagcaaccatcccaaactgagttctcagcagcaaatctccagtatgaaattttggattttgtgcgtgtgtgcttaaaggtggatgacaatgacagttcatgggattgagctctggggtccagagttggcatctgttcatttcccattttgtcattttacccttgattgactgaatgtcagtgccttaactttgggctgtggagtgagtcggaactcccccgaggtgtgcaggtggttgttagagtctcatttttgcagggtggaagacaggagggctgcagccttcattccacactgacatggtcattgccgtgtgttctgggtccagatcaggcatattgacctgacatatgacctgacaacaggaccactcagaaagtccagcatgcgggatatgatttggagagccagtgggggaaatcataggtcctttctctgcatgtgtattcaggcaatgtcccagggctgggcggcttccgcattgcttggatatcggaaaatgcaaaaatgcccctgaagactgagacttcagtcttcaaaatgaatgtttgggaaagaaagttaacggcactgctgtacttgtggtattcattgcattattttattttggctttcagcttaaagagcaaattctgggtcaatgaacagagg

SEQ ID NO: 539 - DNA, 4024 bp, Homo sapiens
gctggggctgccacccagccttcgcatcccaggcctggcacgtcataggtaaatgtagttgaaaggatgactgagctgatccaattccctttacaactgtccttgtcctgggggacttgaggagggttaagaaagcagctggggaccaaccaacagtcctctaggctctccatgtccagcaatagttgttcagcaaatgagcattaatcagtgactataaactgtagcttcaacataaccgacaacttgcaatggtttctagagcatgctcccatgtgttatctcatttaaatttccaaaccaatcctgtgaaatgttctttttttttttcttttttttttttttgagatagagttttgctctgtcacccaggctggaatacagcggctcgatcatagctcactgcagccttgacctcctgggcccaaggggtcctcccacctcagcctcccaagtagctgggactacaggcacacgccaccgtgcctggctaatttcttttctagttgtttgtagagacagggtctccctatgttgtacaggctgatctgaaactcctggggtcaatcaatcctcctggcttggcctcccaaagtgctgggattacaggcatgagccaccatgccttcattttacagataagaagtctgagaaaactcagatttaggcagattgagtcacttccccaaatttatgtatcttgtaagaatccatattcaaacctcagtcccctaactcttagttcattactttttctaccacttctcagtatcctctaagaattcagaaagaaccacatcgactctgatttttcatttgtttaagtacacaggtaataggtgaatgtattttgttgtttaaaaattcatataatacacaaaaggctaaagtctcgcttcccacttcctctcccctttctacccaactctgcctccccagggagagcttctgctgacagtcggtggacattctttcagagttttacaattatgtgtgtgtgtgtacataagatgtcagtttttctttgtgtaggatacatgaacatgaattttaaacataaatgtgagtgtattacacatattgaccagcaccttagtttttttgtttgtttgtttggttttctttgtgctgtttgagaaggagtcttgctctgtcacccaggctggagtgcagtcttgcaatctcggcttacgcaacctccacctcctgggttcaagtgattctcctgcctcagcctcccgagtagttgggattacaggtgcctgccaccatgcctggctaatttttgtatttttgtagagagggggtttcactatgtaggtcaagctggtctcaaactgctgacctcaaatgatccatccacctcagcctcccaaagtgctgagatgacaggcgtgagcctccgtgcccagccagttttgtttttttattaaccaagttacgtattttaaacttctccatgtcaatgcttttagagctattttgttctctttaatgttaatagagaattttaaggcaatttcaggtgaatctatacaatttctctgtataagtaatttacactagaaatagatttttataaagatgattaagctaccagcctggtatttcattgctgacttaaatgaagaggaaaatcaatgctgtaagggaaaaaaaaaatggcattagagatccagaccttataggcattttccaaattattaattcaatctctcaaaacaggtggcgctcagcagaaaagagaaaacgtcaacccccgacacccctgcttgggtcccagagagaaggctggacagacaccccaggactccaatgtctgctccccaggggcgccggctgctcacccagagggccagcctcccccagagccagagtgcccaggcccgcagctcaacacggggacacagctggtcctccagcatgtgcaggcgctgctggtcaagagattccaacacaccatccgcagccacaaggacttcctggcgcaggtactattgtcggtcggtgtttagctgagctcagtggctcctctcccagccttcccctcctctcctgagtgttccttcaggcatgggttataactcagcaaggagcaccctctttagattctgctggttttgtttcctgctttccaaacccttatcttgattcttggtaacatgaatcttctttgtaagttggacctcccctagcaaagaaaatagaataatagtgaaaatgttaatattgtttttatttttacagtgagggataaagtcatgttttcattcatttttgcagtgaccctacatatcaaaatcattgccctcttttttcttttaatgttgtttaatttagaaaaagaagctctggtttaaagaacagtgagtcacgtgacttgctctttgaaatgccctttgaagtctggctgaacactgggctgcattcagattcttcagtggccaccagaacattctgttttcttctgcacatcttacctttgcacaccctgcttattatgttcccccagaagcccaaccctctccaccaggggctgattaggaggctgcaggataaatgtttaaaagaatgaagatgtgtgtgcacgcgcacgtgtgacatctccatgccacagtcatgtttattccacgtctattctcccacagatcgtgctcccggctacctttgtgtttttggctctgatgctttctattgttatccctccttttggcgaataccccgctttgacccttcacccctggatatatgggcagcagtacaccttcttcaggtgcgcggactcggggtcaccattctcctctgtgggtttggggcacctgggtcacatgctgcttagaagggccctgaccttcccacttcactgggaccttcaccaatgagagaggggaggggtctttgggctgcctgcagaaaggaacttaatgtatctgccactgcttggaaaggcgatcctagtggacaggcaggactgcttgggaaggccgaatggggaaaggaatgcaaagcttaggtgaatgggttgaagcgccatctttttgaggcataggtgacatgccatcagaccactgcgagtgttcaggcagcctaccgcactcccaggagagctagcgccatcccaaggcagcattcggtgcctccaatacatacctggcacacagcagctatccagtaaaggctctgagttgcatgatgttggcacgcgcctgctctgtcccagtcacatgtctcactctgtctagcatggatgaaccaggcagtgagcagttcacggtacttgcagacgtcctcctgaataagccaggctttggcaaccgctgcctgaaggaagggtggcttccgtaagtgcctacgcgcccctgtcctaagaagactagctcccctgggaggacccaacggtgggttcaagatggcaggcgttggggaggccccactcaatcctgctctgctggtcacttccatgtctctgaccagcactcccccaacctctccttccacacttgtgtgcagggacattcactacctcctaggaagcccccacaccactggacagctctatatttctcagcatagaagttctatgttgagttgacagatgattccccataacttatttgaaaggcctctgagcagggagggagggaaatagggttatgctattgtgtgattgggccttgaatggcgtgagtgacacagtggccagtactttgtgatagttgtgagtctggagaagggagttagcgaaggccattgacatccaccaggaatcctaaaagttcaatataattttaacttttctccctcagtctttttcaaagctgtcaataaggaccaaaacagactaatttcaaattcctcttctggttgctgtgtctctcaacagctagagctgctaggaataaaaagggagacaaaacgatccacaagctagagatggttattccccagccccacacctagtcagtcacaaaaccctagttttgatattgcttgagcagaaaccagcctccaagagaataagaag

SEQ ID NO: 540 - DNA, 4026 bp, Homo sapiens
gttgcctcttgtttctcacaccttgagtctttccccccatctcaacagtccatggtggtgatcaagtcatggccactgtcatcatgtgcatggaagctatagagtcctcctatttcctttctcttttcttttctttttttttttttttttttttgagatagtaaccattacccatgctggagggcagtggtgcgatcttggctcactgcaacctccgcctcccaggatcaagcgattctcccacctcagcctcccaagtaggtgggactacaggtgcataccaccatgcccagctaatttttgtattttttttttttttttttttttttagtacagacagggtttcaccatgttggccaggctggtctcgaactcctgacctcaggtgatctgcccgcctcagcttcccaaagtgctgggattacaggcgtgagcgaccgcaccaggccgagtcctgctattttcaaggaacattccttttcctaccaatcattaggcaggcttcaacatcagctgatgagggttagtggtcgttctggagaaagtgaaaaaagaatcagtctctagaggggcttgtggagtaaccgcctggtaacagaaggtcagggcagggaaggcaaaggggctctgcgcggatctctcagctccgcaggcgccccactctcctccaagggacccgagcgccatctgctgagaggagaacacggcccgccatggtttcccaaggagcagcagacacggacctcgcagggggcagcgaacccacgtgacacagtcttcaagtcctttggagagccccaggaaggaacaacagcgtgtacaccctgtgatggaatgttctctagggcggttcagtgtgaatggaatgtggggccggtgccattctaattggttctgtttccctctagtggttgatcgcggagatttcggcttctccatcaggacaagttcagatagcctgagatggtatcagaactcagggacagagctgggtgtggcggccctgcatccatctgctttctctccatgctaactgatatggtcagagagctggaagcaaattccaggaccccagggctccgcaaaggcaaacacattacttcatcggctgctgacatgcaacttcccccaggggttaaaacaatgtttaatactaacagtaataatatttttgagttttactttatgctggcgctgttctaatgttgtaagtgtattaactcatttaagccttacaacaacctaaggacatgggagtcatagttcccatttaaaaaaaaaaaaaaaaaaagcccaccattgctctgaggctttttatgttttggatccaaagctaatattggtggtggtaattcccatgcctggcttcgatcaattaatcagcaaatgcctaggactgcttagggttctggccttcatcaagaccttacccgggctttatgatgatgacacctggcttttcaatagccatgactgctcacccaggaggcaacgcctcgagtcatgcaccgaacaccttttattgatcctctccaacaccaggctccgtgatggctgagctggggacacctgtgactgcacgtgaacattttgaggctgggaatcccaaaggccctcggcgttggcctgggagcaccatgaaacaagtagaagcagagaaggatggcagaggtggccctctgcattagggcctggatgtatacactggtgctaagggggccccacagctaataggggtttgagtttgactgacagccccaggcaggaatctgtgagagttctcactgaacctggtgtgggggtggccctcctaaggcatgttgctaaaggccatctcttctgccactgacgcctgtgttctgcaggtccatcctgacgggtctgttgccaccaacctctgggactgtgctcgttgggggaagggacattgaaaccagcctggatgcagtccggcagagccttggcatgtgtccacagcacaacatcctgttccaccagtaagcgacacaggaactgagaccgccccatcccctctcctcacctctgcccccagcacacttctctagagcccagctcaggggtgccaggcctgggcacaggcagagatacagactcttatttggtttcccctatgtttaaagtcctttgtcctacttgcagtgagaattgtccctgagaatatgggactctgcctctgctgctcagagctgagggctcctccctcagaagggtgaggctgccttcgctctgacagagcagctgatcgatccccgagccccttgtgcagccctgaagtacttcctctctgggaccaaagacaggagaaccattgttcctttttcctgttgaagccacggcctgaaaggcaaacttttcagggggcttttcagttactttttttccccaataagatatcttttatttcttatctaagaagctacgcatagtcattgtgaaagaaaaaaaaggaagggaggaaggaagggaggaaggaaggaaggaaggaaggaaggaaagaagggagggagggaggggagaaggaagcgagggagggagggaggggagaaggaagggaacaggagggaggaaaagggaaggggaaggaggaaggaaagggaaggagggaggaagtaaatataggtaaacaaaaaattgaaaataaaagtcacctgtaatttcactactcagagataaccgctgagttataacattggtatataattttttagaactttctcctatacatgtatagatagataaacacatatacttcaaaatgataaagaatagtaaaactatgcatacaattttataacctgacttttttttcaaaaaaaaggattgcttttttaaacataagatatcaggaacatctttcatgtcattacatattcttctataaaataatatttaatgtttacagattattccattgtatgcatgaactatgtaagccatcctcttattagatatttaagcagggtctgctatttttgtattgtatcataaacaccaccacagtgagcatcttgattgccaaatcaagaatacttgtcctcaattatttctgtaagatcagctgctggaagtggaagtgctaagccactgcttttctcgttgtcccatcctcctagcctcacggtggctgagcacatgctgttctatgcccagctgaaaggaaagtcccaggaggaggcccagctggagatggaagccatgttggaggacacaggcctccaccacaagcggaatgaagaggctcaggacctatcaggtgctcagagctggatggagacagggccacagatggcaaatccatggctccccagtgcacccaggaggcaggggaggcttggagcaggagagcttctaagggtgggaacacctctgtgaagttacaccaaaaatctaagagcagcccccagatcattttccctgcagagcactgtctcacagcagcctgggttttatttgtcctgagattgatgtgcttgaacagtcttcaaagggtctgatccgaggaggtgagggttgccctttctgcatttacaaagcctgaacagtattagggctttgaacgctataaacatctaagaggcagcaccaaaccactgctgggttaaggtacccccacaatgccacttgccctgggcctttctcttcctcaccctccacagccccttaactctcccgtccttcttgtgcctccaggtggcatgcagagaaagctgtcggttgccattgcctttgtgggagatgccaaggtggtgattctggacgaacccacctctggggtggacccttactcgagacgctcaatctgggatctgctcctgaagtatcgctcaggtaacagctgctgctcagtctcctgggctgggctctcactgcagccctagctgtggtccccactctctcacctgccattttgtagctgagtacaggaaccacaatgactacactcagaagggggtttatcagtgacttggtgaatctaagttccagctaaagcctcctgaggttttt

SEQ ID NO: 541 - DNA, 4042 bp, Homo sapiens
gcccttggatgcctggtgacagtggtttcctcctgcccctgccttcctctctggcagactgactggcccttctgctcctcttccccttccaggatgtcctgatatctttttaaaccaaatgccaagtttgccaaaaagtgtctgtttgtgtgtgtgtgtgtgtgtgtgttcaatgcgtgtgtttataccacacttcacaatttgtccaggcttgtattaataccatcaccaggctcaaccctggtgttaattccaagatacttaaatgcccatctaggtgaatttctcaggtaaaccatatattcaagctgtagtttaagctggctgcccgtcatagcactttgaatagactttgtttttgtttttgttttttgagacagagtctcactctgtcggccaggctggagtgcagtggcactatctcggctcactgcaacctccgcctcccgggttcaagcgattctcctgcctcagcctcctaagtagctgggattacaggtgagcgccaccccacccggctaatttttgtatttttagtagatacggggtttcaccatgttggtcagactggtctcgaactcctgacctcatgatacgcctacattggcctcccaaagtgctgggattacaggcgtgagccaccacatccggcccctgaatagacttttactcaaggttcaccatgactttcacatgttttgtattggagtaaaatgtgccagtggtgggctaaagaaaattaactcatttcaaattcaaacctggttttcttaatttttttaaaatcacagtttctgaaactgtgggctcctcatggcacattgagaggaggaggtgaaactctccaagtctgaagctcctgttataaatcttcctctggcaaagattgtgtgatcaggcttgagtacctcacagtcctagagcaggtcaaaggctggctaggaaactcatttgctccctgtacctctcccctcctttcctgcctttgctcgttctcagctcccggtggtagagtaacactggcttctgattggtgcagggtgttcaaccagagaagaaagagccctggaaaagaccgagcccctaacagaggaaacggaggatccagagcacccagaaggaatacacggtaaaaccccgataaagaatacacagcagaggcgaggaaaaggctctaagcactgcagagggccagagcaaaacatctcatggcaagggtggaaagaagcctaggaaactgactctctctgtggacaagtgttaaaccagatcccttctcagaggtccatctgcatgtgtgtggaatgaatggttcagcccagacattagcgcatatttcctggagaaagcaaataccaactatgtagtgtgcctgtgcccttgttaggcaaatcccaagtgagttgcacaaatgtgctgacttccgaggatttagcaagaacaataactttggtcactgggacttaaagcggatatgagctataaggaaagacaaaaataaatgcttctgtgtccagggggaaagagactccaggggagctgactacacttcacttacggcttacaaatctagaaggccattcattgaaaccatcagaagcctttcctgacagtggaagttacctaataatccctaaactgacgacccagatttacaagttttgttttcctggcttttgctgccctcatcttctctcttaaactagttctgtatttctcccaaggcttttcattccctaagcatacgcatttctctgtggccaaaatgctctgggtttagacaggcagcacagcccctgggctctgcctgacagggcaggagagggtctggcctttatccctccagcccaccccaggggccatttcataaaactaaagccagagacctgcagcccctcccagagttagactgcagtacaccatgcctctggcaagatcctcctcccacagtggaaagtctaagccaaatcaggaggctggggactggttccacctcagttgcaggcaaggccaggaggcacggatagaagaaacagtggactttttccccctagggaaagaaatgcttagagctacagtattaagatgacaaattaagctgtgccatatagggtgaaatgaagcagggatagatgggaggtcagggagaagtgagagcactcggtgagggtctgcactggagggggcatgggaggaagaaggaggggagtggggtttgagggatggtgatgaggaagcgtggactgccctacccacctattggaaaacctgggagttctgaggagcaagaagccttagtcaaagtcaactcaaagattcaagccaaggtgactaagagaatggcggtccagaaaaggtcatgggagaatctgaaggcagatgttgttttgggaagatgaagaacctaagccgcttccagaaattcatgaggaaatgccccgtggactgttggcaatgagggcctaggaccaaggttgagcttggggccaactctccctatagacagtgagtgcattctgacaagcatgggctctgggttcaaatcccaactctgccactcatgcctatgtgtccttaataggacgcttgatgtctctgtgtctaaggtttcctggactatggaaatgagcctaataaatgtctaccccttaggaccattgtaagagtacattgaggtaatttgtgtaaagcagtcgaagcagtgcctggcatataggaggtgctgtataaacgtttgatgctagtattactattattattctggagtcttccttgcaacggtgatagccgaagccacaggggcaggtgacgttataggcagaatacaagggcctggagacagagccctggggccatgtaattaggcattatgtttacatcatgttcattttttttcctccaagactccttctttgaacgtgagcatccagggtgggttcctggggtatgcgtgaagaatctggtaaagatttttgagccctgtggccggccagctgtggaccgtctgaacatcaccttctacgagaaccagatcaccgcattcctgggccacaatggagctgggaaaaccaccaccttgtgagtcttccagcagagaagctggctgccatgctagcctgtcatttcctggcttagtctttccctatcagcggctgtctactctttcccacaaattttagtgacaaatatttgcggccccaaaaatgtgtaaaagctttctgcagtattcaaagatcactaatatgtattctcttgatggggaggtagaatacgtttattgccccttttgtgtgccggggaagtggacattcattcagagagttgaagtgactttcctgaagccaccaagttgtcatggctcagcgggggcaaaagccaggcaccacagttgcctcttgtttctcacaccttgagtctttccccccatctcaacagtccatggtggtgatcaagtcatggccactgtcatcatgtgcatggaagctatagagtcctcctatttcctttctcttttcttttctttttttttttttttttttttgagatagtaaccattacccatgctggagggcagtggtgcgatcttggctcactgcaacctccgcctcccaggatcaagcgattctcccacctcagcctcccaagtaggtgggactacaggtgcataccaccatgcccagctaatttttgtattttttttttttttttttttttttagtacagacagggtttcaccatgttggccaggctggtctcgaactcctgacctcaggtgatctgcccgcctcagcttcccaaagtgctgggattacaggcgtgagcgaccgcaccaggccgagtcctgctattttcaaggaacattccttttcctaccaatcattaggcaggcttcaacatcagctgatgagggttagtggtcgttctggagaaagtgaaaaaagaatcagtctctagaggggcttgtggagtaaccgcctggtaacagaaggtcagggcagggaaggcaaaggggctctgcgcggatctctcagctccgcaggcg

SEQ ID NO: 542 - DNA, 4042 bp, Homo sapiens
ttcctttccctccatctgggctttgttctcaacacattcattcaacaaacatttattctgcctctaccaggtacagagcactctactattctgcttctctccttttgctttagtttcatgatcatcctgaaccgctgtttccctatcttcatggtgctggcatggatctactctgtctccatgactgtgaagagcatcgtcttggagaaggagttgcgactgaaggagaccttgaaaaatcagggtgtctccaatgcagtgatttggtgtacctggttcctggacagcttctccatcatgtcgatgagcatcttcctcctgacgatattcatcatggtaagccaaatggagaaggcccagaaaatcttgaatactttggttcctttcccctttcctcctgttcatgtgcctggattagtcatgtggccaccaaggagagcgtgacatctagcttcccagcccttccttttagccaacgtgggagacactcaaagagacgaaatctcctgaaggagccactgtatcacagcatcctcccatctcccacttcctgcccaggggtccatggtccacacagacttcccagtcccattccgtgaccatctggagaagctgctattagcagagccctgcacagggtgatagtgtaattaaagtggtcttctctttccaaacacagaaaaaatcagttcagggagtgttttcctgggcttacaattttaactactggctagagttgaaatggggaaagccttttgccttttcagtagcagtaggggaggagatctggattatttacttatcatcatcatggtcacctcctacatggcttcaccaaaaaacattctgctgcctgaaaaagctccaacacctctctctcttttaaaggatggaatttggagtccatccttcctcagtgataaggagtttttatagccacaggcagcatctattggtctgtcctctgcaaacttgcaactcctctgagagctagacttggaaatgaaacattattttgcaatgcgctgctatccttcatttttagctcctccaccgtagatgatagtttgtacttgttaaatgataaggatataaatttaggtcattttttatattttattgggtggaatttggtataatttttagacttcaggctttacaggctcctgagatggactgattgagcttgttctacttcttccccatcatgataggaagtgctgtaccacactaggcagtgtgtgtagtgaccacagactggctgagtgtctcccatcccatgctggcccatatctggtacccacctgatccacaaatgttccatcagatcctgttcaaacaacacatctccagttaagccaaatcttgccctttctccttacggtaaaatgtactaaatctgaaggttttgtctttttaatgttgctccatgatccagtgatctgtggccttggttatgctctgtgctagagtcctaacaagacaaatgctaaggtagaggtcattctgctcaaacaacctgaccccacctggatgtgggcttacatttgcaaagggcaccaaagttctaagagatgaggggaggagctgagccccttgtccttatctaggtttcccttgttctttcccatccctcagtctgcttcttttcccagtaccaacatgtttgtgtcctcagaattaaaggagtaaaaatgtgtaaacatctgactagcaacagccatgagattttgcctggcttgttgataagcagcattgagatctgccctcctaagaatgggccattaggtcttcaaagcttttacgatgtgaggtaaagaatgttcaccaggagtttcatgcacaaaagggtttctctttgtgggaactagaacattgttccagtgatgacggaaacagggctttccataccaaaacagggttttcctttgaatgactctcccacctttcccttgtctcttcctccccacctcaacaacacaggaaagaagctggaagcagggacaatgggaaggtccctttgttactcgagctattagaaacaaaaagaaaagtggccatctgaggaagccacagctggtgaaactgtagggtcacagagtgaattacacctctggcttaagtcagtgaaaagtcctagaagtttgtggtcctagaagtcctaaaagtttatgggactttgttttgagcaaggataagaaattgatttcaggctgggcgtggtggctcacgcctgtaaccctaatactttgggagacagaggcaggtggatcacttcaggtcaggagttccagagcagtctggccaacatggcgaaaccctgcctctcctaaaaatacaaaaattagccaggtgcggtggcacatgcctgtagtcccggctactcaggagactgagcaaggagaatcccttgaacccaggaggtggaggtctcagtgagctgatatcatatcactgcactctagcctgggcaacagagcaagactctgtctaaaaaaataaataaataaaaaagaaattgatttcattcttctgagaactgcaacaactaccttaaagtgattccatccaaaacccacatgttcagccatggacttgcttttatggagctgcgtgtgggtgacacacaaaatcaggagctctgagtcctaatttagacttttatttagatttcctcaaatttgggttccagttaagcgtgggtctcttctgtgccccgctcccctttgccatttgttttatctgttcttcagtctgttctgtcagtacccacaggcaggagagcagaaaggagaaatggcagccacagcagacaaatggcacattcgttccactcagctctcgcatgcccatcacagatacagctcattggtctcttttctatgagaggaagccagagctccagggaactactgccaactgatcagaactcatttaggacatggacctatttgttcctttatgttcctgggaagagcacaggatgaattctatgtactcatttacgtgttcagagagtaaagtgcctcataggatgcctccagcaaaagataaccaagaaggtctaatacctttgacaatctcagtttatcctatagtgtaattggatagcagttcccctagcaaaagttgctagtttggtcctattttctacatagccaaagtgattgattcattggttaatgtgaaagttactgagtactgccagcaggttctaggaaatatatttgtgtgatattcatggatggggaggatcaatccacttccaagtgatttggattaattactggtattttcacctgtgtgggtagcaaacctcagaaaatcaagtatagatgacggcataggacaggccaggccccaggcaaaatgttgaagctcctctggagttccctcccatctccctcttttgttttccatatacctggtttatccagggccctggagatgctccaagaccccctacccaggtcttcctcccttgtcccagctatatttctccatattaccactcttctcaccgaggatttgcttacttaacacataataaatactattaaaagagaaacttaggcacattaaaatgttagagttgattccagcaaacagtgattcacaggaggctccagatcacaagtggttcagggccccactgaggggtagggaagcaagacaaagaaaaacaaagcaaatatttgattggttcaagtggaaagtccctgattacaggttagtgggcagtttgtgattagttaagtttctctaagttgggttttggtttgctgatgtaggaacacagaatgctggggccgtttcaacctaatggtctcccaattaatttttttaacattactgatgactgttaggagtctaatgtgctactcctcccagggaaaatggcattcctaggattaaaggaactcagcacatggagtgtgcgtagaaatttagacactaactgcaggctggtgggagagagccctttagggcagaatgagaaggcgtccggccaagggcaggagttactgacgcatggcctctt

SEQ ID NO: 543 - DNA, 4045 bp, Homo sapiens
gtagcaaaaattcacgttttattaatttctcctagtttatcatgtgattctagggtaggatgcagagttatattcaaaatacacaaatcaactcaactcagtaaacatatatcgaggccctatcatgacaaaatgctattctagagaccacggcgaacaagccacggccccagcctcaaagaatgtactatctttggaactgtgctggccaatacagtaaccagcagccacgcagggctatttaaatttaaattaattaaaagtaaaaacacaatgcctcagatgcattagccacattttaagtgttcaatagatatttgtggctcctgcctgccatattggacagggcagatatagaacaattccatcactgcagaaagttctactgaacaatgctgctctggagcagaagatcttcttgttcagggatgttacacccccgcttgtggctagagtgtggcttatcctcagagcaaggataggggaaccatggcactctgcaggctcagcactgaagacacggatgcaggctctgcttctgacctagattgaccttgggcaaggccctttgctcctctgatcccaatttcttcaccagccaagtaagaacatcagaccacaagccctctagggctctgtccaaatgccccatgactgagtgaactggtagaacattctatgtgtgtgtcacaacatgaagagcaaagactttcatctccccaaataattttgtttttcgttttaggaattaaatttcagattcactctaattgccaatactaaaattctctatatgcagttctaaacttgacaaaccaataaaaaaagattatttgactacttatctttgtacaacattgaggtctccctaaagcaaatttaaatgcatattttaaaaatgtattctagcagttcagttcagaagccccctggcccaagcatcacactgtcaatcctttgtcctcaagcagcatggttgggtgggttaagtactgacaaacactgggtgtcaggcccatggtcagggactgtgctaacagtctacatattagatgccacctacccccaccctcaacagacccaaactatttatccaatagcaaaccttgcattatttctgtccagaagaaacaaacatttattgacaacttttggtgtgtgacctgtttaagtcctacatctcatttaaggactggtcaatgttaggctaggcaatgcctgtttgtgagagaatcactgcctaaagaaaattctccatttcccttagctctatggtgggtgactacacatactggtatttcttaaagaaataccaattccatttccttttaacataattattaatatctcattagcatggtgtcactgaagcctgggcccaaagaaataccaattccatatcattttaagatcattattaatatctcatcagcgtggtgtcacttaagcctgggccctttagaatttttcatgtacctgtgttcctctgcccatatcagctggaacactaatagttttcttcctttttatctagaagactgagaacattacatgggacctgcccccagggcatggaggctgaggtgggacagtttagttcaggaggcccaagaagtgttgggtgtgcagccccttgttcaaacacagcctctgaatcgccagaggcttccggtgcatactctgaggcgcaggtgggactcgggagtgagaggtttcggcgaatgaattgggattgcctacttcttcccagtgcagtggagcttggttctgtggtcaggtccttacgccctgtctgcctttctcgtttctttatttctcgggtagtagttgtggaatcaaatgacctggggtttgatacctactctaccacgcctctgggggagtcactcagactcgttgaacctaagttccggggctgccaagtgaggataagtagtaattgctgatccacctacttgacaagatagtagtgagggccctgagcgccaggctgtggatccagcctttcccacggttcctggtgtggcaggaagaactctaggcctgaaggtgaaattggggagggagtcccagctctgccactgtctctctgggtgacctcaggcaggtctcctcaaaaaaataagatactttataaagctcagtttcctcttcagtaaaatgaggattccaggtaactcacagatagtttgtggggatgaatctgttccttaaagcctgcagtacatcaataacccagtcttcctgcttgctttcccccctctccactaccagtgatcatagtctgatcccataggtgatatcccagctcaaaaccctacattagcttctgtggctgtttaaggcctgcccagaactcccctggtcttagcactgaaagcacgtgtccggggaagccctgcattggtcgttcatactactgagtcccgcagggcaaaccgtccggtcccaccctcctttctagtgctgctgtcacactcacctcccttcaccctacactcccttctgtgccttgcaattacctagggagttttttacaagatatggatgccctggccctgccactagagattctgatttaattgcttggggtagggcctggcataggtatcttttaaagctccgcagtggttctaaagcacagccacagatgggaaccactgatctattcttgtaggtccccagatacctcatgtgctgttccctgtgcctgagctgacctttcccccactttcctctcctcggctaattcctgcttatcctcctactcaggaggctcttcctccaggcagccttccctgatccctccaggaagacttagctgcgtccctccgctgggcttccccaatacactgggcttgctttcattagaacctgatccttccacattatggttgttggtttgctccaatcctctccctcattagctctcaactttctttcaggaagagatgtttatctttccttcttgtattcctagagtcgaccaggctctggcacattgcagattctcagtatgcattcagggaacaacttaatcaagacaagaccatctgacttcttgtgagttacatgctaagaaagaaatgtcgacaccaatagccctcacaatgataggaacaggaggttaaagaaaaggaaatagatgcaaatagcaatataagtgctttaacaaatctatacaggaggacaaccatcatattcaaattttcaaacattcttagttctgctcttttgtgggtaatggtttttttttttcctcttccaggagaagaaaagaggcatattatagaaattcctcctcccccagcattacttgtcacagaattgtaattggaagtgatttccctgactaagttattttggctgtctgttattttctctcttcctccttgctcttccctcagctggccatcctgtgtgtttggagagagccagaaaggttcaaggctaggaatgtttctctctctctttaaagctctttaatcgtcaggctttctgatcttcaaagcaggctgtagccagtgtgaccccactccctcgcctccccatgctggagagtaaaagcctggagtatttttgtcattttgaagacttgcatatttggacagccttggacatctggaaagtgtggtcctcactagctctgcagggataagagcacgtcagcacttccaagctctctggcgcccctacatctggacacgttgaaaaattaacaccagactctggagttaagcaaacattaagtttataggcctccttgcatttgaccatttcctgggacagcagcccttatcctgtgactttctgtgtgtagagttgagtctttgcagttggtcctcctcacactctctcaactttgtgactctctgcagtgcttggtcctggataagtttgaaagctacaatgatgaaactcagctcacccaacgtgccctctctctactggaggaaaacatgttctgggccggagtggtattccctgacatgtatccctggaccagctctctaccaccccacgtgaagtataagatccgaatgga

SEQ ID NO: 544 - DNA, 4041 bp, Homo sapiens
cctcagcatcactgacacttggggctagataatcctttgtgtgggggagggaggagtgtcttgggccttgcaggatgtttagcagcatctctggcctctacccaccagcacctccccagttgtgacacccagaaatgtctttagatcttgccaaatatttccaggaggatgaaattcccctgtttcagttccccagccccacctcaatgagaagcactgtcctagaccaaccccacaaagcatctgacacccccatccagccctggctaactttttccaccttcttactaaattgggcccagctgcttcagcagtcaatgtgttgggggcagcccactggcaagagcctcacctctaggggctcccagagaccccaagaacagaaccttcctctgagagttgagttacaagtgtttccaatcgactctggctgttttcctttttttgacccatttccccttcaacaccctgttctttctcttattcatatgtaggaagaggaatacgaataagggatatcttgaaagatgaagaaacactgacactatttctcattaaaaacatcggcctgtctgactcagtggtctaccttctgatcaactctcaagtccgtccagagcaggtagggggatgtcactggccagtggtccctggaggggagggaagcacccagcctgagaaaggcaagaaatatattggcttttttcttctttcttccttgtgttcacattcagaatccatcacttaatgccttgtatttagaaaaaaaccgggggatcacttgagatcgtgatcattttcaacataggattcgaagctgtacacatcctggtgaccttaaaacatctcaggtttttataactggaaggaaccttagagatcatggggcacaaccttctctttatagatgaggaaacagaaatctattcatttattactcaaatatttagggacagttgtaggtactagaacacagtgtgaaccagacaggcaaaaccccaggccagggagcttccattccagtggggccacaggcgatgctcaggtaagcagagactccgctgtgtgacttctggctgtgatgggtgctgcaaggaaaatccggtagagtcgagggttagagagggacggaggggcaggtttaagggggatgctcaggaaggccttcctgaggaggtggtatttgagcagagttgtctgtcagccacacagtaagtgagaggggagttccgggcttggaagctgccagcacagtgctggcaagtgctggggtggcgtcccgaggctacagaacctgagatgctgcagaagagcccacttctgctttcctggaccacttccttctcagcaccaggcaaactccttcttctatcccctggcacatttctgacctgtgtatacgcccccaatttatctaacccctttaaataatctcctctatttatgcagagcattcttaccactaactcacgacttgcacatcccttagctcccttactcctcacaacaatcctgagatgggtcagagaaggaggcttgcgcgtctggtgatggggtgatttgtgcacagttacagggctagaaattgtcagagccagatggaatccaggtcctctcaatcctaatccagtgtttcttacttcagtcctgtggctctcaaagcccagagaccagcagcatcagcgatgcctgggagcttgttaggaatgcaaattatcagggcccactccaggtgaactgggtccaaagccctgggataaggcctagcaatctgtgcttcacaagccctccaggtgattccgcaggctcaggtgtgagagctgcagctgtcctctgggccttctgggctccccgcccagcttcttcagtgtgatgaacacagcgagaatgctagatctgcagcagctgatatcccagacaccctcccgactccctcctggctgggtctgatcctcctccagactccaggagagaacgagacataaacagaacttcagagcctgtgttaaccctgagatcaaggtctgcacagggtgctgtctgagtccagaggagtgagggaccccaccccacctggtcagcaccagctcctggaagcaggttctcacactggttccctgcacaatgaaggagctcatacctgcttttctggcttctcagaccctgaggttttcaccgaaactagacaaggggaacctagggtcagcctggaggcagggtgagcttggcgcctgcagtgcccaggccctgggtggtgcggctccggccaggccctgtttagcttcctctcccacccccacagagggggtgctgtcggcaccgattgctcattttcccctttgctttctcttcagctcgtaaaactcaagtcctgacaatgccttgatgacttccagttggtaataaaagggagatgaagataaggacaggaatttcggggaaatttctttccagttccttactaatgtgacatttagatctctagtactgtgcttctggcatcagtgccaaggcctttcatgttggagaatggaggccggggtcaccaggttgtgcctttatttcatgttgctggctctgatgagctgatgctctgctgattagcaaacgctgagccatctgcgcttcgcagaggcacgttccagccaacccggccctccctgcccacttcccaggatgctttgccttgtgggctcacctgtcttctagctcctgatctgtatctccacctccatccagttccggggctccttatcagcactgttcccagaactgtccatcacgatggcaacgttctctctgggcgctgtccaacatgggagctcgcctctgtgttgtcactcatgctcattgaacatggatttgtgtcctttaccatcaggactggatacccctcctggtcctttctgcctggggtcttagcacagctcagaaggaacctcaccattccctctctccatctagggaattagaagatgacaggggcacagttctctggctcacccccagcccagtaaactcctggacatgcttcaaggcccagctcagatgttgcctcctcagtgaaataatttataaacccacccttctttgtcctgccttctccctcttccctactcactggagagttaacaggtgatggttaagctctgggttcaaatctcacaaggccacacacttagctatgtgacttcaggcaagttaattaaccactctgtgcctctcgtttcctcatttgtaaaatggaaatagtaaaagtgcctaccagcatggcagttgaagttaaaagaaataatatatgtgaacacttggaagggcgcctgacacatagtaaactctcagtaaatactagctgcttttagtggctattcttaacacaccctcttcagtgctctggtttcactatgttttatgggtccctgagatcgaaagtgtccacaccgactcatggtcagctgtaacctgtgcctcgtgtggggaccaggctgccatgtgtagtctggacagtgtaggaggtggcagagctcaggcctgttctgccctccagcccagagagccacgtcgttagatgtcatgggagactgtggtgccccgggaatctcacgaatttgcccacggtactcagtgtctgtccaatgctatgggagtccaggactctaggagccagttaaggtgctgggtggccacaggtccctggccaaggtccaggcctctcccctgccacctgatcctcgagaggccatcacgagggttgtacttcaagaaccactatccttgagctacctaggagctgcagaatgtgcactctgcagggcttagggcctgcagacaagatagatgcagggtgtctagttaaattcgaacttcagataaacaacaaataattttttcaaataattgtgttctattcggtccctatttgggacatatttgtactaaaaagtattcatttatctgaaattcagattcgactgggcatctggtgcttttgtttgctaaatccaagagcaaatttgttctagctacttctcaaccccacct

SEQ ID NO: 545 - DNA, 4077 bp, Homo sapiens
taaaaagttacagctacataatcaccacctgtccctaaatagtttttgctttttctttcttcaatgcacgatcattttcccccatcaatttattttttagtttcttataatcttgttgccagtaggctgttttttaaaaagcagaacatggtttgttcttactagcaggaaaggagcatttattgagcctctgctatggtgtcttttattttgctgagagcctatttacatttctttgagaggaaaacaacaaagggttacatgaaagaccatgtgaatagcccctagctgatctattaaacttgctattccccggccagctgcttcagatctccttcagatcttatgtgtttccttcctaaggtccctggagtaagggttgcatagacctattctactctccaactcacatgtccctctccctcttcctctccataattccacatctccaacccccacccctatgtgcaatgccacagggtgtggactgccacagccactggatctgcttttggaatcaagagtccttaagctccaaatggaaccgaaatttaaataccaactttcaaccatatgttaacatcagcagcctcttccaatgtaaaaacccatggcagtgtgccctgctttgtttctttaagcaatagaaacttgaaggaagcatgttggtaggccagatttttgttggctttgcaatggatcacagtcatttattcactcattcattcactgattcattaaatgaccacatttgcaagggcaaggtaatggggagggccagaaaggacactggccccagaaacaggaggctggattttggttctgatgctgccactgctgatgtgacactgcacaggtcacctgcctcctctgagcctctttccttaactgcagagtgagtggctacagagaaatctttactacctgttagatcagcattacctgggagcttgttagaaatgcaagctctggtggggccatactgaacccaaatctgcattcatgtgcatagtgacagctaaaatgcactgaagcagatgatcttgatgatcctttatgaaagtctcatgctaatgcagttttctaaaatagaggcagagtggaacccagatggacacaaaatctggttgatataataaaacaaggtagagggtgtatggtggggagggggtaaaggaaggaaactgtttaggtaaagataccacaaccaaagtcctactgcacacatgggatctgaggagggctgtgtctgctctggttacgttttctataatctcttagcaccactgaactttctctctttttgttttgtttttccagattcgctttgtggtggaactcgtgtggcctttatctttatttctggtcttgatctggttaaggaatgccaacccactctacagccatcatgaatgtaagcatagcagggtagcttgggcaagccctgaagagactttggtctgggccttttgtctagaaagatcttggggtgggagtgtggggatcagatctgcttatcatcatttcatgtctatgatgcatgtaacagatttatcaatgttacacaaattataatttttaaaaagtctttagagacagggtctcactctgttgccgaggctggagtacagtgttaggaccatggcacactgcagcttctatctcttgggctcaagtgatcctcctgcctgggcttccaaagtgctggaattataggcatgagccactgctcccagctaatttttttgttttttgtggagacagagtcactacattgcccgggctggtcttgaactcctggcctcaagtgatcctcccacctcagcgttctaaagcactgggattacaagcatgagccaccttgtccagcccaaattttcatgttttaatcctacacattctaagcaaatacttgtgtgtagttactaagggactgtgcacttatttttgtttgctttgttgttgctagtttttatttttttatacctaaactctctcgttttaaagagaacagatttgtagatgagttctcgaaaatatttcaggaatcaatatagagaatatgttatacatggtgccagagaaaaatgaggacaagagatgctatacaatcgtactgaagaaaaattttatttcttggacccctgaggtgtctgcagacctgaaaggaacctagtgagagcctcttttacactctgcccctgtgggaaagccttcacctggtttccggccctctatgtggtgaatgtggaagcctcaagcgttatgcaaatctgcccagtcctctattcttgatcttcaccttctcgttcatgagtttcaggccccagttctgaatcagcctcctgtccatcagactcttctttacctctccccgaggagcccataacctgcagccctactgcatgcttggggtaggtgctcagttcaccgtggttgaaggaatagacgagcgtctgctcaagcagcagcagcaactgcgtggagtcttcttgaactaacactcctatgcccctctcggcacaaaatgacgtgtccccccttgcttccccttcacatttccacccatgcctattacaacatccgtctgtctccccactacaccgggagcttgagagaagaggccatgtctctagcacccagcacagggactggcacacatgagatgctcctgcttcttaaatgctgagaatgaaggaggacatcagaggggcccgggccccttcccaaaaaggccaactcctaggtctgcatcctgcttggtctccatgactaatcccgtcttgtcctcattttctgttttaaaggccatttccccaacaaggcgatgccctcagcaggaatgctgccgtggctccaggggatcttctgcaatgtgaacaatccctgttttcaaagccccaccccaggagaatctcctggaattgtgtcaaactataacaactccatgtaagtgttgagatccctaccatgcaggggaggaagttgcacaccccttcacgtgctgaaatgcacacgtgcgtgcacggagcatggagcactgagtgttcttgtggctttgctgagcccctaacctcttaggagcagagcaggtttcctctctggaacattctgttaactgtcagggcacttggggagaaatctccaagctaaggccacgtgcacaaaatttcttggtccttatatccccagaatgtgacctggagtctgatggcagcccgctgcagagatgtgtccactgccttctggtcattgacctgcttgggtggagtgaatcattgtaggagaaaaactcagttccctcaccctgatcaacctggacagatctctcttcctttaaaagctttcttggacatctaagggctaggaaaaatgtcagggagcattgggaaggtaaatgaagtcaggtttacaaagtcaagtttacttcttgggagaaaaatacaatttccaaatcctctgttataattgccatcggccccctggagtggtgagatctcggaatatggctcgggtgcagtggctcttcactgtgggcctgcaggctattctgaaaagctgatgaaaaccaatgacccctcttccaagaaaaatggccacataccaaacattacactgtacatctgatttcagggaattgtagatgccaggttagtagcctcaggtctagggtcaaaattcaagtcgaatcccacaggaagagggtctgccttcggaattccctttcagagcattgggagaacatcatgggagcatattctagagacagaggcttagggtgtggacagggccatccctcacccactgtgctgaccttaagcagcaccttgtgcagcccatacctgaaggccaccagcaaaggcctgttggggagcaggctttacccgacctgtataaacaccaggctaggtgaaaactgagatacctggttactttagttttttccttgggggagctcagtatgattcttccaggagaagcctgcttttagactaaaaagaaaaaaagtttgataggtcaacctaatgattggaggtggccttccccactgtgaacaaactatggctgcatgtgccc

SEQ ID NO: 546 - DNA, 4027 bp, Homo sapiens
atcaattgctcctatcactcaacgttgctatcttactgaacttgttccccagccttacccactgatggaatgatccagaatggaagacaagacaccaatgtacatgaccctgggggaggctgtttcttaaatctacagactgttggtgacctgagccccatgtcaccaaaggctttcctggagaagcctcctagaccagtcttgacaaaggctcactcattccgtggatatttattgggcacctattatgagttctgccccatgtggggtgctggaatcacagtagtgacaacgacagatgaggttcctgtcctcaggaagcttactgcccttgagggcttcacttacttggaggagtgatgaacctgaagtgcggtgtgtgttaagaagcggaagtccagggccaggcgcggtggctcacgcctgtaatcccagcactttgggaggctgaggcaggcggatcaccaggtcaggagatcgagaccatcctggctaacatggtgaaaccccgtctctactaaaaatacaaaaaaattagccgggcatggtggtgggcacctgcagtcccagctactcaggaggctgaggcaggagagtggcgtgaacctgggaggcagagcttgcagtgagccaagatcgtgccactgcactccagcctgggcaacagagtgagactccgtctcaaaaagaaaaaaaaaagtgcctcacggagagtctattcttttcttcccatattgtgtgtgtgtgtgcgcgcttcctccaacacatcctccctatatatattttgagtaaaacatcttgtaaaaagttacagctacataatcaccacctgtccctaaatagtttttgctttttctttcttcaatgcacgatcattttcccccatcaatttattttttagtttcttataatcttgttgccagtaggctgttttttaaaaagcagaacatggtttgttcttactagcaggaaaggagcatttattgagcctctgctatggtgtcttttattttgctgagagcctatttacatttctttgagaggaaaacaacaaagggttacatgaaagaccatgtgaatagcccctagctgatctattaaacttgctattccccggccagctgcttcagatctccttcagatcttatgtgtttccttcctaaggtccctggagtaagggttgcatagacctattctactctccaactcacatgtccctctccctcttcctctccataattccacatctccaacccccacccctatgtgcaatgccacagggtgtggactgccacagccactggatctgcttttggaatcaagagtccttaagctccaaatggaaccgaaatttaaataccaactttcaaccatatgttaacatcagcagcctcttccaatgtaaaaacccatggcagtgtgccctgctttgtttctttaagcaatagaaacttgaaggaagcatgttggtaggccagatttttgttggctttgcaatggatcacagtcatttattcactcattcattcactgattcattaaatgaccacatttgcaagggcaaggtaatggggagggccagaaaggacactggccccagaaacaggaggctggattttggttctgatgctgccactgctgatgtgacactgcacaggtcacctgcctcctctgagcctctttccttaactgcagagtgagtggctacagagaaatctttactacctgttagatcagcattacctgggagcttgttagaaatgcaagctctggtggggccatactgaacccaaatctgcattcatgtgcatagtgacagctaaaatgcactgaagcagatgatcttgatgatcctttatgaaagtctcatgctaatgcagttttctaaaatagaggcagagtggaacccagatggacacaaaatctggttgatataataaaacaaggtagagggtgtatggtggggagggggtaaaggaaggaaactgtttaggtaaagataccacaaccaaagtcctactgcacacatgggatctgaggagggctgtgtctgctctggttacgttttctataatctcttagcaccactgaactttctctctttttgttttgtttttccagattcgctttgtggtggaactcgtgtggcctttatctttatttctggtcttgatctggttaaggaatgccaacccactctacagccatcatgaatgtaagcatagcagggtagcttgggcaagccctgaagagactttggtctgggccttttgtctagaaagatcttggggtgggagtgtggggatcagatctgcttatcatcatttcatgtctatgatgcatgtaacagatttatcaatgttacacaaattataatttttaaaaagtctttagagacagggtctcactctgttgccgaggctggagtacagtgttaggaccatggcacactgcagcttctatctcttgggctcaagtgatcctcctgcctgggcttccaaagtgctggaattataggcatgagccactgctcccagctaatttttttgttttttgtggagacagagtcactacattgcccgggctggtcttgaactcctggcctcaagtgatcctcccacctcagcgttctaaagcactgggattacaagcatgagccaccttgtccagcccaaattttcatgttttaatcctacacattctaagcaaatacttgtgtgtagttactaagggactgtgcacttatttttgtttgctttgttgttgctagtttttatttttttatacctaaactctctcgttttaaagagaacagatttgtagatgagttctcgaaaatatttcaggaatcaatatagagaatatgttatacatggtgccagagaaaaatgaggacaagagatgctatacaatcgtactgaagaaaaattttatttcttggacccctgaggtgtctgcagacctgaaaggaacctagtgagagcctcttttacactctgcccctgtgggaaagccttcacctggtttccggccctctatgtggtgaatgtggaagcctcaagcgttatgcaaatctgcccagtcctctattcttgatcttcaccttctcgttcatgagtttcaggccccagttctgaatcagcctcctgtccatcagactcttctttacctctccccgaggagcccataacctgcagccctactgcatgcttggggtaggtgctcagttcaccgtggttgaaggaatagacgagcgtctgctcaagcagcagcagcaactgcgtggagtcttcttgaactaacactcctatgcccctctcggcacaaaatgacgtgtccccccttgcttccccttcacatttccacccatgcctattacaacatccgtctgtctccccactacaccgggagcttgagagaagaggccatgtctctagcacccagcacagggactggcacacatgagatgctcctgcttcttaaatgctgagaatgaaggaggacatcagaggggcccgggccccttcccaaaaaggccaactcctaggtctgcatcctgcttggtctccatgactaatcccgtcttgtcctcattttctgttttaaaggccatttccccaacaaggcgatgccctcagcaggaatgctgccgtggctccaggggatcttctgcaatgtgaacaatccctgttttcaaagccccaccccaggagaatctcctggaattgtgtcaaactataacaactccatgtaagtgttgagatccctaccatgcaggggaggaagttgcacaccccttcacgtgctgaaatgcacacgtgcgtgcacggagcatggagcactgagtgttcttgtggctttgctgagcccctaacctcttaggagcagagcaggtttcctctctggaacattctgttaactgtcagggcacttggggagaaatctccaagctaaggccacgtgcacaaaatttcttggtccttatatccccagaatgtgacctggagtctgatggcagcccgctgca

SEQ ID NO: 547 - DNA, 4046 bp, Homo sapiens
agaaagccaatattgcaagcagtcgtctaaaggagtcaaatgtgttggatttgaactggatgtctcatttctttggtgaagacactggaaacaacttccaggtttcatcaattgctcctatcactcaacgttgctatcttactgaacttgttccccagccttacccactgatggaatgatccagaatggaagacaagacaccaatgtacatgaccctgggggaggctgtttcttaaatctacagactgttggtgacctgagccccatgtcaccaaaggctttcctggagaagcctcctagaccagtcttgacaaaggctcactcattccgtggatatttattgggcacctattatgagttctgccccatgtggggtgctggaatcacagtagtgacaacgacagatgaggttcctgtcctcaggaagcttactgcccttgagggcttcacttacttggaggagtgatgaacctgaagtgcggtgtgtgttaagaagcggaagtccagggccaggcgcggtggctcacgcctgtaatcccagcactttgggaggctgaggcaggcggatcaccaggtcaggagatcgagaccatcctggctaacatggtgaaaccccgtctctactaaaaatacaaaaaaattagccgggcatggtggtgggcacctgcagtcccagctactcaggaggctgaggcaggagagtggcgtgaacctgggaggcagagcttgcagtgagccaagatcgtgccactgcactccagcctgggcaacagagtgagactccgtctcaaaaagaaaaaaaaaagtgcctcacggagagtctattcttttcttcccatattgtgtgtgtgtgtgcgcgcttcctccaacacatcctccctatatatattttgagtaaaacatcttgtaaaaagttacagctacataatcaccacctgtccctaaatagtttttgctttttctttcttcaatgcacgatcattttcccccatcaatttattttttagtttcttataatcttgttgccagtaggctgttttttaaaaagcagaacatggtttgttcttactagcaggaaaggagcatttattgagcctctgctatggtgtcttttattttgctgagagcctatttacatttctttgagaggaaaacaacaaagggttacatgaaagaccatgtgaatagcccctagctgatctattaaacttgctattccccggccagctgcttcagatctccttcagatcttatgtgtttccttcctaaggtccctggagtaagggttgcatagacctattctactctccaactcacatgtccctctccctcttcctctccataattccacatctccaacccccacccctatgtgcaatgccacagggtgtggactgccacagccactggatctgcttttggaatcaagagtccttaagctccaaatggaaccgaaatttaaataccaactttcaaccatatgttaacatcagcagcctcttccaatgtaaaaacccatggcagtgtgccctgctttgtttctttaagcaatagaaacttgaaggaagcatgttggtaggccagatttttgttggctttgcaatggatcacagtcatttattcactcattcattcactgattcattaaatgaccacatttgcaagggcaaggtaatggggagggccagaaaggacactggccccagaaacaggaggctggattttggttctgatgctgccactgctgatgtgacactgcacaggtcacctgcctcctctgagcctctttccttaactgcagagtgagtggctacagagaaatctttactacctgttagatcagcattacctgggagcttgttagaaatgcaagctctggtggggccatactgaacccaaatctgcattcatgtgcatagtgacagctaaaatgcactgaagcagatgatcttgatgatcctttatgaaagtctcatgctaatgcagttttctaaaatagaggcagagtggaacccagatggacacaaaatctggttgatataataaaacaaggtagagggtgtatggtggggagggggtaaaggaaggaaactgtttaggtaaagataccacaaccaaagtcctactgcacacatgggatctgaggagggctgtgtctgctctggttacgttttctataatctcttagcaccactgaactttctctctttttgttttgtttttccagattcgctttgtggtggaactcgtgtggcctttatctttatttctggtcttgatctggttaaggaatgccaacccactctacagccatcatgaatgtaagcatagcagggtagcttgggcaagccctgaagagactttggtctgggccttttgtctagaaagatcttggggtgggagtgtggggatcagatctgcttatcatcatttcatgtctatgatgcatgtaacagatttatcaatgttacacaaattataatttttaaaaagtctttagagacagggtctcactctgttgccgaggctggagtacagtgttaggaccatggcacactgcagcttctatctcttgggctcaagtgatcctcctgcctgggcttccaaagtgctggaattataggcatgagccactgctcccagctaatttttttgttttttgtggagacagagtcactacattgcccgggctggtcttgaactcctggcctcaagtgatcctcccacctcagcgttctaaagcactgggattacaagcatgagccaccttgtccagcccaaattttcatgttttaatcctacacattctaagcaaatacttgtgtgtagttactaagggactgtgcacttatttttgtttgctttgttgttgctagtttttatttttttatacctaaactctctcgttttaaagagaacagatttgtagatgagttctcgaaaatatttcaggaatcaatatagagaatatgttatacatggtgccagagaaaaatgaggacaagagatgctatacaatcgtactgaagaaaaattttatttcttggacccctgaggtgtctgcagacctgaaaggaacctagtgagagcctcttttacactctgcccctgtgggaaagccttcacctggtttccggccctctatgtggtgaatgtggaagcctcaagcgttatgcaaatctgcccagtcctctattcttgatcttcaccttctcgttcatgagtttcaggccccagttctgaatcagcctcctgtccatcagactcttctttacctctccccgaggagcccataacctgcagccctactgcatgcttggggtaggtgctcagttcaccgtggttgaaggaatagacgagcgtctgctcaagcagcagcagcaactgcgtggagtcttcttgaactaacactcctatgcccctctcggcacaaaatgacgtgtccccccttgcttccccttcacatttccacccatgcctattacaacatccgtctgtctccccactacaccgggagcttgagagaagaggccatgtctctagcacccagcacagggactggcacacatgagatgctcctgcttcttaaatgctgagaatgaaggaggacatcagaggggcccgggccccttcccaaaaaggccaactcctaggtctgcatcctgcttggtctccatgactaatcccgtcttgtcctcattttctgttttaaaggccatttccccaacaaggcgatgccctcagcaggaatgctgccgtggctccaggggatcttctgcaatgtgaacaatccctgttttcaaagccccaccccaggagaatctcctggaattgtgtcaaactataacaactccatgtaagtgttgagatccctaccatgcaggggaggaagttgcacaccccttcacgtgctgaaatgcacacgtgcgtgcacggagcatggagcactgagtgttcttgtggctttgctgagcccctaacctcttaggagcagagcaggtttcctctctggaacattctgttaactgtcagggcacttggggaga

SEQ ID NO: 548 - DNA, 4055 bp, Homo sapiens
gctgagggccttggccagggcacctcccagggctgggcctggtctgggctggcgttcactggatgccatcctgatggcctggaaattgagatttctgtctggcacgcctcccgatggctccccacctgctaccacattccaggagcttccaggatgtctgggtaagacagaggcacccccaacagattcagtagctctgagagggatctgtggctccttcctaagcttgcggttcttctggaaacttctgcctctagaagatggtccctctaagaaaagtacaaccacccagcccataattcagctcccaggttttccctcaaacctccatgtctcctgtaagcagagcaagagtaaaatcagataccaaatttcctcattcctcagctcccaatccctaagggcataagatgaaaatcttcagatctctgctttcctccctctttttttcttcctctgttaacatttgtcaagtgttactaagtgtctggcactgtactaagtgcatcacctccctgaactctccgaacagttccacgagagaggcctctctgtgatccccccggtactgatgaggtcactgaggctccagagaaggattagtaactggtggggttggacctgggattcacacccatgctgcgtgacccaggacaggcaggcatggccgttacaccacactgacccccgtggatcgagatctatccaatagtctggtcactgatatcactaagatagagtggccatataatttatcatccaatcagggcagttttgcaagtgaaagggagcactattaataattgcactgggacaataaatgtaaaccaacactggacctggaaaactgggacgtgtgtttgccctataccaaggtaagctagacacagccactgccttcatggagttcagaaccaggcaggggcggctcccacgtataattactgtgcagcacaacgtggagaccgtggagtagaaggaaacacggatgggaggtgaggaggaggtctgtgagctcagaggaggcaccggggctggagagggtgagagaagacttcccaaggagttcatcctgataacgtgcattcccaatgacgagcgctctctccactgcacaagacaagtatacatctgcccgtgttggctgtggacctggcgctgtgtcagggagggtttatgaagatcactaggtgggtctcttggtgtcatcccttcatcccagcttctgggttaggatggatatctgtgggggggcctgaggactcatgaaagtggggcgctaatcatgttttggacaccacaccctggagcacctgggacagctgtggcctttgtcctgggttcagcatcaagccgaggatgtggcaagtaaagagaggctgggcaccaactccagtgtacccaggctccgggtcatgtttgtccaggctaagaattctgtcctggttctcagtgcagaaggaagaatcatggggctcattttaggccttggctgccttctgttaaattgaaaacagagcaggaaggaagaaaatttaacaggctcagttctaaaacaacaagcacaactgtgcccttgccagaaacccctcctccccatgttgattgaatggtaaagagaggaggggaggtgagagggagagagagagagaggaagagagagagaaaggaaagaaaggaaagaagaagaaagaaagaaaaggaaagaaagaaagaaagaaagaaagaaagaaagaaagaaagaaagaaagaaagaaagagaaagaaagaaaggagggagggagggaaggggaaaagaaaagaaaagaaaaagaaaaaaagaaggaaataccagtttgggaaaaaagaattttccaccagcccttctgagccttggctgggcttaattaaagttacagacatgtgtaaagggcagggtagggggagtctgagctgctgagaaaacatgtttttaattatactgtggaatttctccctggggtatgcctgtacgcagttaagcgtcaaggacagggatgccgctctggggaggggaagctgagcatgattttggaagccggcagaagaggctattgtgaaaaccagacctgtcaggctaggaaaagaatggctggtggtctttgaccagggagtgacgcgtgaaatgcagcaaccgcccccgccccccgccaaaaacaaacacactctcacagagttagaacaacagtgacctctcaacaaatatttttcaaagattaccaaccaaccattacctagagcagcggttctcaaccttggctgcacggtggaactacctgagacgtgttaaaaagaagaaccctgatgtcccatgccccaagattctgatgtagttgatctggggtatgatctgagaccccggcatgttttcagcctgcagccacatgagaagtgctgacctaatcaacaggggtgatgatttgaggggcggggactataggcaaaaaaaaacagcctaattcaaggatgagaagagggcacaggtgaggtgggaacagtcctagggccagacaaagaaggaagggagaaaggaggtgctgatccctcccctactcctgagaggaggcctttaagtcaccgtgccttgtggagaccagattcttcaaaaatacaagaatgagtgagtgagggagtgggtggatgccaggagagtgcgtgacaagccttgcaagggaggatgacaatgcactagcttggtttggaaattttacccctggaacaggcaggccaagctggctggtcccctccctgatacacagccctccctctttatatatggagcaggggacggtgtgtggctggtttcttagcaagcaccatggttccaagttggcaactggggagttctgaatccaaaaaggagggagatgaacgtaagtggagggcaggcctacaaggttgcagataagcttaattctgtctccttactcttctgcctttgcaacaaccctgtgatcttgcgacaaccctgtaaggcaataacaaatggctcatgtttattgagtgttacctcatgccatattgtgctttcgtgtttaacacaattgtctcatttcaccctcacgactgctctgggaggtaggtcctggtatcacatccatttcacagatgagaccatttggcacggaagagttgagtgggctgcccaaggtcacatagctaagatggaacaggctggataggaaccccagtaacttgacctcagagtaaccttctcttaaccctgagtgtacactgtaggaaaaatgagcagtcccatttcagagaggacaaaactgagactcagaggttaagcaagccccaaagtggttgttaacccagatcttcccactaactcccaaatcagcatcagtgtttaacgtaccagacctctcccagatagatgttgccgcatggaagacagccgatctacgtgatagaaagccaatattgcaagcagtcgtctaaaggagtcaaatgtgttggatttgaactggatgtctcatttctttggtgaagacactggaaacaacttccaggtttcatcaattgctcctatcactcaacgttgctatcttactgaacttgttccccagccttacccactgatggaatgatccagaatggaagacaagacaccaatgtacatgaccctgggggaggctgtttcttaaatctacagactgttggtgacctgagccccatgtcaccaaaggctttcctggagaagcctcctagaccagtcttgacaaaggctcactcattccgtggatatttattgggcacctattatgagttctgccccatgtggggtgctggaatcacagtagtgacaacgacagatgaggttcctgtcctcaggaagcttactgcccttgagggcttcacttacttggaggagtgatgaacctgaagtgcggtgtgtgttaagaagcggaagtccagggccaggcgcggtggctcacgcctgtaatcccagcactttgggaggctgaggcaggcggatcaccaggtcaggagatcgagaccatcctggctaacatggtgaaaccccgtct

SEQ ID NO: 549 - DNA, 4042 bp, Homo sapiens
aaagaaagaaaacatgctcaaagcaccattagagaaagggtgagccctaatgacatagtttcacattcaatatggtaggagttgaaacaagggagaaatgctgtggtttgaagtggttcaacaaggtaggatttctagagaaaggggggtttaggagttagataagtagaggatcagcattctaggtatgaaggcaggattatctggcatgtggcagggtgaatgatgttaatcagtaactgctaattgatatttactgagcagctgctgtgtcctcacgatggtaagactattagaggaagacagcccacctgcctaactgggaacacaaggcacacatatattggaaagatcatgttgcacaaaacaggtgttcaataaataatttttgaataaatgtgaacactgaatagcaaataaatgttatagatcgtaatagttgtagaagattggttgggattgtagggactggatgtggggcaatggctgtgggtctagagtatattcattgtgcagtggacacacacctaatctgtcctcaaggacagaaccatgtggaggaataggaaaacaagagaagcaggcaagaagcggaggcagtgagtacagcagctaagaaatgttacattgggttcatccagagcaagaaaagctgagagctgtccgtgagggaaggccacacaggcaagaggagtgggacaggggagtaaaggagtgggctacaacaggccctgcagatgtggaagccagacccacagaggcacttagaaagtgaggatcctggatgaattattttagggagaaagtgtaggtttagatcagctggcagatgtgtttgtgggctacagccaagtttttcaggactaagaaggagcaaaataagtagaacttcttgggacaggagatctagggtactccagaaccagggaaatgagaaacaagaggggaattttaagaaagagagggaagatcatctatgaggttggagatgaaaggtgttggagatggtgaggcacaagtcaaaagactcactcgaagggcaggaactctgcttatttgtccatattcccagagtttgtcatgaggtctggcccacgtgggcagtcactcggccactatgtatcactgtggctgccatggtggatggaggctggacagaacctgtggtgatcggcagtctttctggaggactcaccagggaggggtctcagggtgggcatctcctttcaccttcctgtgcatgtcactgcactgttcttcttccctccctgaacagcacacacactgcatccttagtttcaggggtctgaaaacaaatgctacgaccaccttgctttggtggcttttctgaacaggcattgtgagaagagatgttctggccaggtgaaagtggactttatttttaggtaggtttttcagtttagaaaggtttcctttgcttatcccttgaggacttctgtgctgctgcttctcctccatcttgctagttaacagaacaggggcagaagtgacaccaatgctctcggccatgcctgccttgggaagcactaccgggccccactgtttagaatcttagatggaaatgtacacaaggcattgacacacgcctgcgggagtgacccagtgcttccctcccatgggactcagggtcagcgtgggaaggcagctggcagggacaggagccccgcccgcaaggtggactgagcctcacttccacacaaaaccagagtcccatctgccccagagcgctcgctctcctccccttccttccgctcaatgcagcctgacacgcctttgaccagaactgcaacatttcaaacacaaacccagatctgttgggaaatcctaattaaaaacgttgcattcccaggtggcacaatcacatcctgcctaaaacttctggcccacatcccaccacccagatgttgaaaagaaacctttctctgcttaacaccaaaacctgcacttcaaggtttctttaggggacaaagaaaaaaaaagtacacacatgcagagttcagcctacatgttcattgaggaaaaagagcgtggcttattcatctttcaatcttttgattgttggcattatgattatgattatgattaattactctgacctgacaggaattgaagaagagactatatgctggtgctctgaaatgatctacccaactctgtcatctgtaacaaccagtgataactctcttgtcttgtaaaaagggtttgtacataacttgtacatggtttcattttgtatttttcgcagattaaaaatttatgtatttgtgttctaaaacaaggagtgtttcttgtgtctttgtagcagttacatgccatgggggtgagaggtgagctggggatggtgaggtccctgagttctaatcaggcagcttttgtctcctcccttcatgctcctccatgaaggcaaagttgtggattgattgaaaccatgagcttccctttgcagcttcgagtgcaaatagacctccccacctccatggtcttcaaggagccagtcagtgggtgctgcccaagactgcaataggcacggcagagaggaagagctgctgtcattcaacgtggtgcctgagagccctacgcagccacactggggccaatgggacaggtgctcctgcagaaggctccagcaagccggccactaaagaaatgcacagcattcagtaggtccttgaaaagctaaagcatttctcccctcagccacccactctcaagctagttaccatttcctgccatttgcacagacaaatggtgttctttcccctgcatttagcttatcaaaacccaggacaatgtgttaaaggtttaactcatcctgctccacgctcatccccaacagggcaacagatggaacttttaaaagccaaaaaaaaaaaaaaaaaagcccttaaaaatgaatgttgccatgttgggccatgctctaaaccttcttcagaaccttcagagtttgcactcttttcaggggcctggactcccaagagtaaagctggtccagcctagagaaagggaaggatctggagaatgggaaaaagccatccaaggcatacagatgtaatgtgcagaatgtattgagatttaatgtattctagagattgtctcatttgctcattagccaaatatttactgaatagctattatgttaacagtcctctgctgggagctgggaaaacaacagtgaggaattctatgattccagttctccagtctgggggagggttgggatcaacaaataaacaggtgatagtcatgtattaaaaattgatctgcaggggaaagcacagtttgccattgggaacacatcagaggcgcacttagctatttgaagagaagtataccaactgatagatattttaaaaaaacaaatcccccttctacctaagtcagtataagccctaactggaacttatttccagtggtcagcaaatgcaggtttacctgtcagaatgtgccagttcctgactgtcctttgcactccagtttctcaacttgccttctccaatatttgctaacaaatctgaatgttgttggggaatgtaattgcagagcatatggtccccattagttaggcaaactccactgccaaattcagctccaaggaaggagtctgcgtaaaggatgaagtattaggaaaacatcgacagtgacagagaaggcaaatataagagatgagacagtgagtttcaaaagagcaggctcggcaaacccagcacaatgaatgtggaacataattttccatttgttgagaaaacaatatatgtgaatttgtactaaaatctccctgtagcaaaaatcaaagtagaccattcaccagaatcaatgttaactgctttgcaatgtcagataagatagattctgcttgggagaaaaacatgggtggaacagaatagagagtctgctaaggaaataaagcaagagtgacatcaaaatgtaaatacagacttaacgctattttaaatgttactggaccagcctttgagaggagaaacagaatctcatgcttaataacctctcacattcagagagt

SEQ ID NO: 550 - DNA, 4052 bp, Homo sapiens
agaattctgacttagaccacctgtagcagaccttcctcttttggcatatttttttaatcacaaaaaggacctgagactccctatctaaagataagccaaacttggggtatacattaagaatctgggaagaaagaaaaaaaagaaaaagatataataagcagtattttaaaataccatgagttatgggcatgcatatggtacaaagagtagttctttgggttgaaagaaagaagagtttgcattgaactgcgtaggctggcaagaatgcagaggtatacaatgtttgatgggctttggaggcatttcaatagtaaatgggtgacaggactggaaagatgtggaatatgagggttttccagggagatgggacttaatgggccatgatgtatttgtaggaatgtgatttcaatagattgactattttgtctactgtgataagtttgtgtaggggaactgaggaaaactgagatgagacttcatggaaggggctacaaagtacagtctaaaggcctagataaagtttgaaacttgatttagaaagtcatgaaaagccactcagagttttaagcaaagagtgatggggcagcaatggctgtgcatttttcaggttgaaagtagtgagatgtcagttcttcctggaagatatcatgagaatgcacacaaaactgaacattttctcagcagcaaggagtgctaaagggtgcacactccaagtcaacaactcaccgtgtgcagcaccttcctcacacattttgctttgctttctgtcacaggaccatcagacgtagaacgtcctgactctcctgaattactagaatgtcagcaacaaactcacaaagtagattagagggtaggaatagatacataaatttttaaaaacctgccaatcatactgttttctagacagtaatataataagaacatgaggcaggacatccacaaatagtagagaataattaatagtccagaactgccaaataggaattccccttatgaaaacacccttgcagctaatcaggtagcccttgtttagaaaccaattagcactcataaaatatttgtacaaggagtgagtgggggagaaatgagcacaatatgggttctgccatcaatcagcttataatacaactaaagaaagaaaacatgctcaaagcaccattagagaaagggtgagccctaatgacatagtttcacattcaatatggtaggagttgaaacaagggagaaatgctgtggtttgaagtggttcaacaaggtaggatttctagagaaaggggggtttaggagttagataagtagaggatcagcattctaggtatgaaggcaggattatctggcatgtggcagggtgaatgatgttaatcagtaactgctaattgatatttactgagcagctgctgtgtcctcacgatggtaagactattagaggaagacagcccacctgcctaactgggaacacaaggcacacatatattggaaagatcatgttgcacaaaacaggtgttcaataaataatttttgaataaatgtgaacactgaatagcaaataaatgttatagatcgtaatagttgtagaagattggttgggattgtagggactggatgtggggcaatggctgtgggtctagagtatattcattgtgcagtggacacacacctaatctgtcctcaaggacagaaccatgtggaggaataggaaaacaagagaagcaggcaagaagcggaggcagtgagtacagcagctaagaaatgttacattgggttcatccagagcaagaaaagctgagagctgtccgtgagggaaggccacacaggcaagaggagtgggacaggggagtaaaggagtgggctacaacaggccctgcagatgtggaagccagacccacagaggcacttagaaagtgaggatcctggatgaattattttagggagaaagtgtaggtttagatcagctggcagatgtgtttgtgggctacagccaagtttttcaggactaagaaggagcaaaataagtagaacttcttgggacaggagatctagggtactccagaaccagggaaatgagaaacaagaggggaattttaagaaagagagggaagatcatctatgaggttggagatgaaaggtgttggagatggtgaggcacaagtcaaaagactcactcgaagggcaggaactctgcttatttgtccatattcccagagtttgtcatgaggtctggcccacgtgggcagtcactcggccactatgtatcactgtggctgccatggtggatggaggctggacagaacctgtggtgatcggcagtctttctggaggactcaccagggaggggtctcagggtgggcatctcctttcaccttcctgtgcatgtcactgcactgttcttcttccctccctgaacagcacacacactgcatccttagtttcaggggtctgaaaacaaatgctacgaccaccttgctttggtggcttttctgaacaggcattgtgagaagagatgttctggccaggtgaaagtggactttatttttaggtaggtttttcagtttagaaaggtttcctttgcttatcccttgaggacttctgtgctgctgcttctcctccatcttgctagttaacagaacaggggcagaagtgacaccaatgctctcggccatgcctgccttgggaagcactaccgggccccactgtttagaatcttagatggaaatgtacacaaggcattgacacacgcctgcgggagtgacccagtgcttccctcccatgggactcagggtcagcgtgggaaggcagctggcagggacaggagccccgcccgcaaggtggactgagcctcacttccacacaaaaccagagtcccatctgccccagagcgctcgctctcctccccttccttccgctcaatgcagcctgacacgcctttgaccagaactgcaacatttcaaacacaaacccagatctgttgggaaatcctaattaaaaacgttgcattcccaggtggcacaatcacatcctgcctaaaacttctggcccacatcccaccacccagatgttgaaaagaaacctttctctgcttaacaccaaaacctgcacttcaaggtttctttaggggacaaagaaaaaaaaagtacacacatgcagagttcagcctacatgttcattgaggaaaaagagcgtggcttattcatctttcaatcttttgattgttggcattatgattatgattatgattaattactctgacctgacaggaattgaagaagagactatatgctggtgctctgaaatgatctacccaactctgtcatctgtaacaaccagtgataactctcttgtcttgtaaaaagggtttgtacataacttgtacatggtttcattttgtatttttcgcagattaaaaatttatgtatttgtgttctaaaacaaggagtgtttcttgtgtctttgtagcagttacatgccatgggggtgagaggtgagctggggatggtgaggtccctgagttctaatcaggcagcttttgtctcctcccttcatgctcctccatgaaggcaaagttgtggattgattgaaaccatgagcttccctttgcagcttcgagtgcaaatagacctccccacctccatggtcttcaaggagccagtcagtgggtgctgcccaagactgcaataggcacggcagagaggaagagctgctgtcattcaacgtggtgcctgagagccctacgcagccacactggggccaatgggacaggtgctcctgcagaaggctccagcaagccggccactaaagaaatgcacagcattcagtaggtccttgaaaagctaaagcatttctcccctcagccacccactctcaagctagttaccatttcctgccatttgcacagacaaatggtgttctttcccctgcatttagcttatcaaaacccaggacaatgtgttaaaggtttaactcatcctgctccacgctcatccccaacagggcaacagatggaacttttaaaagccaaaaaaaaaaaaaaaaaagcccttaaaaatgaatgttgc

SEQ ID NO: 551 - DNA, 4046 bp, Homo sapiens
aaagcattttcctatcaagaaacccagcttccttcacttcccccattgccaccccccaatcccagtccccccatcggtctgttcacatctctgtgttcatcttggcaagacctactcaatcaagtgatgatgccagttgataaacttccctggaaaacatttacagctattccatttggcaaacttgcttctctgtcaatatttcatcctcctttaaaccaggagggttattaatggcaaaagcattggtcttctttatgcttgatcagtatgactcaaattaaaagtgttctgctgtgtatatcaactcagtagcccacacccagttatctgggagctgatggttcagtcactgtattacccaaatctttcctgccagctgcctttcagacatttgttaaatcccaaccagagaccgggcagatagagagaagtaaatccgaagtgcgttttatatacagtctgttagcaactccaatgagatgatattgtgatgggaatggaatgggaacagactatgataagagatggaattttgaggttttcctggactttgggcacacagtcatgccccagtggtagataattgagaattcaccatatttgactaatgataaatttgatgatggagaaggatcattactacttcaattttatttgccaaaattactatattatactttccttaatagagtgaagagtcccctccattgttttctatttgactccaaacttccccttcctctttcagtagaacatctgcttacttaggaagtaggcatacaagtttcttattattatatctcttcctgttcactgcctcccgcaaaaaaaaaaaaaaaaaaaacaaggaagtaagggtagaaagtgagagttctttgaaaataaagtatatacatttaaaaagttaggaactctgttatctgcaccattctagaagagaagaaatttgtaagccatttagtccaacttgctttgggctttgaaaggggtgaacaataagtaggctggtaaaccagaaggcacggtgaagccttctcagtctcaacacttgggtgatcgtggcatcatcagtgtccctaaagtctgctacccaggttcttcccaaagccagttcaaatggatggagaaagctggactcttatacacacagttaaacttctgccacaattgggagaggtttcaaattctgttctgaatattaaagattatgacccagaaccttaccatcggtgctcaataaatatttgatataaattgactttacacatttttatacctttaaccattttctatattacccttgtcctcttggtttgatttttttaaaaaaatatgagtgcctctacatgccttatgatgctgctgtgttggtggcactttctcaagctggtcacatggcttctgagaaaggggaatagccctgtaagctcaatgagtagagacactgagtatgcctcttggcagcatcatcaagatcccagatgaccagaaaaagcttttgtctggctcttctgcagcatgggaaaagcctaaaggtgtctgcatcccaatagagacaattaaatcaacctgccaggttcctatagcaacaggctccttgaaggagaaagaggagagtacagaaactccagggcctgtggaagtcaagacagggtaaaaatcaatttctcaatcagcttctttcagcccatccctgctttgtcacaatatgataaagaagtagctgtgggcacctgtcactacactggctgactgtctcccatgcaagattgcatgcccattgcaaccattggaggtgagagggattatccgaaagggattagtgaagaatctgtcctcagggtgttggctggaccaagggccacagaggagggctgggagagcagtttgctcaaagaatggcagcatcagactttcagttaaaagagacagagtcatggtagccaattgcaaagaagtgagaaggtttttcataaacggtaattgcttttgttctggtacaaataatttgtatctctatgaaataagcatactttgctcacagagaggagaggaggtagtatgtgtgggtggggacggaggaggcatcagggtttgctgggcagaggaagtgtgccaggctgcctatcacaagcgcgggacaggaaaccacacagcattacccttgaaggtcgaagctccttgttagcccttactgttctccacggttgtctctctccaaacagcatcttttctttttgagccttttctctctcaacctcagcttgtggtgtagtgagaagagggccaattattccaaatgcttttgctgtatcattgtctccccttttctgcgatcttctcaagggagtactgtgaaaaggctaaatcccatggcactgacaacccacagagccaacagagaagctcaattatcacagtgcagcctgtttcttcctctgctggtggcagctcagtcagcccagctctggggcccttccctgcaagagcccattcctccagggtgacctgcagccctgtggctggaggaggttttgacccttattttaaaccctgtgatctcagtgatgaaactagaaatgcaagaaacagatggctctcagatgggataggatgcctggtgagtcaaagccagtatttcagaggcacagagtcaccctgggaggggaaaaaccctaagctccccagaaataacaccaggttacctcttcctctcctttaccttccaaatgaagatgaccaaccaaatccccctctgtcacctctgctgccacaatccatgttcttcaggatacaccccgatatacacacccctgttctctacccccagaatctctgctgaagggcatcatttgtcatcacattcaagaggtacgacccatgcttacatcatcctttagtactgatagtactcaggctagtactaaacttactctaaaagctaacgcttcagcaattgccttgggccaggcattctcatgagcactctttagttacctatacaaactcaatcctcacaacagcttcagatggagatgctgtgtctccatttgaaagacacagaatctgagagacactagagtctgtgaagttagccactgtgatataatgcccgctgatattattccaaatactcataaccttaacaactcacatttacttaccatgtatctggacctgtgtaagtgcttcaagggtactggcttcatttatctaaacaacactattaggaagtttgtatcatcagccctattttacagaaaaggaatgaagctaagataaatttgctaataacttgttcagagccatgcaactagtacgtgagctagatctgcttaactttcacctcctgccctgcgctgtctccttagcccgcatctccttgcttcttcatggtggacagctcatagcatagctggtcttgataggtgacatctgccaatggcagtggcaattgctctaccagcatctctctgcagttgttttccagagttttatcttgtcccactagccccctcccagccacagactgaaatgactcttctttcctaactccacgaactcctgacatgtcacacattgtactcagagcactgacaacaggcatctcatccttaagaagcttattaagaaataaggctatttttctctggcagcgaggaagccctcccaccccgatcaattgcccttctcatcttagagatgaaaataaagcccctggaaatctttctggtatgtgagatgaaacagggagtggagataaagtcagggatttggatttatccttgtcatggcagcattcattagagctgcttccctgagtcctcttcctcgtggtcaattttgtagccacccattggcattgtttcttcttcagaaggcaagattcaatacatcaaattatcattgtcctacttgcagcactctccatggatgctgaatggctggcgatcattgaaatgtgtgttccttggaagcatgttgggagaatctgttcgtaaaatacctttgcaccagacattttagtaaaacgcccagagcat

SEQ ID NO: 552 - DNA, 4042 bp, Homo sapiens
ccagttccctctgggagttcttatgaacatttctcaccttaatatggaggagagaatagtattccaatcatggatgtatcaaattctagtcatttagtttaagtgaaaagaggtttgattgcatattaaattgttattctgtctccttatgttgccatatgaatagctattttttttctttcacttttgacatttgggatgaaaagccatatgtatcataaatatcagatgtaagtcattaaaaactgccttcctgggacttttacatcttttaaaaggtgaattacttaccttatgtacagaataaataatgctcaggaaagagcaagtatttttccatgcattctcaggggatctttttactcccctttgtttgattagttagggccccaatgccaggtaggaggaagggctggggcaatggtagagtgagaggaagacaaacccagctgcagatcatgcttttctaggagccgacatgctaaataaattagaatgtaggaggatcagccacagttgactcaacaaagacaaaagccagccaccaccttcaactgttggcacagctgtgcggtgctggctgtcccaatgcagaaagctggtgggaaggaattcctcatcatcactttctttaatgtagccaatttaggcagggtaatgacggcaatagagagctgctccttgtcattatgagacgtgggataagaagagtgcaacagtgagccaaacacattttggtatagttatttttttcttcttttgttttctttcttttttaacacttagtaagcatgagaggagaggtagaaaaatacccttttttcaacatatagttgtcagatgctttgtgcatgcaaatcatgctttaggcagtgcggtatttcttaaaaactggccaattcaccataaccaatttcccttatggatggactaggctggtatatacatatttgaaaagttttacttcaaagaattccatcgaatagaataggggtaaaagggaggaggaaaacatgtcacagctgtaccatctctaaaaaggtgtttttatggtgaatgttttggatttagattttggatcccccgtcccctcaagcatgatagttttggatatttgcttgctgtgtgaattgacaagcacttttactgacaaatggtgaggctcagtcagaacctccaccctcccccacaccaaagacaggggcagcgtagtattcaaaccagtattgtggtggggaataattgtatacatgtaaattatcaagccctatgagtggaagaattttttcaaattatttttgtccctctatatattgatttatattatgtataactatctctttatataaactatatataattatatatatataactatataattatatatatataactatatatataactatatatatgtatcccctagtattggatcatgaagagctcttcatgcattctttgcaaaggaggttataaagttacgccctcagaacatttataactataagaatgtgccagttaaagtgctcaacaggaaatatgacagtttaaaagcattgtaaaactcacatagcttacttctctctctaaagtgcaacaaggatgaatagaatgggccaaggtatgacaattaatggttctgcatgacctagccactgctgggggttttcttctataacgttgtccttgtgaaaacttttgtgaaattaaaaaaaaaggagttacaaattttattctgttattggtttgtttatttttatttatattgttctgtttgtggttttatttattttgttttgcttttccccccctcccctttccctctccttttcccttccttcttctcttccttccttcttccactttctaaattgctcagcgcaatgaggctgtgctgctgctatcgctagattccttagagtttgttttggtgttcttgggtgtggggttgggtaatttggggggaacttctctccatctggcttgccttttaatctgcacgtggcctccctgcccaccctggtaccttgctccaagtccgaaagcattttcctatcaagaaacccagcttccttcacttcccccattgccaccccccaatcccagtccccccatcggtctgttcacatctctgtgttcatcttggcaagacctactcaatcaagtgatgatgccagttgataaacttccctggaaaacatttacagctattccatttggcaaacttgcttctctgtcaatatttcatcctcctttaaaccaggagggttattaatggcaaaagcattggtcttctttatgcttgatcagtatgactcaaattaaaagtgttctgctgtgtatatcaactcagtagcccacacccagttatctgggagctgatggttcagtcactgtattacccaaatctttcctgccagctgcctttcagacatttgttaaatcccaaccagagaccgggcagatagagagaagtaaatccgaagtgcgttttatatacagtctgttagcaactccaatgagatgatattgtgatgggaatggaatgggaacagactatgataagagatggaattttgaggttttcctggactttgggcacacagtcatgccccagtggtagataattgagaattcaccatatttgactaatgataaatttgatgatggagaaggatcattactacttcaattttatttgccaaaattactatattatactttccttaatagagtgaagagtcccctccattgttttctatttgactccaaacttccccttcctctttcagtagaacatctgcttacttaggaagtaggcatacaagtttcttattattatatctcttcctgttcactgcctcccgcaaaaaaaaaaaaaaaaaaaacaaggaagtaagggtagaaagtgagagttctttgaaaataaagtatatacatttaaaaagttaggaactctgttatctgcaccattctagaagagaagaaatttgtaagccatttagtccaacttgctttgggctttgaaaggggtgaacaataagtaggctggtaaaccagaaggcacggtgaagccttctcagtctcaacacttgggtgatcgtggcatcatcagtgtccctaaagtctgctacccaggttcttcccaaagccagttcaaatggatggagaaagctggactcttatacacacagttaaacttctgccacaattgggagaggtttcaaattctgttctgaatattaaagattatgacccagaaccttaccatcggtgctcaataaatatttgatataaattgactttacacatttttatacctttaaccattttctatattacccttgtcctcttggtttgatttttttaaaaaaatatgagtgcctctacatgccttatgatgctgctgtgttggtggcactttctcaagctggtcacatggcttctgagaaaggggaatagccctgtaagctcaatgagtagagacactgagtatgcctcttggcagcatcatcaagatcccagatgaccagaaaaagcttttgtctggctcttctgcagcatgggaaaagcctaaaggtgtctgcatcccaatagagacaattaaatcaacctgccaggttcctatagcaacaggctccttgaaggagaaagaggagagtacagaaactccagggcctgtggaagtcaagacagggtaaaaatcaatttctcaatcagcttctttcagcccatccctgctttgtcacaatatgataaagaagtagctgtgggcacctgtcactacactggctgactgtctcccatgcaagattgcatgcccattgcaaccattggaggtgagagggattatccgaaagggattagtgaagaatctgtcctcagggtgttggctggaccaagggccacagaggagggctgggagagcagtttgctcaaagaatggcagcatcagactttcagttaaaagagacagagtcatggtagccaattgcaaagaagtgagaaggtttttcataaacggtaattgcttttgttc

SEQ ID NO: 553 - DNA, 4054 bp, Homo sapiens
cctggactcactcatgagcgcggtgagttatcctgttccctcctcctcactcaagggtggaggatgtgccaatagagcacctccaacctttgaggccctgggctgcactggggccacagtggagagcaagactcctagaagctcacaccttagaaggggagacccacattataaaaccatcacacaagtaaatgtttgattataaattcctcaagtgcaaggaaggcaaggcaggctagaaggaaatataggtgagggcttgacctggttttggggatcccagaaaaattccccaagggagttgtacattttatgctaaaatttgagccataaagaggggagatcttgggggaagagcattctctgaagaagaaagaaagcaaatgcaaaacctggtgttgggggggacctgaggctctcaaagaaggcaaagaaaccctgtgaggctggaccatggggagacaagggtgcaggaggatggccaaggttagacctgcagaaccttgaaacacattttcatggttttggactttttcttaagaataatgaagaggcactgaaggattttagttggagagtgacataatcaggttcatgctttaaggggattgccttggctgttgtagggaggatgattcagaggtacaagatggcggcaggaggtctgagtaagaggctgtcatggcttggactaggatagagctggtgttgggatcgagggaggtggatggagctcagtggtattgggcagtacaattaataggacttgggaaaagattgagcatgagcagaaggtggagaggacagtgggtcaaagatgactgccaggcctgtcactgagactgaagtccttgggagagaaccaggcatggaggcaaggcctggctggaaggagggaggagttagtggcagagagaggacagtgggctggcccagggatcaaacacagctttggtttcttttataacttgatgtgcatctagcaatcaggcatttgttttttcacttttgcaaccgaaaaacaaataacgattaaaaaatgggtcccaacattatggagccatctttcactgcaaaaggcaaaagtaggcatttagaatgagtcataacctgggtattatgaagtcttcccactgagcatctttatttattatgtagaaaatcttcttcattttggagttctcaaattctcaatttgtgaaaatgcagacataggctgaacaaaaacttgacctttggagaatccatgataaagagcttttctgaacacattaaaaccataaacagaactcagagtttttacacacgtatatttcttaaagtgctgaaagttattctcctgaatgtgctaaacaactgatatgctaattatgtactggtctcatctattcattaaataatgctaatcccagaaggacctctatttgaggaaagaaaaaacataaagctttttaagactaatttgggttattctgtatgcctgaacattgtccaactgcaagcatatcttatttaaaaatcagaattttggatttaaaaatgactgtgaaatgacattcgtctgaattaaggttaactgggcttcatgccatgccatggctttccaagccaacaaggagataaaatggtccttggaaaagggctcccttggtttcctggggctcatgatctttcttatggcctgatgataccaaggctaacctttctacctgctagtgatgttgggctcagtttgggcaaactccttgagcaagccagaaggaatgatagaagcctcaagatgtgttcctaagaagaccatattctcagtcataggcctcatattctgcaaatccagtttcaaatggattttggtaattcatctcattagaaatttttattttagttctgatcctaattacagagatctcagaagactgttctaagagctggttaaactatttacagtagaatttttttttcagaactacaaaatactctgataacatttttaaaattccaaatttataaaattgtttatgtttctacatatcagatatttagtatgtttctagcaggactggctacataatttgcaaggtcacttttcatgaattattaagaatttcaaaatggtgacagcagagtattaaaacaaaagagacttggggctgggtgcggtggctaccgcttgtaacccagcactttagaaggccgaggtgggcagatcacttgagcccaggagtttgagaccagcctgggcaacatggcaaaaccctgtctctactaaaaatataaaaaaattagctgggtgtggtggtgtgcacctgtaatcccagctacttgggaggctgaggcctgagaatcgcttgagcctgggaggtggaggttgctgtgagatgatatagcgccactgcactccagcctgggtgacagaatgagaccctgtctcaaaaaataaaataaaataaaataaaacaacagagatgtgtctgagtacagccctgtgcaaccacataggctgaacacccatgaaaccagccctggttccaaggaataaaatcggtttgagcactggagaacttcttttcaacacagccaaaggggcatatggtagccacagggtggaggtgggggcccatctggatttgagttgcacaagcatctatatcatcagtaggtagtcagttcttggaaattcaaatgagaattcaaagtgaattgatttgaaatttttaaacaagccatctctcatctcctttgaaatgcacacaaaaatgtttgggatagtgtgactaaggcatgtttggatgcaatagtatgggagcagcatgtcttctgcattctagcctaggataaaagggtatcaggaatctggtaactgtcattgtatttatcatcaggagcatcatttactaagggcccagaactgtgcgaggcactttagctacactatcgaatcttttggacaataatgtgaatactcttggtttaagtgttgaagcaagacatatttaagtaagtcattgatggtaacttttcaaatcattaatcaaaatgcctatcaaattattccaggtcttgttttcattgtctaggatgaacaagcttcataatgaggtcttgagtagggtctgagtccacaaatctagttggatccagacgttttggtaaaatgttacctgtgatttctttgcattctaccccaaccttaatgtatgaaaaaacagattagtcaagtgccaaggcagtaactagaaggaacaaaaagggctgtcatgaatataaattgagaaagtgagactcctccaaacagcaggagacagaggtaaactttcattgcaggcattcactcataagcaacatcacaacatccacacacaaatctcttcagctgttgacagtctccttattctagcgctcctccccaaattgtcatttaatcatgtgtctaaacattctctgaatattgtccttcataacccaactcctgctgcttactgcttcatttgttaaaagaataatattttgattcatcacaggcattcctggaacagatcaggatgttacagacatggccctgtggctttatctcacaaatcaacagcagaaacacaggatgagagggaataattaggtttttggatatatgtctctaagaagatcacaacttagaaatgtatttttcagaatgataccatcttgatgcacacagtcgcaccaggtgaaaggaatcctctctgtttttagggatgagactcacatatgagtattcagatttctttttcatccagctatcactttctcccaaccccagccccaacttaagctccacttggaccctgaaaagtgaatactggacatggactcaagcgccagatggcttagatctggattccagaactgctgtttactggctgggtaaccttaacctccctgtgcctcagttttctcatctttaaaatgaagatagtaatagtacctatgtcacagggttgcagagatgagtaaatgggtaaaggttgtaaagcgattagagcggtgcttagcacttgacaagctctgtatgtattta

SEQ ID NO: 554 - DNA, 4043 bp, Homo sapiens
gggaaggggaagtgatccacgaatacttattgtatacctaataaaatattaatattggtagccagcattttttagcacttgcctcataccagatattgtactaaatgttttaaatacattattttattttatccttacaattgtcctatgtgggaggtatttgtggtttatcgatgaagaagcagactaggagagagtctgcacaatgcttatagtgccatggcttataggtggaggtgccagaatttgaatccaggacacctgactttacagcccatgctgttaacaatttcattctatttcttttctatgtgctgggcattttgtagataatctgggaagttcaaagaaatgaaaatccagtctctgacctaaagttcttatacagtatatagaatgagaatatctgtcataggataaagttggtcaagcacttatgtctcatgctgaatgaataaaataggtaacaaaaacctgccacaccagccactgaagattggagtggggagaaaacttacagtgtaaggagttcaggtggtctttggaagttatttattttatttttattgtttccagaagttattggggtattggggtacaggtggtgtttggttgcatgagtaagttctttagtggtgatctgtgagattttggtgcatccttcacccaagcagtatacactgccccatatttgtagtcttttatccctcgtctccctcccactcttaacccctaagtccctgaagtctgttgtatcattcttatgcctttgcatctccatagcatagctcccacataccagtgagaacatatgatgtttggttttccattcctgagttacatcacttagaataatagtctccagtctcatccaggtcactgcaaatgctgttaattaattcctttgtatggctgtgtagtattcactcacatatatatgtgtgtgtgtgtgtgtgtgtgtgtgtgtgatgtgatatatatatgtgtgtgtgtatatatatatatatctcacagtttctttatcctctcattgattaatgggcatttgggttagttccatggttttgcaattgtgaattgtgctgctataaacattcgtgtgcaagtatctttttcgaataatgacttcttttcctctgggtagataaccagtggtgggattgctggataaaatggtagatctacttttagttctttgaggaatctccacactgttttccatagtggctgtagtagtttacattgccgccagcagtgtagaggtgttctctgttcaccgcatccatgccaacatctactgtttcttgatattttgattatggccgttcttgcaggaataaggtggtatcacattgtgttttgatttgcattttcctgatacttagtgatgttatatacaaatggccaacaaacatatggaagtcatttttagcacaaaacttgcctcccatggccatgatcaacaaagtgctatgggtacatggctaaagaatcaggagcccatctggtgatagctttggctgtggatgatttaaacttcagtcttttcctgattgaggacttctcattccatgtctctaatggtgatattcttagtcatcttttctggcaaaataagtggttgtttctaaaattaacttcccaagtgttagtttaactaatgaagggagtgtttcccagtttcactgttctctagctgtagatctctggagtatattccatgtgccagtgtgttcacatgcagaactagggcgttgtttaatgtagagagacttcaggtgctacccatgatatagtcatggctgcaagcaataatgggaaggagagcaagatggtcagagattgggccacaatttagacctgcccctttatcaaatgcagctatgaggaatgcggtggacaccatcctatggcatcaaaggccggattgcctcattcctttatggaaggtgcttgaatttctcttctctccaaagccatttaaggaatctggggcaatcctgccgtttctgaccataattttcccatatcagtacccctaagaaagaaacaatgctaataaattatgttcacctttaacataactctacaccagggaaaaagaagaagccaactttgctgttattgttgccttttgcttttaaaaatgtgtgactagaaaagtagggaaacaaaaagaggcatgaagttttcttagcaataaaagcacacttttttggggagtcatgcataggggagagttgggccttcaacagagagatgtctttggacacctaccatagtttgtcagttgcagatgctaatggaaccaggcctggtgactgaaggggaaaatggaatatgaaagcaaaatgaaagaagcctatgaagcaagcatgtcatttccaaatgaaggtttcatgcaaaggaattgagtcttttcacagctgaaaatggaatctttaaataagataaaataaaaggatgccgtggcttgttgcgagttctgtaatgaaatacagttttcctaataccgtgtgacctgcatttctccctgctttatgggtgctattccttgacgtacaaacccgtattttctcaagtcagcatttgatgatggatgtcaaaatacaggccatgtattatgcatatagcattaccgatttaaggtgtttacttgtcaagttgaagaaattcaaaaacgtcacatccactgaatctgcacagctgtcacttccagtttttcatgtttttgaatgaaacttctaatgaaaacagtttagttttccccttcaccatcctagaagaagaaaacagctagcatttaaaaatgcgtgtttttggttatgtggttggctgaaaaacatatattcgaaagtttgaaaagatggacactacaatgtcaatcaaaatgacttacccttttcatagtgtattaatgtaaagaatcaatttaagtgcagtcagggaatggatattaagtaaaactttgtctttctttttgaaagtatggcactcagtgataagaaatgtatacacgggagagcagaaagtaagaaaacccttttatatttctctggcattttatgcattatgcacctccaaaacaacaggcaattattgagctcccgtatttcattcctgactcacacctagccaaaatgccagactcaacacaatcttgtcacattgctggaaagtgagtcagatatctggtcacataataatctatttggagttttatccttggaaatttagcaagtgactttgttcctaaaagtccctaattcattggtaagcccatgtagcattccgctgaaggaaaaaaggagaaaccgaagtgagtgtgaatgcttgcctatcatctaaatgtaattgcactgggtcttgccacttgcgtggagctgccgtatgcttcgttagaaaaattaatttttaccagatgaatgtaggaagtaaataggtttctaatattgatatgtgtccatgcaaaaccttaacgaggcagacattctgcctagccgggatatttctcactctcactaaactgaaagttacagttgttccaacctcatccaggtatgtacttggcttggacctgggacccaaagaagcccaaactgcaaaatcagagaccaagcaggctgctttccaattttcctgtgtccacatataccttatgtggtctgtgtttggcacactgggaagttcaagggatcagccataagcaggtggcatatacattagtcaggaggatttagatgcaagtaaactccttctccatttagcttaaacagaaagaaaaaaatgtgaacatcttattatattgtgtgtatgtatatgtataaatacatttgtgtatgtgtgtgtgtgtgtgtgtgtgtgtgtgtttatgtgtataaaatctcacatagggagaaatcctgaggtgggatggctccaggctgcttgccccaggaactccaggacagctcttcctgtcattcacttgagccaatatcactaagttagttatgccctcagctggtgcctcagttcctggcactacaggcacataaaaccgt

SEQ ID NO: 555 - DNA, 4036 bp, Homo sapiens
tgtactagttgggacattttggcacaagtgaaatccaatgcaaaaaggcttaagtaaaaacagagacatataactggaatgtctctggttttaggcacatttgtgtgcaggaacttgaacaatgacagagctctatctcattctctccacctcttggttcatttgccctgttttcattcaccccatggtgggctaactgcttgccagtagccccacacctgcagactcctgactttgcaaccacagaacctttaccatcttttacataatgtcctggggagaatacggacaggccctagattgaggaggacagactcatctctaaactgatgatgtggccaggattatgcaggaccatcagcggccctgtgaagtcaggatgcctggcttcatgttgccacttctgtttccagggtgggggcggagtttcttccctgcacccccaacaaacactgtggaatgggtttcttatgcatagaaggagttaaaaaggaacagaaaacagcagatatcaactatcctggttctgctgctaactggttctgtgaccttggatataataacttctccattctaagcctcagtttcttcatttgaagaatggaggaattgattagaggattttgaaaactctcgtgtttctagcatagaatgattgctgaagaggcaaaagacaccttatggtttggctcaggagtcacagaattatctgtttatacagtttccaagcactgtcattaggctttgtgcgggggagtcacaaattggcaggggcatttccccgcttccctccttgacactgacctccagcaccttgttgggggctacctctaccctgttggggtggcctttggggagtttcaggagaagctgctgccttggtaaataatcttttttttattgagtaaacatggtcagctgcctggccttcctgactctggattctagcttcataggaagccactgaaaactactgtgaaaaaatattacaaggttaaactgaggtttttcctttggctggatttttcttgcagtcatttccaaaaacctgtttcccaaatcaacctggtgtgtgtggattttcttcccctacaagttagaaagcaattgtgcttctatacatggaattttctttacttcagctgctgaagcattcgttggaatacatactgcaaaaatgactgctgtggctattaccgtagttgctcaggggagctattcagatgcctcatttattggagcttaatagattaaaagtccaaattgagtctcatgatataagcctaatcaagttctaatctgcataattttcccataagcagcaatgggaaatttggataatttatgtttcagcagttgccaatcatgtgttaaatagcattgttgcatttacttatcaaaatatttttattgatctgcacttcatctgacatttgcctttgaggtttttttccctggcattaacaggaaatttaattcatctcatagatgatgtaatatgagatgtttctcttgattttaacatgtctttatagatcatttttaaaggtgatctttcccttttacaacttcatattgaatacctgtctcagcaaacctagatgactcggcctaatttatttccctagtttaacgtagcatatggatttctaaccatcatttatatgcacacaataaaagataatttggcccaccatttgaaccaattcctttatgttaagtctatcggggtgggagaagcacttaccttcatttctccatctattctaggggagatgattgataagaatttccatctccctctctccctggaaaggctcagggatttaactagggaagatttagaaagtactttgtgtttcccccatggaaaagtactgtaataaagcatttattatatgtactgagttgtgcatgctgccataccaaagcaagttaagcataactacaatgggtcccagttgttatctgctattgtttaaaagtgaaaacaataaaaagtaagactggctcaggcctcagacttgcctgccagggacagtacctagaaggagaaggccagcacccaagtcagggatgcggcacagcctgcaggtgtcaggagtctgaggtcagactgcctggctgcggctcccagggacacttaccaattgggtatgcttgagccagttatgccactgctctgaatcttattttcctcttctacaaaatgcaaatatcaacagtccctaaacacacagggactgttatgaggaataaacaaggtggcccatgaaaaaacccttagcccagcctggcacataagaagcaatatggcgtggtggcttagaggagacactgggacttgtttatctgggttccactctgagatctgctaattcctagatgtatgtcctggggcaagttgcttaccttctctgtgcttcagtttcctcctctgaaaaatagtagtatatacataggatggttctgagaaccgaagttattacgtgagcaaaattcagtacatagtaagcactcagtaagtgttggctattttttttctttgggttctagttcagccttccccctctcttcttcattctcaattattaaccagtttaggtctagagtattcttgcctttgctttgagtctcataaaaacaatgccattgagcctttctcattttccaatgcacttgggtttacagtgtcctggaacccttttccagccattacttgtgtatatcttgtctgagccatagtccttctttccttatgatcacataaggaatattgtgtgtatatatatatatatatatatatatatatatacacacacacacacacacacacacacacacacacacacaatgctcattgccttctcattagtattctaggattttctgtgtgtgaaaaatcttttttaagaatctactaaatacttcttcagttctttatccatagggaaggggaagtgatccacgaatacttattgtatacctaataaaatattaatattggtagccagcattttttagcacttgcctcataccagatattgtactaaatgttttaaatacattattttattttatccttacaattgtcctatgtgggaggtatttgtggtttatcgatgaagaagcagactaggagagagtctgcacaatgcttatagtgccatggcttataggtggaggtgccagaatttgaatccaggacacctgactttacagcccatgctgttaacaatttcattctatttcttttctatgtgctgggcattttgtagataatctgggaagttcaaagaaatgaaaatccagtctctgacctaaagttcttatacagtatatagaatgagaatatctgtcataggataaagttggtcaagcacttatgtctcatgctgaatgaataaaataggtaacaaaaacctgccacaccagccactgaagattggagtggggagaaaacttacagtgtaaggagttcaggtggtctttggaagttatttattttatttttattgtttccagaagttattggggtattggggtacaggtggtgtttggttgcatgagtaagttctttagtggtgatctgtgagattttggtgcatccttcacccaagcagtatacactgccccatatttgtagtcttttatccctcgtctccctcccactcttaacccctaagtccctgaagtctgttgtatcattcttatgcctttgcatctccatagcatagctcccacataccagtgagaacatatgatgtttggttttccattcctgagttacatcacttagaataatagtctccagtctcatccaggtcactgcaaatgctgttaattaattcctttgtatggctgtgtagtattcactcacatatatatgtgtgtgtgtgtgtgtgtgtgtgtgtgtgatgtgatatatatatgtgtgtgtgtatatatatatatatctcacagtttctttatcctctcattgattaatgggcatttgggttagttccatggttttgcaattgtgaattgtgctgct

SEQ ID NO: 556 - DNA, 4045 bp, Homo sapiens
aagtttcactcttgctgcccaggctggagtgcaatggcacgatctcggctcactgcaaccttcacctcctgggttcaagcgattctcctgcctcagtctcctgagtagctgggtttacaggcatgcaccaccatgcctggctactttttttgtattttcagtagagacagggtttcaccatgttggccaggatggttgcaaactcctgacctcaggtgatccacccacctcggcctcccaaagtgctgggattacaggcatcagccaccgcgcccggctctgtgtgcccttgtacacgttcactcatctttcttcatgtatatgaatgagctgtcatctttgcaggtcatttcaaaccctccaaaatttaacatactcaagcacaatagattttcacaaaatgggccttcacctatgtcttcacagagtttattggttaaacagtaccctgcctatagggccagcccagagaaacataagcgatttctatgtatgtcatttgtatttcttgtagtttgaaatcacgtgtgtacaactgcacagggatcatcttatatcacaattacggctggcttccctacaagatgaaaattaaaagaatatggatgcaggcaattgaagcttatgcactggcaaaatgattcaggaagttggttggacttgttttgtaccaagagatcacaggagaagagggcattctccttctctcaaaaagacgctgctccagagcttggaactagttgtgtctcagcagcaaccacagtgctaaatgccccttcctccatagttgcacaatattttagggcctgagaatagaatcatgactaccagtgactcataaaagagggtagataggctccatctctgcagccaagtctctttccaaagccagttctccagaaagggagattagaggaggacattcccagatatgtgacagttggcaaacccttggtctacacaatcagtgagttgaaggtaactcaggtcaccacacaggcaaagaggaagctagattcaagctagaggaccaatgaagctggtggccagacaggagccccaaaatgatgccgcgtggccactggggagctatggcatggggtggcctgatgattttgctgtggcttcacctgaagacacagagcatgtggaggccatggccctgtcctaacctaacccttctattttccctatgcttgcattcccggactctgttgttacttcctggatctgggatttttccactgtcttttgttgttattttttatgttaaaaaatctgtttactggcttatttattttttaaatgtacctgtaatatacaaatatgttcttgttataaaatattcaagcaatatagaagtatataaagtgaaaagcaaactttcccctcacccccacgaatcctatttcccttcccagagggaattaccattattagtgtaatggctatttttcctgtgctttccttccaaatttacatacatttatatatatgtaattttattttgtgggtttttttttttacataaatgaaactatacttttttttaactgctgtagaactttttttttcacttccccctctatcttaggcttctaaaccaatgcctgcatggagagccagctctgcctctttacctcctgcatacattttcactgtgtgcatgtccaaaagtatatttctccattcctatgttgttggacaattaggtcatttccctgtgtatttttttcttgctgaaaatatgcaataaaattatatgatctgaagcttaactcctttccatatctcttttgcattgcacacattaattccactccatccatagcctccaaattgagccgcacatccaggcccacctcatcactctgtgctcactggccatttctccttggctgcattggaactgctgtcttttgcctgagacagaagtgacccgctattaaataaacaggcatttgaaacccacccccttgttacattctgaaagccagaggttgccacaggacagttacttaaatcaagacaatttccaggcaggaagaagatgtagaaccctggcattattcctctcccgcgtttgttagtaatagcttgattgagtattgagaacaagcttaaaatgctgccatcagcaccgactaccctttagattagcacacagctcctattcccttgaatgtagttaggccagcttaatgtcaaggcataaaaaagatacttgttaaataatttcccaaagctccgactcaatctttaatttgttttcctctttccctctcctctcacttttgctcctctctctctctctctgtctctttctccccccatctctgtttttttttctttcctctatgccaaagggtacgccattaagtcgggctgatttaagggctgtcaacatcaacctctgtgacatgtgcgttatcctgtcagccaatcagaataatattgatgatacttcgctgcaggacaaggaatgcatcttggcgtcactcaacatcaaatctatgcagtttgatgacagcatcggagtcttgcaggctaattcccaaggtaaggacagcctgtaatacttctttgctgtgcctgcaggggacaggggctggcaagagggatatccttcactcagtaattcaaagaggctcacatcagcctgcctggcagtgaaacctgcggtcaccatgatggctttcaaaggggcatctgctgcctcttctttccattccagaatgcaggcttgagacctggtcacccacacacagactaggttgcctttccagaggataaacaagcctttaaatagccaccccctcagctttcccaaggagtggcttcatgaccagtgtcatcagctaaatgtcagagcactgaaaagaagctggctgcacaattctgaccgtttccttccagtatatgtttttgccattgagctgggatgggaatgaagctttgctattgttagagccgcctctaggactctgctgaccaagggatggtaatctctggagagtggcaactctatggacactaaaagtcatttagcaaatggtgacacttgtcagaccacacattttcctataggaggcaaagcagccttaagtgacacacgtctgccttcctactctgcccctagtctttcctgtcatttgctttgggaccctgggcaggtggttacaagtaaagatgtctaggggtctcagaaaggcaacacagcaaaaccttcataaaaaatgacctctgtaatcaggatctggcaggataggatgcaaagcattttccattgagtgacacctccgtgtaggctagccatgaattggaggatagttgttacagacgagctgccagagggtggcattggctgcctgatggggaccagaatcccatcagtccaggatggaagggtgtaggagcacagcccatgagagctatggctactgggatatgaagcatcaccttattgatagcttggcaagtgtctgacctcctccccatcatgccaggctttctagaagctcagctgaatcatgcatcctggacctgtgagctacattattttttgtcaacttgacatcaccaccactgccttctaacatttgcttagcattgcagaaaagccaggaacaatagttcctggaatcctcttccctgcatggctctgggctagagtcagctggtgggagatgggcactggggtgagatttggaaagtggaggagaaagataggctttgattctttggaggcaactgcagccagaccctggcagacccaggttcaaatcttctatcagatgagctttctgggagccagtgtcttcactgctacagactgagagaggggctggggcttctctgaggatcttgagattcacagcagcttctggtcaagcttaagagaaccttcccctttggtggtgcatgtgaaatggcttctgtccttctgacatcaccctgatacagcctgaagcctaattttgacctctccatgccaccgtcctccctgccacacccaaatctaaatcttggtatccacctgctcagc

SEQ ID NO: 557 - DNA, 4033 bp, Homo sapiens
caaccacttcctctgcatctttcacatcctctgagatgtaattcagggggcactttccatttataatttatcacattttccacttaggttttcctgtccttttcttcccaggcatgaccccttgttaattcctggcaatgatcagattgacaacatggactccaatgtgaagaagtacgactctactgggatgtttcactggtgtgcacccaaggagatagagaaagtcatcctggtgagtgagggactgtgcatctgatgttgcccgcttctgccccaaaccacatttgctaggaatggggtttccctagttggacagtgggataatactgtccctggtcctaattatttttgatgagtgaaattctgagcatagattgaagcagctagacctctgatcagaacataagcaatattcagatttttcaatctctgaatatattggctcctcataagagtaggtgagcacttgctgtgggaaagccatggtgggaggtggtatgaacataattcctgtggccatggcgctggtgtcagagcctgcctgtaccaattattagctgcatggcttgggtaattcatttgactttttgcacttcggttttcttatctgtaaaaagatgagatgagaatgaccctaactcatagggctgtagtgaagattaaaatccaacagatgactcagtaaagttacctcttattcttactattattaaatgctgtgaggaaagctgaatgctgcctgtattgttattggtttatagcaatgttttgtattcttatagataatagccttgtgcatctgtgagctttcttagtgcatgttgtagacagggaaatgcatgatgatgcatgacataatgatgacaataatgaactacagtccccttggggaggctggggctcagagccctatttcgtggaaggcttgtgaacatcttcatagcagcagtgggctcacccagtctctcccaggaatgtcagcataggtaacaatccattctactctctgcccttgttctattaacagctttgggtcttaatgcctacactggctttcctacagtttattgtcttgctaatccatgagaaatggattaataatcaggaaagtcagatggaagggttctttctcccttgggcctctaatccccagattggtatgggtctgttcctttttgtcagccaggaaaatcctatcatttctgatgtcaggaccacccttcctaaacaaggactgttctgggtcctcggaatggctttgtatgctaacacactggactttcccctatgctttatctatgtgtatgtgtgttctcagcttaattataaatgagcattaacagccaatacagtatcaagctggaggctgtctcagaggtgggaaagttgcaggcaagagcacagaaagtcagaattcttagcaaacagctgttgtccaactgaccaggagtgcaaattgttctactcgcaaagctgcttcacgtatgtacattctttttgttttgttttgtttttttgagacagagtctcgctctgtcgccaggctggagtgcagagccctatcagctcactgaaacatctgcctcccagattcaagcgattctcctgcctcagcctcccgagtagctgggactataggttcgcgccaccatacccagttatttttttgtatttttagtagagacagggtttcaccatattggccaggatggtctcgatttcttgagctcatgatccgccaaccttggcctcccaaagtgctgggattacaggcgtgagtcactgcacccagccatatatgtacattctgatgtattcatggcacttttgccctggtggcctaaatttagcctgatgttaccacttgtggcaggtcacaggctggatgccgtatctgggacctagggttttaatgacttgcctggatattggtgtagtatgcatgccaactgatattcaatcaacatctcctgccagcataaaaaagtttaaggaggtgagttactacttctatcctatgaaaaataacatcatttaacaaaacatctccaggaggcctactatgtgccacacaccattctagttactggagatgcaatccctgacaacgactgctctcacagagcttgtgttctagcagggtggggctgggggaagaggagttatctctttgtgttctagcagggtggggctgggggaagaggagttatctctaggtagacaaatgagtacttaataacatttcagatatttataggatgctttgaaaaaagtaaagcagcattgtaggctagaaagagactgggaggtgctgtctggaaagtatgatccaagaagccctctctaaagtaacacggctagagataagaatgacaggtagggccagctacatgaggatgctttgaggttgtgtacccactgggcacgggaaactaactactttggggatttgaagatataagagatagtcccaattgtaatttcctggattaattagagagaagatataaaatgtaacccatgaaacagtgtatttaaagctaagtggtaagaggtgcaaaatgctattgaaatgtaggggagaaggactagggtgtgtttaagtgaccaggcaagtcccgtcatacacacataggttgtgcttgggttgggcctggaaggatgcatgggaattccagatacatagagaaatgatcagtttctctctctagtgtgctttaaacccggcaaaatcagacacaccggggctgaggctctagaattaggatattcataaggttctctgggtgatgtagctgtggccagtctgaggatgggtgttttgatcccagatcgaagttcctggggtcagcatctgtgcctcggccactcaactaactgtgccttccccacctccctattctagaattcacttccaccctgggcccagtttatattcctctggcttgttgaagggagctagcctcccaggtgacctggccaattacaaataattaggagccccatcacataacagtgctttatagactggttggctgtctcctggtggcacccaggcacttgcacttccgtgcggcccagataactaactccaggtcttctgcaggaagtggggatatgtgatgtgagctccccagtgggtcttccttggtcacagtttctaaggcatttcttacagcttatgtctccggtttccctggactattgcagagggaaaccaataatggtgacagcccctgctttattctaatgatcagagagtgaaagctagtttcttcctctccttgggggttactgtaataaccctgacattgttgtgaattgcaacattggcatttatacaatcaatgcagtggtcaattctagagattaaatcaagcagagtttgatatgtacagtggacattaatatgcctcccccaaagcattgtaagccacatggggccatccaggcatgcagtgggtggacaggaatgggaggcattgaaccagaaggagaggcagagaaaggtccacggctggcctcctggcttcactagctcagtgaatcaaagggccagcagtgactaaacatttgtatttcctgggaagttggggttctcctctaatagagtgactgtgttctttcatttgtctcctttgtagatagaggtttggagttggaggaagacactggcctgttgctcttactaatctctctctagccccttgtaatgattatttggggagatcttttctctgaatgatttaagcaaaacaggcccctccagaaatgtccctggaaagtccaaggcagcattggacaggggtcagcaaactttttctgtaataagtcatataatgaaaaatttaggtttttcagggtataagatctctgttgctactgattagctctgctgttgtagcataaaagcacccataggcaatacctaaacgtatgagcatggctgcattccaatacaactttatgggaatttgaactttatgtaattttcacagattatgacattgtcttcttttgattttttttc

SEQ ID NO: 558 - DNA, 4054 bp, Homo sapiens
accctgacgggtttccttccagttctctgtagaggggatgggatcagctggagtagttgaagacaagaaatagccatcctgaaatcagggtaaatttacctggctgggctgtgaggaataggccttgtgagtttcacgggacccctttctgaggcattagataactttattttcctgttgaataagctctccagaaaaaaaagaaaaatgagaacttcaatggaactggacagttgccaagggcctccctgctttatttccatgcatgaatgtgtgtttcttaccttggaaaggaaagtgggctgagcgagctaggcagtttctgatagacttttgcaagatgcaaagcccacccactatcctctttgaacttcagtatttaaatcagaagaaaaatagctttcccagaggcttcagattattactaaatattgtgcaaattctatcatttggaatgtaaacgcttacactctctgccctttatacctccaactgtgccctcaaacacattttcctgctctagccaaattgactttcttacagtttatacagtttagtattttccaaccaccttgccttggttcaaactgtgtcctccacctggcatgcccttcccaccctctactgccactccttagtctgttcagcatcatgggtcaagtgccccctgagtgccaggccctgtgctccatctggggatatacgggacctctctattcatcctattcttgtttcaagtcgtcttctttttcttcctttctttttttttttttttcctgaacaattctctctctaggacttaacttattgtctaagacatttcatgtagccctcccttgacattctcatgcaacatcttttgtactgttgcatttatgtaacttatgagttcgtatattcgtatttaatgcaattatctaatttctctggctaggcttgtggttctctcttattgtgcatctttaaaaagattttaaagaaaagaacaagaaaaaggtatgcccgacattaaactcagagtcattacaaatcagagccagaagggtctcatacttaactaatgctcatccccccaggaaagggaagtgtcttgccaaggccacacagttgatccaaggcaggcctagaaccccggggctcctgatcactaagctgtgcttctcccctttgcaacatcgcctctgtagctgctcggagctatttattgggaacttttcagggcccagcattgtgagagactcagtgatatgtgaactccaacagaggagcttataagcctagctgggggagtagaacacattagaattgaacacaaattataataatgcaaggcatgagatcagaagtgccaggggattttttaaagaaaggagagaattgatcttgtcataatcatctgggaaggccccctggaggaggcagcctaggctgtcccttcaagggtggtcaagtagtcaggtgaaaggaagacatggtgggagagcctggtgaaggagtcactgcctctctaccccgccatgcctctgccccttcttctgtctcccatgtgtctgcacacgccgatcaatcccatgacctcccagcagaaattcaagggaaagaaaagaggccctcacaatcagacggcgtgaatttcctgtaatttagaggaaacagtggggttcctctgtccccatctgtctttcatttgttcttgccctgaatggttccagccttctccaattgaggtccgtttaaacgttttctggcttttcttgtttttatgacatttggcaaaacctaattatttgacttgagcacttcattggggccatatgaaacaagggacaaaggtgacagttgaatgagatgcaaggctaggggtcaggtgggggtgggaatgctcaccccattctaagtgttggttagcggctcaattgcttggggaaggagagagagtatggacccatgtgaattacaccatgtccaaatgtggcagactggtgtggagaaggacccagcagcagagaactctcattgctctgactcttcaaagccaaggcaataatcatgggtagcatttagaaagagctcaccaggaattcttttaagtgcttttcacattttcagtcaattctcacaacaacctattagataggtactctaattctcattttattggtgagaaaactgaagttagataatttgccaaatacctaggttcagacccaacaatgtggctttaagacctgtgtggttaactcttaacctctctacccactcaatgtgagtaggcatttgtggagggatatcccatgccttaaaatctttatttcggggatggtacacttgagtgtcactggttccagggccagaaatgcaaacatggggtgtctgccctatatatgggggtacagtaggcagcagtggggcatttgagcagctgataagctcctgccccaggagaatggcacccttttggaatgaagactcagtcctctacaagatttttaattagaagttagaaatccatatttgtatggacaatcttcagacttaaagattgtcccacatgtgaaatcctgtgtatcagcagggtggtgccaagctcagcacactggggacagtagttggtcctcaggctgtcagcctgcagccccctggttatgtcacataatcccaaagcatctccgaaatttggtgtccttggtccagtagggatcacagtagatcgtaggacattgaggtatggagtaactggtctgagatcagagctctaaagagggtcagagctgggacttgggcaggtggactgactcaagaagctcatatcctcatgctgttctcactcacaggcagaattctggcagcaaatgatctgaattagaagtcagccgacctgggtcctgggtcagggtctgcgtatgagtgcagctatgacgcaaaagagggtgaggccagagcatccccaagccgcttccagcccttctgttgcactccacaccttgttctccaatgcattgaccagaaaggcccaccatacactagcattataaaatattgcacaggatgtgtccgaggataaattatgatagcatacagataaagattttatagttcaagaacatctatagaaggtgattatgcccttaagaaatatactaaatgctgtgtttagtgtaaagtcataatccacactggtccttacctcccaaggttaaaagcatactgtatttctaaagtgttctggcagaatattcttcgtcgggcacctggcttgcactaaaaacccatgcattttacctttatctgagtttgaaagaaattatcagtgcacccatctggaatatatattagaattctagggggctcttgacaccattggctcaatggaagatatggtatttccggatgagccaatagtaataatgttaataataatagtggtttgtatttatataacatcttatggtttagaaaacagtttcacatatacacaattagattctaggctggtctttaaatatcacaatcattggggcaagcattaatttaaagaatgtaaacagcaaagtgaaaatggaaatgaaatgtgattgacatcttctgccagtcatggctatttgaacctgtttgggggtggggggaaagaaaaagaaagtaacattggtgtcaaaatatgtaagcaaataaaaactttcaccccaaagtggaaatgtaaatcaacattgtgttaaccaggaggatttgatgtgggatgtgaaataaagtccacgagagacctgaccccagctctcttttctgtttctcactctgggcaggtggcaaatctcagattcctgaggcagcatgatcttttctccactccttgggatgcctgacaatttgtaaatccacgaggaagtgtttgttgcaagggccttccttaacaatctcatgcaaacagcatgaagtgatcaaaagaaataagtcttgtgttagatttgccttgtccagttctgtggggtggcagaaccagtacctcaaacacctttgagaaatggtgttcagggctggaaattgggcgaggtgagag

SEQ ID NO: 559 - DNA, 4056 bp, Homo sapiens
aaataaatacctgtccttgctttgttagagcagaggatgaaaaatcaccaccatcaacacctaggaatgaaacctgtgcctagtccctgcttctttactctagaggtgcctcagtagatgtgtccagtctaacagagacaagtatgatgtataataaggaggagaactaaagccacagagcacaaagtgtttttgtatcgtgatttccagtggattgggggtccctgagtatatagggttgagagagaaactaaatctgaggacttggtctccaaaatgggagttgactctttccatttggaattcctgctagttttaataccacaggccagagttggcaactgtgataccttcagactgcccccaagaaaagaactttccactgccaaagggcttcagttgccatcgtccaaaggtcgacctcaagcatcatcgctctttggggtagactagactgggctcagttgtttctggcatattctgtctcaagtcccttctaaagcagtttgccactggggcctcttgagaaagatatagtgagtccagaacgtggaattgtgagctcctgagataccatgacttaagtggtctttgctttgagaaggttgtgccttttgcagtaattatgctgtattgcctaatagaaattgttctcaacccttgaaaaacaaacaaaaaatgatgccatccttcctatggtgagttagtcttttaaaagctccttataatcattgctttgattctcaccctaaccccatgtaattggcaggggtgttattaatcccattttacaaaaagaggaaactaagcttccaagtttgagaggatgagattgctgacagtcacacagccaacatacagggatttgggcacacctgaaggcctctattgattctctgggtgctctaacatttttttgcagaagggaaaggcaatgtgggcagtcttgggtctgatgagtaagaacaattatgaaagagtaccccataaaatccttgttcacaagcagaagccagacagaagagcaccattcctaaagtatgccactgaaggaaggacctttttcattgtactcctagagtggggtacagaaaatgtagaaccagtcatctataaatatcactctgctggagggtaaagaagttcctcaacccatggggaaaattcccttggggtgcactcttggtctagagaagtttctgcagaaatcccctcagggtggggcagcttaggaccatgggtttcctccccctgtttccactgacttaatacagctggtccccttcccccagactcttatcgagatgagtatttattgatatctcaaaacaagagcctctaatttcttgggacaagaattccccgattctgacaacctaccgagaagagcatctaagagagaacaaggcctagaatgaacctcactccccattcaacccccacagaccccatgaatccaaagaccttcttcaccaggcagtccatcccagccatgcttagttggttgtggacacagcagcacggatgagttgaccagacatctcctgaatcatttcaatcagaaggagcacagcagtctgagggttgagggaaataagagagaacaacaaatacaagaggtgaacacttctgtaaagaaacgcttgtagtgaggggttgggaaagggaggaaaggtgaggccaataacccctgacaggatatttgccagaccctcatcccacagagtatcaaggaaatagcaagactgtgattcacatattgattagccgttcacatatttttgagtatcttctttggatgagctgctatttttggtttcagggatggagtggtcaacaaggtaaagtccctgccctcctgaatcctttactctggtgaatggagacaaaccatgatgatgtaaataaataaattcagagatagccagtgctaagaagagagaagagactgcctgagggttgaggaatcctgcagtggtgctactttatagcttggaaggtcaggaaggcctcagtcaggggtgatgttgaggccaagacccaatccagatagggagacgagcaaaggtcaaggtcaggaggcaggaataagtttgtggtgtttgaaggatggaagaaaggccagtggcactggggaaagggtagtatgagatgagattagagacggagacaggggacgtggtaagaagtgtgggttttagtcctatattaggaagcctttggaagattttaagtgaggaaatgtcatcattagttcttagtttaaaagatgtccctggtgtctggatggagagcattctcgggaggaaggagtggaagtggaaggatgaagtgagaacttctctgactcttgctctgacattggaatgtccctcataggacgccatagtggaacacagcagactaaattgtccctagaaataagaaataaggatttggcctctagggtatttttccaccttggttccagacaggtaaacagcagcaggctttagcttcatcctggagagagaggcccataattgtttgaaataattttcttctcttcatttcctttaaagttggtggagctagtgaggtatataatctcccattatgcactgcaccaattgctgcaaaaggcctgcctctacaaagccaagccagtgtaacaagggcctcgcttccttctctgtacatccctgtgcctcctcccccaacctcagcttcttcatctcacaaaggcctttggctatgtaacaatcagaattgtctgaatattgctcctactaattaaaaggccatagaacagagggcaggatgcagatgtgtgtgtgaggtgagggggtggttagaataaaatgaattattaaaaataaacctccccatgtaggtcaggcaagtgaggaaattggagaagatgttttagttgcaaagaaactttaattagaagaaactaggattattagtaacacactggggggacccccatgccttcgaacagacattgcttggttccctctctaagttggagaagacagctgacccacatactcatctgtccaaacgtgttagtccaggtattaataattcaccctggaatggtagatcccatgagggcagagctcatgacagtcactggcccttacccatagcttcctaaccctccttccccaacccagccttcccctttcacttccacccctagctcctcattcactttcattcagtaaccttcaacatttcacgtcatctcatccggagaaatatcaggtgcggacattccatttctggaaatcctgtgatagtatagtttaacgtttgcatttctttccatttcttcatagctctctatcaaggaaaagagtcaaattcagctgtctggccgaggagcaagttctcagggtctactatttactcattttctttttctatataacaaaccttgtctaatgatttacatttcttcccccagactctaaaagtttgccaaagtgtggactcctagtggacaagtaatgtctagtttgatgtgtttgaaggaattttctttgacttcaaatcattgacatatctttgatttattttttttctctttgctgccttggaatacggcccctactctattttaactgcacactggtagtgatatattgtgagtaaaacgggttcccagcagcccggagtccagttccccctgtctttctctagaagagatactcttttaattttctgtacagttttagtttcccttttacttttggtatttatgttgcatgtagcagtgacatcatgccccaactccttcatcccccaatgcagtctacagagtagcctggagccagagagtccccagggagcctgctctccatccatccaccccagtccccgggctctggccagcttcgggcactgtcttatttttctatttgaaaataagaccttgacaacagtgtgtttctcttgaaggccttgtctcaggacttttaagggacactgattaggctgaagtaattaccactataactccagatgcttcatcagctggggtaattgtcatgcttgcctttgataaat

SEQ ID NO: 560 - DNA, 4042 bp, Homo sapiens
cttctatgtgtcagtcatgtagcacatagtacatactttaactctcttagaggcattgtaagctagcgattattcacccattttacagatgagaagtgtgaggcttacctgcatttgcaaagccaggacccattttacagatgagaagtgtgaggcttacctgcatttgcaaagccagtgcatggaattttttgtgtatgtccttatacattattctgtagcgtacagttctttaccctataatttcatctcattaatgggcaaggtattttgataagaagactgtattatattccatggggtcagctagagaaaatctgtgataactttgttgaaaatgaaatacactttggatttttttttgcaagaattaaaaaaaggaacaataacccacatgcattgagccttctatacatcatctctcttaattctctaaagattattgttaccattatccacctcttgtaggtaagaaagttgagttctagggatatttagtaactggcccaaagtcaaacagctattaagtggtagtgttggaatttggacccaaattctgattgcagagccagggcatgtaaaaactgccttgcaggaaaggaggttaaaaaaatgtgcaaaatttataatcctgcctttctaaaacatcatactgaattggctttgaaagataaattcatctaaactgtatgagctctaacacttcaccctcgtgattgcatgaagtcagagggcttgttatacccatgtgaagagttggcggaggggtcattaggaggtgcttatggagagccgctgctcagtgcaggccgtgctattagtgtggactgctgctgtctgatttgggaggaatctcactgctgcctgtggttgtagggcagaacagttaaatcttcatagccttttggtattattgagtgttaataatagtcatgacacaagtacagtttcctcctgtcaggtattgttataagtaatggtagatgttcttgtgaccacaaaaaattattttgcaataatgatctgctcggaggtctcccaaccaggtgaacaaaggttcacctgggtccttcctgtatgactacagacgtatcacttcatgaccacaacacttctctggaatggtttatcagtaggaaaaaagattatgtgttaattaccatcctctatattttgattgtttggggcagctgagaacttcctttagactgattccaaatatctattaccttattaagcaacatcttttcagaacaaggaatacctctgttgtatctgttgttttattcagaatccctgaattcagtatccattaagcctgaagtcttttctcagtctctgcatcagacaatcttgtattctgcttttgatctgcagaaaattaaacttgtttgtttcatccatttattagattaggatacatttatctcttctgtcagtccaaacacaacttggtccgctaatctatttatgccactttgaaataggacaatgtatatttaggttcccacttctctgcagggcaagtttttttaaggggaggtttgcatttgttttctcaatttgcctcaattaggacatgctagacacacatcttattcaaacaccctgtacgtttttataaacagcagactggaattgttaagtatatccaactgctgacttaaaaaaaaaaactgtttgggtaaatccaattcttcctataaaggctgtacatggaatcaatttccatgtccttatcaatgtcatgaagacgttcagcttgcttccgcattggttacgggtgtcttgtaccattccctgcggtaatatgtggtgtgtgtacatgatgtttatgtatatctataggggtcccattaatgctctgtcatttaatggaaaattgttgtagcaatagcttcatcaggccaataatgcttccgtgttgaccaccaatagcagtttcaaaaggaatttattctgatggactttgcttcaaatcatgtgcccatgatggcagctagactgctccattatataaacccaggccctaataccttgatttgctttgatttcctcaactgggagcatgccagcctgggaagtaagcagtagtgcttaatgatggcattatccaactaaatgtatggggcagtggacattggactctggacaaaatctttggggaaagctttagactagtgggccccctataaacacaacagtatggtgtagccttcaaggttttattcagaacatgacctcacaaatgtatcttctctgtttgtttttgttcactgagcagtatattaattaatcctggaaaccatcttaagatccaagaaggtactttaggatttttcatcgcaagtgatgccaaagaagttaaaaggtaagagtttattttcaactggctttctttctggcccggctgtagacaccttgacccacggaagtaggcaggcttccataaccccaaaactccttaacatgtctatggccatcaactggtgtaagaaaaacttccacggactccagttcatgtagtgaattccacatctttgaatgagaataataaaattttagaactaggaagcctagttacctgctcatttattttgtgagggagaaaatgggggctcagagagctgaatgactgctcgaggtcatcctgattcctgatgattcagaacaacataacaagacaactggctccttatctagtgctctttacttaatattatctgggaaatttacttgagaattatcagttttctactactctccctgccaaatagaatttcaaaaggttgggattaatttcagatggaatatgaaactggctctatttctatttgtggcctcctaggtaagtggctgaagttgtcagcttcaattgttaagccactgtaagtgcagcacaggatttcactggcctacatgtttcatgacatttttattcgtatccttaaacctgtttaagcagcctaggaattcacagggccctttgcagcacaacatggaatattattgtatttgattctatcttatgaacttggagaaatttactagcagaaaatgtgatgcaaatgttcagacaggtcattcagctcaacagtaatattgcataaaatattttaagtacattattaattgtgaaggtctatcattagttatataagcctattgtcttcattgaatgagttcctagtcaaagccaggcctgttctaggtgtgctacattctttattgctgctcttcaaaataaccctggaaggtaagtcttctcaaacactcagagctttggtttcctcatctgtaaaatcgagataagtgatttgtccaaggccatgaggcacataagtaagtggtggagcccagagtggaactggtctttccttttctaaaatccactctctttctaccaaatttaataatactaccacattcttacagaggagggtttattacaccccagcactattctaggtactaggttctctgtatctaaaacttgttaaactctcacgcaaccccatgagataggtagcattactctttcccactttacatatgaggaaactgaggcacaacttggctaactaacttgcccaaagccatactgctagtgaggaataaagccaggaagttggagcttgcactcttaattatttgcctaggttaagcctgatacgctgagcacagaacgatgacatgtgaccgtggatacttagggtcctcttcctccccatccactctagcaaactaagccatactggctacagaagcttttgggaaaaagaaaacatgggctgttggaaggaaaaagaattcttaaactgagtgctctaataacttaaatttatttctgcaaattggggaaagattgccatgattgagttgtgggggaaaaatacctccctactcagttcacagaatctcccggttgttcaagagtatcctgagaactgggtacacctgagaagggaaattaggattaatgggactgaaccttccctctccctgtgctccaatcaggtctcctggagaagaagcttgtgcc

SEQ ID NO: 561 - DNA, 4051 bp, Homo sapiens
tgtcttaggtgtgctagtggagattgtgtgtgtgtgagtgtgtttgtgtgtgtgtgtgaaagagagagagagaaggagagaataagagagtgggagagagggtggggatattctgaaaccttcccactccactcctatcaaagcttcatagagaaaaagagtcttaacatttccatgaacattttaaatcacttctcttttcttggtgctgagtcttggaaatccggatgtttcaaagtttctttacctggatatttcgatttctagcggctgtcattttaaattaaagctcctgaatgtgaatcttttccattccagcccctcgatccagaagaccttgtttcccaatgtgcagtgtttgtatccgtatctacttcaattgcatgtgccaacctgacattcccaggggccctctggatagctgaagaggggctggtgctttgggtggggttgggttcagggggaatgatgacagttgcttctttcatcctccctcacctgacttgtggggtgagtcctcttcaacagccccaaacctcctctttgtattttcttcctgaaggtgcaaactctatgacaggtttccatgtttaattaacaccagcaagtaatgtttccagtaaagggggctgatttaatggcaggaacaatgtatttccctctgggtaggcagaaacagttggactctaattcttaagagcctttgttcaggaacatctgggttgaaactactgtagttaacagatgatgttggcagtaaaaaaaaaaaaggggggttgggctttgtataatgtcgttgtcaaatttggtagacctttacctaataattatcaagaaagcaatctaacttgttattataacagttttattgcagattgctggcttaagacctttttgtgacaagtggcattttttttcttgaaaaaagaagtcatttctattcccctgtaattatttttgcaaccagcaacaacttcctgcgttggacatactggggcattttattttagaaaccaataattaaattattgctagcttatggctgattttatcccatttatcacattgtgaaggctttcttacttccttttttccccttacctcacctcaccctgcttcctgatttcacaccaattctgtatatgttgaaacactgtaagttgagtaaaggcagaattagaataaggattagatggctaatgctcattcttctttaccaaaaaatggtgttgagtgatgcaagtaaatgtttaaccagagaacatcagttctgggtatactgaaagtatatatattcttgggagtgtaaggggtacataagggtataagagggtctctagaaggtcccaaggacaaattgttgtatcttagaattggacttgcatcttggcattgtggattgaaggcaaaaattagattcccagagcatatcactacttttatttccttctgtatccttcctttcccatctgtctgcttctaacaaataagacaagctaagaagcagcttgtttcatgattctatactcacttccaagctttctctgcatagactttcctagtttgccactttatcttttctccatccctccagccagtcatgagattctactccccattcatacatgcatttatttatccagactttactgaaggcttactctttgaactttgcaaaatgccagtgaggcaaagcatgcatcctgtacaggaaaaactcagtctagaggggagagataagcaaacaagtgattaccacaccagctcccctgttcattcaccttgctctgctcttccccaatggacacctccaacagaggctgcatctctgcaacaggatgcagtccttaagcccaggattgtgacattggccaactctctgtggcaggatctaacagaaacgtgtgatttgaacactcacagagggagccatagctcttgcttccagtgtaaatcatggtgtattatacttgatttgtattttgcaatatctagaggatacctattatagtagggattaaaaacttagatacctatagggttcaggcagttagcaagaaagaatgaagagtgaggccatctgagacaatagagagtggtgggaactgtggcacattggagaacaaacatcccatccagagggataagtgcttcacagctgcactcccttttagcatgtggaatgtggtgccaatgtggccctatctgattttgcaaggaaagctgaaaagccagtttctatgtgaattcacttgttggcatctatttacagttttttaaaaaacactgtacttaccaaacagaatgtgtctgcctgttgggcttgtgactgccacttcatttcctctcttctgatgagaagcatctgtgcagcacattgcgtcaaagactcgatttccacttttggctttttacataaaagtcaattgaccttgacctagttgctctcctctgtttgggctcagtttgttatctgcataggaagggcaagatcagccaatcttgaagggcttgagtctgaaaatctgtgttgtggcacggcttgcctatgttctctctgttcacatcattctatccctctcctttcctttggccagtgggccacagcttgttttgggtcaaaggactttttaaaaggggcttctataaggcattgtagaatcagcttgggtatggatttgaatgttttgaagttatggatttaaaactggaagaggactcagatctgcgggtccatcccctataaggttaaggaatgaatacaaggccacatagaccttaggactttcttgtagaggaaactcttttctttttatatccagttggtagatggtactgtagtagctaggaagacataattcaccattactacgaactgttacttcccttcttaccagcgggattaggtttataaaagcaatgaagatctttgatcccatgaactaccagagtcccaaagtggactggtcattgctcataggatattagcaaattaacctttgcacgatccatactaagtttaagatcagccttctccctgatgtttttgtatttagctactatttacattagaaagtggttacttaatttggtaatttggttcaataaacattgcataagctatcttattttttaaaaaaacaatttaagctccagaagtaacagtcccataaagggtgcatgttagcagtgctctttgggacataaattaaggatggcattttccagctgtagttggatatgtgtgttggtgtttcagcaagctgcataatcagcacaaagcccaggtcattagattctgctggcaggaatcagaaaacctgcaaatcaccaggagatcccagatatgcctggatagaagtggtcctttgacatctgactgtctgctgaaggcagtgctgtggaccacaacctcacatgtaggaatgagcaattggtttcactccctggagagcatgaggccttcagcagcactttccttgaaagcaacacatccccctatccagcacatctgattatgtcacttttctcttttaaaccaactaaaatcccccaattccacttataataagctgtagactccttgctctggaaagcaaagacctcatgatcttgctcccccctcatttcctgacctaatcactgtcacgcttgactttgctcactcagctgcagtcttactgaatttattgctgatcctcaaacactcagagctcttccctgcctcagggcctctgtgcttgctgtttctacttcctagaaagctctttccccatatcttctcatcatgctgttgtgctccctgcatcctcagaatggtcctcctgaaccatcacagatgatataccccttctgagttactctttatattcttaggttgttttattttcaacatagaacttgtcatcatctaggaatttattgtttattcacttgtatattttcttattgtctgtctctcccaatacaaaataggcttcactggagatcaagatgtagggtatcctgccaggtattagctagagaccttaggcatgttacatggactttc

SEQ ID NO: 562 - DNA, 4055 bp, Homo sapiens
gcaagtgttgacttatcacggtacctggcgtatagtaggttctaactaaatatcatctcccagtgcctagcacggtaccttatcgacagtctttttcatctctgcagaattaacaaatgaataaataggtcacttgtttaatccttgtcctccaaagagaaagatgtcagtacagatcagcaccaagaaatgtgatgagtcgcatacatgtgtgtgaatcaagaacaataatgagagtaaattaagtctgtctgtggctcctcagagtgatactttttgatccaggccttgggggatgagaagtccatgagacacagaagcagagataaggttcatgatggagggaacagcaggatgcctctcccaggggaaccttcggctaatccttgattgtattagtcagggctctccagtgaaacagagtcaataggaaatatatatatcaatatatctaatacagatatatatcggtatctatatattgatacatctatctatctatctatctctagagagatttattaggaagaattggctcatttgattacagaggctgggaagtcccactgcctgccaccagcaagctggagacccaggaaagctggtggtgtttgagtctgagggccagagagtcatagagccaatgtcaaccccagtccaaggataggagaatgacaagagatgcccagttcaagccggcaggaaagaagcaaaagggacaaacgcctctgtcctctgttttattgttctcttcagaccctcaaaggactggatgatgcccactcccacaaaggagggtagtctactgaattcactgattcaaatgccattctcatccagagactctcccagacacacccagaaatcacactggatctgggcaccctctggcacagtccgcataaaatgaaccatcccactagtggcgcagcccagcttccatatttataagataggaattccattcataccgaagagaagacatttgtcctgaggtcttggccttcctaaagcccatgaacctctttcttttaccatggtactggtttggttttcagttgggctggggttttacttctcttgagtgtgagtcttttatttatggcaagcaaaagggtgactgtaggtcacagcctctccccagggctccctgtggaaattagagaggaaggagcccatggaggctgaaacccccgagtccattaaattaatagcgatttcttctctccctgtgtagcatctcccccaacctggagcttgaagctctgttcaaacgacattttactcaggtggaattttatcagggttccgtcctcaatccacatgatcttgcaagagtcaaggtaaggaggaagaggtgacttctgcttttattccatcttggtgtgggtctggggggagtcctgactctgtgctgaggggacacacctcctaggttggccacgagtcatctcctaaacacctaatgagatcaatcacataccagcaaccttgaggtcacccttccactggtcccaggacctccttctgctggcatatgcaacactacctataaccatcccacacttggactggtcataacatgaaacttgctttgctggattcctcaaaatcagctactcatcaaggaagtagaccagttatatggacccagtagctttatacaacataataatcaagtaattcctatattgaacacttaagttggactcaatatagctctgacttctattatttacatctgaaagaaacattaggctaaaatataaaataaaattttactaagcgataaaacatttgagctttcttttttccccatctaagacgcagggtgtaaaactaaacatgcagttatctgatatcattgataatgggcgaatctttttttccagaaactggtaatttagaatcttctcataaagcacacctgaggcttagaagggaaaggtacaaggcaaaatggcatctgctactttacctatgtaatatagattttgtaagcatgttcaatatttgcatgccagggggtgtacattaatataatgaattcactgaagtctaaatgctaactgtggtcaccgcataattttgtaaataatataattggccaagatgaataatccaaaaggatttggataaattctttctttatattattaaagaaatcagagatgatttgtgacataccacggaggatattatggcctccctcaaaatccaggaatgatctattaagtataacataccaagtaggacagattgcagacctgagccagcataagaattcttatgctcatagagtccagttaatcttgatattatccagacataactcaagttattgcttatgtaaaatcttatgagaacgtagggacaattgttattgttcgtggacctaatttaaatgcaagcaatcattagcacatcaaactcatggtcccctctaaggaataaacccctgtgggctcgtgtttggataagtcagtaggtatattttgagttcaactgtaacacattatttcatacatagatttgttgtcttctgaatatctgaatactaatcggatactaagcaatatggtgatgttatctgatttagagctctgatctcttcccagcctatagaaaatgaagatgtgaaaaaggtcagatgaaggacttcagagtgtacatttctgaatccccaatactcagttaccttgctaactggagagaagggatttaacccacccacctccaactcctgataggaagaattaggatgatggtgcagatggttgagaaaggaggtggggaggagactgaaaggcttaattaattgttatttaaagaaatctggaaatcctacaagtaagcaacgatgccaaatgaaaagtataattaccaaggtacatgttgtaccctccaacagcaacaagatgaaatgtttataccataacaagaacttggaacctacacttttgacaaaaactataatctctcaggctctcaggattgttttttttttttctttgcaaagcttccccaagaagctgtcaacagagagagactacactcgagcatggctatttatatgtttgtgttctgtgaattttcctttcggtgtcttagatagagtcagcagatgcatgcctgatccttgccaacaagtactgcgctgacccggatgcggaggatgcctcgaatatcatgaggtaactcttggggcgctgcggaaggccctgggcttggcagtctgtggctgttcacggcccttttggatcttctgcagaggactatctctatgaggcctttttgccccacaagccactgtacaactcaccagctgcataggcctgggggagccgaggctgtctgtgtgggttggggcagtggcacacagggtgtcaccaaccggaagctcaccctcagcaggtggcagctctagggcttacagctggccttgggtttgagattccttgagacagaactaggaaatagattgagatgggtgctggcctgaattaaagtaccatgttccctaaaggaaatgggcctgagatatcttaactaaaggcagatgcccccaggggacattttgcaatgtctggagatgtttttggttgtcacaactaggggaccgtgctgctggcatctgataggtagagcccagggacactgcgaacgaccctgcaatgcacaggtcagcccccaaaacagagaattgtctggcccagaatgttaatggtgtcgaggctgagaaaacccttactagggctttccaagtgtgtctacggcatattgattcctatcaccccaaaggggaatttagtgaccagttaggctgtttcatccagtttcccaaaattaatgttctttcttgaaaggcttttcagtgcttttaatactaatatgcatctctgagataacgtactatagaacactttccaaacctatttgactataagcctctgctcctctcccacctcccccaacccccccccgttttttttcatagagacagagtctcgcactatcgcccaggctggagtgcagggactcaatcatagctcact

SEQ ID NO: 563 - DNA, 4041 bp, Homo sapiens
gtgccacaagaaacattttaaaatatatgataaaatgcatatcatccaaatgttcaatctatattgtgtattctgatacactgtgtgtcacactgtcttagcctcatactactcaccatatactaatgagggggttagtcatatgggctttgggcataaaatttgggtgggtggctaagggaccttcatcaacctagcaggagagcaaagtgatcatgttaagacatctcttctgaagtagctcattgacactcttccctcaccttggtggccgctgcgtgcctgattgctaagtgcaccaccgtaacaataacagtctataatggtgatattattaactgcatcgtgcatattattgatttactctttgttctgcatcattatcctttcaccaatgagtttactgcattattctcacatacttagtcaagcaccaaattacaacgaaagggcaggctcttataatggcatctaatggaacattgcataagccatcatcactgcctcctattatgagccacctccagccaatgagctttctgccttagtggaatgtgcacagagcaattatgaagtgcaagggacatggccattctaaattttacccaggaaattaccatgctgcatgttcaccacctgcccaagtctcagagcgcagctagagactcagatgctgtcactatgagcctggggggcacagggacaggagtcgagcctcttgctacatacagtctcttcactagaagccagtggttttatctccacagtcagtccctggctttttgtcttgtggctgactcttgcatcaaatgctcactcctgactgggcattatgtggcacatataagtggccatgacattgcctggtgccaaagtcagattggccaggagccccgagcggttggagggactgtcagtctcaacagttgtggggctcatctcttccgggtgagccactacttccagaaacagaagtccaaaccaccctcaaacaaggcgagcaattccagcctcatcccttcccagcatctccccatcttgaggtaaattcctttagctctcctggaaatcccgggcaccctaaggaagcagccctctggggacgcacagccagctggcatgatcttccattccataggcatcccagccccatttagccctgagtaatgctcacttactgtaaagtgttacatgcccccattgtcggaggagttatagtggaaaaatgcaaaatttcctttttactgcttatggccagcagaacctataacgtgtcaggccgcacattagccaccctgataaaagtctgctttcttacacacaaaatcatcgtttcagcaagatttgttatctcattacctgataagctctatgtcataaaccaagactcatacagtaaatctccccggaggacgctttgtgggcagaaagggagagatatgaatctgcaagggacttgataatgcagcatttaagcacaagcataatgtcacttattgttaaatgcataaaaccacttggccaaacagttgggcttttaataggattttgtgcagcatcaggtgagaagccatatggcttttctgtctaggagtctcagcacctgctagcaccgctgctttgcctcactgccctctggggatgggagctgggcttttatggaggcggagggaggagatgaatgcttcccctgcagctgcctggcttctgctgtcttgccagggggtgggatgcagggtcctgtcgtggtgcctggcctgatctaactggcctctcctgttcaggcacattgtggtctgcggacacatcactctggagagtgtttccaacttcctgaaggactttctgcacaaggaccgggatgacgtcaatgtggagatcgtttttcttcacaagtaagagcttcctactgctgtcagaccctctgcccaaccacacaccctgcgagggactccctgaatgtctgtaagagtggaggtcttggggaatggcactggggatggggccagagttgggtaagccatgatcccttttggcctcgttggagaagatattgcagaaccaatggaaagggaagcaacacactggttcaatgatgagagcagagtctgcctctgtggaggcgattctgggaccacatccgagtttatctctggaagaaataatagtggagctcattgtgggtccaagtcatcatcattgtccccttagcaatctggcgtgtccacattatctgctgtgggatgattagctgtatggtgtggatacgttaggagttctggagtcagttggtgaccaagcaagacaccaacttaagaggaagcaggacagaaggtaatagtaataacaactgccgttcctaggaacccccagcatgggaccctagcccgtcactgtgcatgcaggctcccatttactccacaaacagagtaaaaatacatattctggactcagattccctgatctgaatcctgactcaaccaactactggctgagcaagttacttaagctccctgtgcctcagcttcctcatccataaatcatggagatgatagtagttcctacctagttgggctgtgatgagaatgaaatgaattaatccatatgaagtgtgcagagcagagtcaggcgtgcagtaagtcttcaataagtgttagctatcagcctgaaaaataacatatatttggttgtataatccacttaggaggtaggtcttatcttgtatgttttacaggggaggaaagcaaggtatctcccttctacccaatgttgaggttttcaactttgactaatcctctttttagataaaaggtagtctgccccaggaatggagagaattagggggctccattatggtgacatgtgtggtaccatggtcatcttcttttatggagatggggctgtcatggggccagtcctggcaccacatcgcaaagtccaggacaaagctaacatgtttgtgctggcttgacgtgctgttgactacccagcacgcggtcctactctgaggttccactgaggtcggcttccctacaaactccctgtttggtggatcgtcgtcctctggcatttgctcacagaatgctagacttctgacttgtcaccatgttggggcaccaacatttctcttttctgcactgatttctccaaactttgaaaaaacagaccaggctatgttagcacaggagcaggtacccacaggttccattcagtgcttagccactgattacctgctgtgtggcccatcctctactgagcgttttggaaagttctctagaggtatagtgtgtaggctgtgcccccacatgagttgggcatttcaagatgaacacacatgcaaccattagagacaacatcaaccctgtgttatccaagggatgctgaagtcattttgatcaggtggcagaagtgactggggacatctctttcaaggagcatcagtctatggtattacccgggcaggcttctgaatgaggtatgacttgtcatgggtctgaaagactggtcagattcacagaggcagccacttttctctcatccactgctttagtttgaataaacaagctggtaaggtgtggttgctcatgcttgtaatcccagcactttgggaggccaaggtgggaagatcacttgagctcaggagttcaagaccagcttgggcaacacagtgagaccccatctatacaaaaatagaaagattagccaggcataggggcacgtgcctgtagccctcgctactctggaggctgtggtgggaggatgacttgatcctgagaggcagaggttgcagtgagtcaagatggcaccactgcactccagtccctgtctccaaaaaacaaaacaaaacaaaacaaaacaaaacaaaaactggctgctcatgcttccattgctaggattcacctttgtatccctaacatccatcaatgtcatacttatagtagatggcccagttaattaacctcttgaagctctgggttaataacatacctgcctatagggttgttttgagatttaaatgaattaatgctcatcatggccagg

SEQ ID NO: 564 - DNA, 4038 bp, Homo sapiens
ctctcatttgctttgtttttatttttctttatgtgtacagatcccttacaaacttgaaatatgctagtagattcagggtggtggaataagcctatggtctaaaaggcttgcagtgaactacctgttaacttttttctgcacttaccatgggatagagtctccaagatgcatactttgtcaaccaatccatcagttaacaaatagttcctgaaagcccagcaagttttgggggttccaagccaggtcctggggtagggtggagggatgaggcagcacagcctggagttaggcttcatttgcccatgatgtctcccctatctttactgaagtcagtctctttgagacattcagtaaaggaggaagtgggaaggtgggagttggattagtcttattttttggcagtgggggattgagcctcaagggaagcgctgggaaacagtaaccctgaaggacatgccccaaatcagggaaacctgcattaagactaagtagccaagaaaagcactaccaggtgagaaggaaaggaaaggccagcttgcaggagtgtcatggagaggtggtgatgcagacaccaagggttcaaggtcaacctaggggggcaaacgtgaagctttggtgctgaccactgtgtggtttaggtcgttgggtctctaaccccccacgccctgcttcctgtatgatacagtgctgctggttctcttgagaagtacttcttaaaattcattcccatcatgtcaggggctaccaatggtgagatgcattttgggaggagcaggacgaggaaaacacaattagaaggctcagcagaaagacagagagtctagcatatgtatttgatataaatattatagttttacagagacatctagatcaatatgtgccacatttcatctacctctttgacaaagtgagcacaatgtattcaggcaaagctgtataggattttcaatttactctgtctgatttattgtgacaagatagctctgggttttttaagttctttatactcgttccagtaaaaatggatatagtatctttaaaaataaacagcccagagctgtgcattttacattgtcttcctagagcgaggctctgctaaagaaagatctaaggcctccccgccctcgcagaacctgatcgcagtaggatttgctgccatcccttctctttggcttttttgagggagtgtgggaatggttgggggcagtggggacagtaaatagggaaatcagttaggaagcgattgcagatgtctagataaggtatgatggaggtgtgaactaaggtcggacagagaactggagccctgtgtgaggattcatcagtgtctggtgggtgcagcccagtcagcctgggcctcttcattttagtgactggccccaggtcactgagaactcgccccccagtctcccaattcccagcttaggttatcctccctggcaccagctgctttctttcatcagaaggcatgaaactgagggaggtgttgtgctctggatctggcactcatcttgcaacctgtttccacatcaaagagaagaaaggtgctagattaaacaattgccaagggctattcattcagatgctgagataaacttaagaacgtgggagggggcccaatggtgactattccatggtcacagtttcccttttcaaaggctactggctctaacaaccagtatctgaggcttgggaaaagtatgtagattttccttgtcatagacctaaaagtcatcttcagtggctctcttgatgcctcagtcactgccctcctgtcctcttctgccttctgccttaagtcacttcccctaggttgtcctgtgtacctgtggaattgagctctgaaactgaagttctggctcaacttgggcatgcaggctttcctggcccatcactgagaagagagtagaaggattgagaagaatttgtgggatttcattctggaggcagcgatgcttaaatggcaggagaagcacacccatgtatatttagtgaagatatgcacatgaaataagcaactggcgaatttatggtgaccctcaatagtgttcataatcatcaaacttcttctcatgaagtcattcttacccctccaatgccgtgacccaccgcactgcccttttcagttaaaccagcccatatttatggagccctgacccagcaccaggcactacttgctcacactggatgaataattcctctccagaaagtgccgttggatactattttggcattgaagatgcttccttgtgtttctgaggtggatcttttattctaagccatgacctgtcagcttatatctattttatgttacctttgcccaagaaatatttgtttacagatccagacctagcatttaaaaccaaaaacttcatcagatcagaaatggttattgattgaggactattggtcatcttcacaaattgagtggtcaggccctatagaaattggtcaggacaatcgctgatggtctaagaaagttcagatccacatccacagatggggagagatttagctactctcatagctgaactttcctaaatattccccattgtaaatggatcattaagattcttattatcttctagattccaggctggtgaggaagtcctgagctgtacatgacatgtctaaaatagacatttggggtagggcgcggtggctcatgcctgtaatctcagcactttgggggccaaggtgagcagatcacttgaggttgggagttcatgaccagcctgggcaacatagcaagaacctatctctacaaaaaccaaaagaaaattagccagctgtggtggcatgcctatagtcccagctacccaggaagttaagacaggaggatcgcttcagcctgggagttcaaggctgcaattacctctgattgagccactgtactccagcctgggcaacagagcaataccctgtctctaaaaaataaataaaatataatataaaataaaatggacatttgcatcactttgcagccccttagcttgctccaatcatatggcttcagttaagtttggcttagagttcctgaccggtggaacttatgatttctgcctgtaatcagactttgctaagactatcatgatactgcctatccagccagactctagtgatcttgcaaaactgtgatggtttatccactccagttcccagactaaacctctcccttggccagtggaggacccctccaacaccccctccaccatgtatccaggaggacctctgtgggtccatttctgcttgccctgaaggagcagaagctgagatatacaagcctctttcctttccaccaccaccttcatcttagtgggaactgaagtgggagacccagattgcatcctgggcaagtcacttttacttgctgtgggatgccaggcatatatgacttaaggaaagagtttcagagaggttacctgaaaagactcaggcagtgagaacacagggttgttgaaggattaggtgggattgcataggccacagaatactttatattggttacatcctaatttacagataccatatggcacttaccatttcatagtgcttaccatggagcagattacttggcccttccatgtatcatctccttagatatcaggataacttcatgaatcaggcaccagctctggcccctcaaaggctctggctttttaattgtaaaatgcaaaattggtacattgtccaagactatttagttatttagtgtctgagctgagttaacacagggctatcagagtatgaatctcacatggtagatatgtaggcatcatggaacccaacagagataactttggatggggatcttttttggcattcttcaaatcatgccctgtgaacaaccattactctgcctccaatgaggtcacaccctgctgtctatcttaacatatttgtgttgatatctctaataattgaggatgcaataaattctagttctcttcttcctgcaataatatccttccccaaactatggccctagaatcttcaaaagtcttgaaaatatttctggtaaataaatgttccccattc

SEQ ID NO: 565 - DNA, 4045 bp, Homo sapiens
ttcctttatttttcccatttggttagactagaattctaattccctcttgaacacttctagcaatgaaaggctctcaaggacagacagatgaaccacacctaaagtgagaattgtgccttttttgtggatttcaacattttcttccccttcctggctccatcctttaaaggtagttccatggagaattgtagtgatctgctaaacttggacttccctgctgggcagatctcacctgcagagccttctatacccttgcagatggaaccacctgttccctttcactccttagttagtctgccgcacagcacagagcagtatctggaggtggtttcttccttatcagtgaaaggcacagtagagccccacgtgaccagttctgcagggtgcattctgtgtgtttgtttcatagctttgacttggaatattcaccctcaggagcctgtatcccgctggagggagttagggctgtctgccttcaacctcggatgtggtctccacattggaaagagccttacattcagagagatggggacagtttgtcatgcttttctatttaaatatgaaactagagtacttaattatcttctttattgtaaatgctcatattttaaagaggattccatactttagaagaaataattgagtattcaatagttgagaacaaaattcaagaactaaaaacagcccagcacagttagtgacctgcctcactgtccattcctgtggcccctctccatcggttcattcactcactcggcaggcaggcattctctgtgttatgcatcaggcatgatgctgggttttgttgggtgctcagggttcattggcgaacaaactaccctcggaacctgtcctcctggagtttacagtctcaaggaggttgcaagcactgagcaagggtacaactaaagcaaatgccaattacacatttttaatgtgtgctgcaaaaccagaaaagactaagattctgcaactgagaaaaacagggattagttacactggataaagtagtccaaggaagcgacacctcagaggaggagatgctaactaacgcttgttcaatgaccttgacccagcttgcattacccactaagctgggggagctaacactcttgcttttaaaatccaggttatgcaagccccacttgcaaacataggtcttcagttctacctccactagaggaagtcttaaaaactgattgctcgctcagaccccaacctgcctgagcagtgcttgcttgacttatcgggagatggcatcctgcgtatcttccctgcttcctgattattgggttatttttaaactctgtgtctttccttatatcagaatttggactctccttctcactcagaacctttgttccttcctgagagcgcacactattccctcctgcctggctgtcttgtatcaacgtggaattccactccatttcctccaccacactcatgtcttgtccaccagggttctagactgatttctaaaggatttggaattttaaattgtctagtgtgccagagcatggatcatttatttacaaagactcatttaatctatggccccatagcctaccctaccttaaaggaattaacacgagtcatgccttcatgtccatccattccacatgtgtttactgagggcttgctaccaggcactggggacagatgcatttctacacatccataaaaatctccaactataccacagcttttctgagctacacatcgtactatttggccacctaagtggttgggaagtccaatatcagggcttattgaaacctcttctcttggttctgagagagtcttgctacaacaccatttccctctcgactctttctgggaaggcatggcctctagcacttgggaatcggatttgagatgatttcatgttatactgacttgggccgatccacaggccttttctttccatgtttacttgtgtcttgggcaacagctattctcacttttcctcgcctgcaaggggcggactgctctcatgaggggtgtttcctataaaatgtcatttacgatttctctattgcagacatggctctggtcgaaatgtgactgaagctttgcatcctacacagacttagatccctcatcaagtagccattcagccctcattgcatgagccacgtgacttccccagcctgaacccctcagcaatgtctttggattcctagattttaaaagccataaattagcaaatcatcaacatatcaccaggaaggatcatctggtagcgattctagtcagaaggaaacacaggccccaataaccgatctttataaagatatgaagaactgtagacagacagatacagtaaataagaagacaaatagataattcaagttgacagaacatcttggactgattaggcattctgctttgattagcattaaacttcttgggaacagggaaaacaaaaaatgagcttgccctaatactttggaaaaatgacctcttgactacttctgaaacgtggtgctgaggggtagatacccaaagcgcttgtcattagatgccatgtcttctgatgtgatgtgctaggtatcccttcctgatgagaggggtcttggtgggcgtgggacatgggcacttctttcttggcatctgttttggattcctctaagccatatcttcagtccctttcaaacttgaagctctatttaaagagacttggaagcatattaaatcaatttcctgataatactgatagaatgaagctcccctcctttcctgctgtcactcttcccttccacacacttagcaaaatgttccagctattgttctgaaaacaagaatagaaatgtaggtgggagatgaactgtgtaccttaaaaaaaaagtcgtattcaagcctagattttcactctcaaatattctttcttccattaaaaaataattcgaatatgatttctcaaattataattgctgaagattctgatcaatggctcctttgattgggtgaatccttgccgggtagattcagaatctcaggaacaattgcagccatccagactaggttgccccctgttttctgtcttcgtaccatgtcattcactctgctggacttctttccagagctgtgcaaaatggttcctggtagctttggggttccttccatgctgctgtcatcatactatgaaactaaaccaggaaactttctaactggccaagtccagtgtctctttttattaaaacattatagaggtcaatacattgtgagagttgtggaaatctgattctcttgtcccaagggttccagtctccacagccagtactggtgttgcatcacaatggcctgctgtcacccccagaaccacagggactgttccaaatatgggtaccagttgctggaaaagtaatctatctcccctccttgtacctttctaacaagaggacatgggggcagttcagagatagatatgtgcccatctcagtgggagcttatatgaccttagccattgactccaaaggcaaatgtcagctagtgtatagaacagccttaggaaaactcccattctaacatattggctcaacaaacaataatttgaatccccaccatgtgctgtgggtaaaatgtggttcttgctctcctggagcttatctgagattctgaccaatcagtaccacccaaggaaacagtggcagtgaaacagaagcttgagtatgcaggagcgtcttcccagtgaaatgctcttttttcaggaattttattcattgaaatcatggaagtgtacaataatcatgaaagcaagagacattagagggaagcctcccaaaagcatttgataattcacgttgttgaacatacccattgaacagtggagagcataggtaatagcagattgccttgttcacctaaaagcttacagacccagtaaaagaggggtgcagaaagatttgggagggttgggaatccgctgatgtgatcctgaggtccactcctttccagaccccacaaaggtcctgctgtggcctgtcatgcctcgtatcatgccttctttttacttttttccttttctttttttttttttttg

SEQ ID NO: 566 - DNA, 4046 bp, Homo sapiens
aggctgtaattccacatctcattgactgtggtaaatattgatgactaaaacatggatcactcagcaattttttccaaaatgggaatttccttattgtttcctctaatttttcttttcttttcttttcttttttttttttttttttttttttttgagatagactcttgctctgttgtccaggctgggcgtgatctcagctcactgcaacctccgtctccagggttcaagccattctcctgcctcagcctcccgagtagctgggattacaggtgcctgccaccacacctggctactttttgtatttttagtagagacagggtttcaccgtgttggccacgctggtctcgaacttttgacctcaggtgatctgcccactttggcctcccaaagtgctgggattacaggtgtgagccactgtgcccagcctgtttcctctaattttgaaaatatgttcatggtaaacattgcaacaacacacaaaatcacataggataaagtaaaattgcctccacatcacactactttgagataatgattacatctactatgtcaccttttgtttctcacatagcattccatgatatgcatgagtcatcgtgtacctaaccaatatggttttgggaggcgtttttgaaactaaaacattactactgacatgaacttagaaatggctccaagataaagtttgtaaagaagagtattctatatggagactgcaagagatgtgcagggagaggccaaatcatgcaggttcttagattcatggactttactgagaacaaatgagagctgttgaaggattttaatcaggagaggaaatgtggttagactgacattttagaaagatccactattccaacagttgtatagagaatggggttgaagcatcaaagacctcatagaccataagaccaattaggaggcagtagtccagggaagaggtattagggcatggccttaggcagtgcaaattggggcagagaaagaagaagggatctagagataattaagggattgaattggcagaatttcactttgttccactcatgttgtcattcagaccatttatgttagtgtggtgcagtccagttaactttttagggggtgggtattttacatctgtccagcaaagagagcagtaaaacaaacaaggccagcagcacctggcagtaccagaaacaaagagaaaaattagagacaagcagaacagggacaaacgtacacttctttgtacaaagtgcatggcattttctgtgttaactgaaacatgtcttgttaaacatatagaggacaaaggaggccccagaagctctgggtttacagctgtaatctctggagccagaccttctcttgcagcatccacagtttcttggaagaggtctctaatctacaagaatcctgtgcctgacctatcatgattcactgtgtccatcgatgtgaattagaactcatgggatggagactcaggaattgtataggcaacatgagaatgattgactttagttggatcaggtgttgatgataagatcataatctccctcaaagcttaggaagcaggctagaatctgaatggttcaaatcattctaaccgctggtagcttcgtgtttggcccagatccctgggcttgaccaggaaggctatgactatctccacacagagatatataacctttgctatgcagagcacacagccctgctcctggcgtgcctcactctttcttcccaaggagccctacttaacctggcaaggttcacatttcagactgtggagaatgcccaccaggggttaaccttgcatcttttgcttgtagctttcagatgtgtggtcatacagtttcatttagaaagcaaattcctaaacctagggatctgtgataatactgatgtcataaaaataatcagatttcagagctaaacatggactgttttagcaacaatgattaaatgttctgcatatggcaagagctccctaacgcactactaatatcactgtaaccatcatttagagtttagtaatcaccatatttaggtcatttttccaaagcaccaaggagactcagactctaaataggtttaatatctcaagaggactctacatggttgttggtgggacactgctgtgttcaggtcccaagaatccaggagtatgtaagtgaagccacttggtatttaacgataccctgagaaaatgaacaacacacacctccctaagaggcctccctttgtcgccggctatcagttcttcatctatttcttaccctccaatgtgggagcacaccttagaggacttacaaggtacaggcaggagagaattctgcttaacacaacatctaacacataataagggctcaataaatattggcaattattataatctggtaactctagaaatgaccaagagagacagaatggacattttggctgtttttccaagttttcgagccagaagaaagttgttccacacattttgaaatatcagtctcacccacaaagttgaatctgtttattctttccatgaactgtcagaatcaactctggaaaaactaagactatggattcctctgtgctcttccatagaagaagaaagattgttgttatgagcattaaatgacttagtatacataaagcacaggtgatcctaaagcacttaggatggtggcacatgtggtgagcactgggaaagaactgtaaacaagctagctgaaactattactgtgatcttaaatgcctagaatttaaatcattggttctccaaaagagaggtaagagagggcagtcataacagagatgaactgaccaaaactaatgggttgggcaaccctgtaggctgcattaagccactactgggaaaatgcaagagctagaaaagagagttcttttctgcaagatgcagcaaggaacacaagagtcaaatagcaacctaaaactttacaaaagacatcttaagtcagtaggatcaattaccaatgaatggctggagttgagagccggggaaagtcactttgtcttgcagatggatggaacgactttaaggaagcagtagggattgaactgggctttgaagaatggggaaatttgactagatgggaagggctttcaagttgagtaaatagtgtaaacaatagctatagtaaataggtttagctggcatggcagtttcaagagtttatgtgaaagaggggtggtgggagagactgggacttcacaaggtgttgacaatggaaggagagagtttgaatgtcatcttttagtcaacaagaagcctttggacagtgaagtgacctgctgacagcagcgttcaggtataccccagtgggactgaacaggatgcagtttagaaagagagcaggggcagataccagtgcactcagtgcagagtcacgggtctgctatgctccagggacccagggctcctggaatccagacagacaaggcctcagctcttagggacctcaaaatgtcataaggtccagttgatccactcaaggaacaccagtgaatgctaaagctattaggtataaggtttttggggagcaggatattcctgcagtctcggggcctcactcaaggtggcatattcattacaaagggaaatgggcacctctcagtggagacattagcatttctgccttagccacatggatggagctagtcattgggctgggatatcctgatgtgatgccatccccgaagagattcttaacagaaatacttaagtagggagctatgtaggatgatcaagtctagaggtctaatgtacaacatgaggactattgctaataaaattgtatggtatttgggatttttgttaaatatgtagattttagctgctcttgtcacacacaaaaacgtaactatgtgagatggtaggtaatatcatgttgtaaacctcaaacatacacaataacatttatttaaaaaataaactgggctgggcgcggtggatcacacctgtaatcctagcactttgggaggccaaggcgggcagatcacctgaggtcaagagttcgagatcagcctggccaacatggtgaaactccatctct

SEQ ID NO: 567 - DNA, 4040 bp, Homo sapiens
cttgggaactgtaaatcaaatggcagactgtgaacattaaaatcacacattgaaaataatgcatctctatttcattcttttttccaggtttgagatttttaagagctctgagactgatacagttttcagaaattttgcagtttctgaatattcttaaaacaaggtaagatgttcttcgtcatatttttttcattccagtcccctatgccaagttgcaaatatcaggtgtgcttgctttcatcacaatgacattattaatagttatattattcacagaaagagtgatctaacacagagagggagagaaaaccagagtagggtttgagttgctctcttctgcagggccagggaactatgtggtgaaaagagagaaatagctgtgcatgcagggaagtagggacacttttagggacacatagctgatatctgtgtgcccagtggggttgcccagataagagccacggtgtcaaggggaaaggtgcacagtgaatgagggatagatttgctcattgattgggaagtccttgctgccagattctaaatcgcccctttattacatcactaaataagaaattgaacccagtcgtaaaggcaatagaagcaatgctgtgagaggcaatcacaaacctcatacggcaaacagaaaatcatttcatttcaaagcacattttagatgttcactttatatccgtatagcccttggggctttctctgtgaattgccttttgggggaaaacctacaaacctcctgccgaatgcaccatgaatacttctgttaactgcgttatgatctggaaaacacaactggaccaggaggaaaagcccccagaggatccctttcctgatgacctgccggcttgcagagctggcctgaaaccaaggctgtcttgatgaataaactaataaaagaggttagacgtgctctaatggagaataagtacaggccataaatttctcttctaggaaattacactctaagaagctaacttctaatgttccatttcctctttggttgcccttcatgcatttgataaatgattaaaaacaggacacctccatattttgtgatttgtaattaatatatctgtagttttgaggattagattcagcatcattttcctggtaacacaggctgggacctagcttcctgaatgaacctgacacagccaacaaattcaacctatgattggctttactccttgggtgttagtgttttttttgcttgtttattttattttgctttaattccaaattggtttcctctctctgactgctcatctatgtgactgtgaggtcaaattcactttctattagtcaagttgaaaagaaaaagagaatccaatggcactgaagtctttaaaagtatgtcctcctgccttttactgttcattatcctgagataagaatttatcagtcctctgtttattagcaataatgtaatattattcacatacagtgaatattgtatttcttcatgtttttctgattgccaataaccttgatttctgccttttaattattcttctatgtgctagaatcatattacttttgaaatgtaaacgatcaatgaagctagcatctcgccaatatttacgtatgtcagattcactccactagactgtgttttaaagatggaacgcgtgagtacccagcaccaagcatagagccttgtccttaagagacacttacttttttggtagggatggtgttttgtgacactctctaacattgggtagtgtctgtctctccctgtttcacaattacatcatatgttagggggatttttattctctgatgccagcattttgagaaggttccattgctctgaggaatactgtctactccctggaccgttttagaacttgagaaaatgatggaccatctgaatatctttttctgactttctgctaggacactcacctctctttcctttggatgcgggaagtggctgtgggatccctggtgtcagctcacctgccaactgcactcagtgctgcctctctcagtgcagagcggggaagctgaagcagccagccaggggacgagggagagaatggccctagggaagagtcacggggtggaaggctgtctgggcatctgccatccgggccccaaaacagcctttttccagcaccccacttcccactatatgaaactcttgttgttagagggtgctttttgccacaaacccacaacctgggttttcagagttcctttcacttatggtcataaccagatggttgagataattcagcaagcctggagtgagcacccattggtatcagcagcaaggtgcatgctaggagtcctgctgtcagagaacttgctgcgtagggggccaggccacctgacggtgtggttaatgctgatgtcagcatgcccaggggttgagaggggagtaactaagctgggcttagcctgagttgcagggcagtcaaggatcttttcgaggagaaggttacttttaggtaagccttgtagaaaaaagtgtcatcctcatggggctgggcatgtgaggggtagggtgggggttgacttctaatcaaggaagatgctaacagcacactggtgtgagagcataacacttggggaaactttgggtaattctgcactcctggacattaagcgttctgtgatggaaagaggaggatgaggttaagagggtaggaaaggccaggtcaccaggcacagaagcaaacgtcatgtaattgtaagaaatctagaagctttaggacaactctctgaggccattctctctccaggtgccagcctggctaatcttggctccttccttttgggcatccccaagtgtggatcccaaagttctgtcccagagaaagtgcagccttggcttttgtagggttttggacttttgagcgattctcctgtgactcttccatactctgctgctttcatagcggtccttccagaagggtgggttgggggacccatgtaatcgtctttagggagattttgtctggctctctttggcggtgaattcctgccaatctgtggcattaggcagggatggaggctttgcaatgcaatttgaaataatgatttggagttgctgtttcatttccagtactttggctgcctcactgggccaagagctgaaagaaataaggcagagaagcataaggtgggcagaaagattgataaagaattaagaatgcagcagaaggaaaattaaagtgcatgggatgaaatgggcaaatcacaattatgtgaccagcatcagggccctttcccaaactgcaagcccatagggggcctagaatactccatagcctgaaacggccaattaaaggggagacaaggagactccctctcactatctgaggttttggcagtttctcagttgccctgcaaactggagatctaacacacaggtgctagaacacttattctactgtcagaggaaagtcagcagctgtgtttaaaggctgtaattccacatctcattgactgtggtaaatattgatgactaaaacatggatcactcagcaattttttccaaaatgggaatttccttattgtttcctctaatttttcttttcttttcttttcttttttttttttttttttttttttttgagatagactcttgctctgttgtccaggctgggcgtgatctcagctcactgcaacctccgtctccagggttcaagccattctcctgcctcagcctcccgagtagctgggattacaggtgcctgccaccacacctggctactttttgtatttttagtagagacagggtttcaccgtgttggccacgctggtctcgaacttttgacctcaggtgatctgcccactttggcctcccaaagtgctgggattacaggtgtgagccactgtgcccagcctgtttcctctaattttgaaaatatgttcatggtaaacattgcaacaacacacaaaatcacataggataaagtaaaattgcctccacatcacactactttgagataatgattacatctactatgtcaccttttgtttctcacatagcattccatgatatgcatgagtcatcg

SEQ ID NO: 568 - DNA, 4043 bp, Homo sapiens
ctgatccttcattttaccttttagtctccagtcattttttcatatctcaaaagttcttttctgttatgtcctggcctttgcttatgatcaatgtgatgttttgacttccctttggccaacacattttatccatgggttggatctctgtgatttctactgtgtttctattttctgaagtttcatcttttttttttctccctttctcatattttctctgctttctgaggtgacttcttagttttgtactctgcgccgtggtcggttttcagcggtgctaagtcagcctttcatcagctcagttacaactgtgcttttggccgtgagcctttttatttcatcaacatcccgtctcatctctgcaattatttaataaaagttatataagtattatttagcatagaaggagaatgttttcaaaaaaagtcttctgttcatgatggttaatccttttcagatgagaaattatttttttgagccaatccttttctccctctttccttgtacagattttcccccaccccatgaactttaagttaattttcccttattacctaaacagctccacgttgcgtgcagttagtgtactcctcattcaagtagaaggtagtaaggattccttcccaccactgtgccctaggctgccctttactggctcacgggcgtgggagaacaaagccccacccacgggcgtggagttgtctgtcaactcagtgcactggagggcttcgcactgcctttggcacgtggcggtgcttaataaaatgcttctagaaagtctgcaaaagaaaatccccttgggagtgggtgtgacattcaatgtgtctcaaagcggtgacaaaccagcattttgtaagtaattcccttgcatgatagccaaattattatagcccaggactgactgaatgttttgaccatgaatttcacctgaacagaaatataattcactcttagctattaaaacataataatttgcatttttaaaatgtccttgatgtgttttccttctccatctctcttctgccacctaaacactgatgcttctttttcattcaagagaggttgttgatttagaaaggacaaaccatttatcttaacacttaataaaaggggaactatataaattttgaatcctgaagttgtggggtgtgatatctcactgatcttttttttttttttattgggaggaaaatatagaagtttgtagaaaacagataacactgtgggctgtactcttcattttatcagggctgaagataaagataaaaaataaaatccatcaaagacataaggttatccgatttattctcaatctgctcttagcacaagggttaccctgagctatcacaattcctaggatttttcagagacaaaatcctgccagataactaggtaacttagaaacagtgctttcaatcagagatcaccaaatgaaaagtctcattaacctggcttctccccatgagcccttcctctaaagaggttccaaacaggccacctttataaagagaaagtccatttcccagtcgagattaaaccagtcaagaatcagaatgaaggaatatgtctgaggtaccagctggtttatcttctgcaagaacttcccatcccttcgacccttgggaactgtaaatcaaatggcagactgtgaacattaaaatcacacattgaaaataatgcatctctatttcattcttttttccaggtttgagatttttaagagctctgagactgatacagttttcagaaattttgcagtttctgaatattcttaaaacaaggtaagatgttcttcgtcatatttttttcattccagtcccctatgccaagttgcaaatatcaggtgtgcttgctttcatcacaatgacattattaatagttatattattcacagaaagagtgatctaacacagagagggagagaaaaccagagtagggtttgagttgctctcttctgcagggccagggaactatgtggtgaaaagagagaaatagctgtgcatgcagggaagtagggacacttttagggacacatagctgatatctgtgtgcccagtggggttgcccagataagagccacggtgtcaaggggaaaggtgcacagtgaatgagggatagatttgctcattgattgggaagtccttgctgccagattctaaatcgcccctttattacatcactaaataagaaattgaacccagtcgtaaaggcaatagaagcaatgctgtgagaggcaatcacaaacctcatacggcaaacagaaaatcatttcatttcaaagcacattttagatgttcactttatatccgtatagcccttggggctttctctgtgaattgccttttgggggaaaacctacaaacctcctgccgaatgcaccatgaatacttctgttaactgcgttatgatctggaaaacacaactggaccaggaggaaaagcccccagaggatccctttcctgatgacctgccggcttgcagagctggcctgaaaccaaggctgtcttgatgaataaactaataaaagaggttagacgtgctctaatggagaataagtacaggccataaatttctcttctaggaaattacactctaagaagctaacttctaatgttccatttcctctttggttgcccttcatgcatttgataaatgattaaaaacaggacacctccatattttgtgatttgtaattaatatatctgtagttttgaggattagattcagcatcattttcctggtaacacaggctgggacctagcttcctgaatgaacctgacacagccaacaaattcaacctatgattggctttactccttgggtgttagtgttttttttgcttgtttattttattttgctttaattccaaattggtttcctctctctgactgctcatctatgtgactgtgaggtcaaattcactttctattagtcaagttgaaaagaaaaagagaatccaatggcactgaagtctttaaaagtatgtcctcctgccttttactgttcattatcctgagataagaatttatcagtcctctgtttattagcaataatgtaatattattcacatacagtgaatattgtatttcttcatgtttttctgattgccaataaccttgatttctgccttttaattattcttctatgtgctagaatcatattacttttgaaatgtaaacgatcaatgaagctagcatctcgccaatatttacgtatgtcagattcactccactagactgtgttttaaagatggaacgcgtgagtacccagcaccaagcatagagccttgtccttaagagacacttacttttttggtagggatggtgttttgtgacactctctaacattgggtagtgtctgtctctccctgtttcacaattacatcatatgttagggggatttttattctctgatgccagcattttgagaaggttccattgctctgaggaatactgtctactccctggaccgttttagaacttgagaaaatgatggaccatctgaatatctttttctgactttctgctaggacactcacctctctttcctttggatgcgggaagtggctgtgggatccctggtgtcagctcacctgccaactgcactcagtgctgcctctctcagtgcagagcggggaagctgaagcagccagccaggggacgagggagagaatggccctagggaagagtcacggggtggaaggctgtctgggcatctgccatccgggccccaaaacagcctttttccagcaccccacttcccactatatgaaactcttgttgttagagggtgctttttgccacaaacccacaacctgggttttcagagttcctttcacttatggtcataaccagatggttgagataattcagcaagcctggagtgagcacccattggtatcagcagcaaggtgcatgctaggagtcctgctgtcagagaacttgctgcgtagggggccaggccacctgacggtgtggttaatgctgatgtcagcatgcccaggggttgagaggggagtaactaagctgggcttagcctgagttgca

SEQ ID NO: 569 - DNA, 4047 bp, Homo sapiens
tcaccctgggtcccttttgcaaggagatatttccctctggtctccatgttgggaaaaataaatgattctcctgcaagccagtttgtttttctctcatatgtatacactattgatcttatcctgtctgcctgcttgcttttgttaagaaggtgctcagagctagatctgcagtttgtgtctagcaagagtataggaccttgtggcctctgcattcatttctttcctgcccttactttcatgcaccttaattaaaagaaaagcttttattctactatatttgtgtaactcactcaaatgtggcaagctgccaatcagcaatggatatacgatacaaacaccatcgtttaaagataaaaagaagaaatccagtttgaagttcaggttgtttgtattctatttttagttccataaataaaagcatatctatgcacacacagaatgttcaggattaaacactaaatggctaatacattgctagcatgtatttctacaggagtgcctcttatctatggttttgcttcctgaggtttcagttatccccaggcaaccgtagtctgaaaatattaaataggaaattctagaaataaacaattcataatgtttaagttgcatgctgtcctgcttggttccatctgggacaagaatcctccctttgtccagcacatccgtgccatctgcactccctggccattagtctctcagggcacttcagtgggcagaccgatgtcttgctgtaacccatgttacctgtgttcaactaacccttattttacttaataacggccccaaagcgcaagtatagtgatgctggtacatattgtcataattgttctattttattattgccattgttaatcccttcctgtgctaatttataagttaaattttaccgtaggtgtgtgtatataatgcatataggatttggcactatctgaggtttcaggcatccactgggaggtcttggaatgtatccctcaaggaacatggaagagtgttgttatctttcatagtttcagtgctaactgccagtcgccttctactccacgtttctacatttgtcgttttagctcagcaatatgcgacagtgatactggtatgagataacagtctaggttgggctggaaggttaggaccagcagtagagtctgttataaatttaatttccagcccttgccccctcccattctgatttagcaagtcttgtgaacctctttggaaactttatgcacacactgagcaaacaatgtattttttgagaccttagaatttgaaattttttttgttacttttattcttgaacaaccacttgactgggtataaaaatcttgggtcaaattctgtttgtctaaaaattctgaaaattgcccaattgctgtttaacacttttttttttttttttttttttttttttttttttttgagacggagtctcgctctgtcgcccaggctggagtgcagtggcgcgatctcggcttactgcaagctccgcctcccgggtacacgccattctcctgcctcagcctcccgcgtagctgggactacaggcgcccgccaccacgcccggctaatttttttgtgttttttagtagagacggggtttcactgtgttagccaggatggtctcgatctcctgacctcgtgatcctcccgcctcggcctcccaaagtgctgggattacaggcatgagccaccgtgcccggccaacactttttgttaaatataatgatcttagttacattaacggtaaataaccccatcaacactggtggtttatttttattgcttgattttaatacttgaaatgtgaaaatgaaaagccagatgcttcttggcattggtctctaagaactgatccttcattttaccttttagtctccagtcattttttcatatctcaaaagttcttttctgttatgtcctggcctttgcttatgatcaatgtgatgttttgacttccctttggccaacacattttatccatgggttggatctctgtgatttctactgtgtttctattttctgaagtttcatcttttttttttctccctttctcatattttctctgctttctgaggtgacttcttagttttgtactctgcgccgtggtcggttttcagcggtgctaagtcagcctttcatcagctcagttacaactgtgcttttggccgtgagcctttttatttcatcaacatcccgtctcatctctgcaattatttaataaaagttatataagtattatttagcatagaaggagaatgttttcaaaaaaagtcttctgttcatgatggttaatccttttcagatgagaaattatttttttgagccaatccttttctccctctttccttgtacagattttcccccaccccatgaactttaagttaattttcccttattacctaaacagctccacgttgcgtgcagttagtgtactcctcattcaagtagaaggtagtaaggattccttcccaccactgtgccctaggctgccctttactggctcacgggcgtgggagaacaaagccccacccacgggcgtggagttgtctgtcaactcagtgcactggagggcttcgcactgcctttggcacgtggcggtgcttaataaaatgcttctagaaagtctgcaaaagaaaatccccttgggagtgggtgtgacattcaatgtgtctcaaagcggtgacaaaccagcattttgtaagtaattcccttgcatgatagccaaattattatagcccaggactgactgaatgttttgaccatgaatttcacctgaacagaaatataattcactcttagctattaaaacataataatttgcatttttaaaatgtccttgatgtgttttccttctccatctctcttctgccacctaaacactgatgcttctttttcattcaagagaggttgttgatttagaaaggacaaaccatttatcttaacacttaataaaaggggaactatataaattttgaatcctgaagttgtggggtgtgatatctcactgatcttttttttttttttattgggaggaaaatatagaagtttgtagaaaacagataacactgtgggctgtactcttcattttatcagggctgaagataaagataaaaaataaaatccatcaaagacataaggttatccgatttattctcaatctgctcttagcacaagggttaccctgagctatcacaattcctaggatttttcagagacaaaatcctgccagataactaggtaacttagaaacagtgctttcaatcagagatcaccaaatgaaaagtctcattaacctggcttctccccatgagcccttcctctaaagaggttccaaacaggccacctttataaagagaaagtccatttcccagtcgagattaaaccagtcaagaatcagaatgaaggaatatgtctgaggtaccagctggtttatcttctgcaagaacttcccatcccttcgacccttgggaactgtaaatcaaatggcagactgtgaacattaaaatcacacattgaaaataatgcatctctatttcattcttttttccaggtttgagatttttaagagctctgagactgatacagttttcagaaattttgcagtttctgaatattcttaaaacaaggtaagatgttcttcgtcatatttttttcattccagtcccctatgccaagttgcaaatatcaggtgtgcttgctttcatcacaatgacattattaatagttatattattcacagaaagagtgatctaacacagagagggagagaaaaccagagtagggtttgagttgctctcttctgcagggccagggaactatgtggtgaaaagagagaaatagctgtgcatgcagggaagtagggacacttttagggacacatagctgatatctgtgtgcccagtggggttgcccagataagagccacggtgtcaaggggaaaggtgcacagtgaatgagggatagatttgctcattgattgggaagtccttgctgccagattctaaatcgcccctttattacatcactaaataagaaattgaacccagt

SEQ ID NO: 570 - DNA, 4046 bp, Homo sapiens
tattttaaccatgtaaactgattcaggtcctccctgtagtcaacagagataaaagtctcaataatcaaacctgtgggtacttcagtgaccagggaccaccatctgtcccctgtgggtccagacatcaggcaggaggaaaagttggggccatgtgtcagcgtcccagctggggctcaccatgggaagtgggataagggaggattattccagttctcttctttgagttcaggtttttatctacgggaagaagagggagattggacgaggttagattcacttgtctccaatgtcctgcatggggttctgggacagacaatgcctcagaaatgggaggtccaagaggatggtgactttcactgctagctgatgatgaaagggaaagggatgagggaagaatgggctgaattagaggctattccacccctctgatggttagctttcagggggaagggaaggagggagggaggctggtggggtgggagacaaagacgaattggagattaggaaagattctttggaatagtcaaaccagagaccaagcaaagcatctttttcccttgtaacttgagacctgtgcaaatgacacaggcttctagttcccaaacttaataagagtaagtgcgtgaagaagagacctgcagacacttaattcaaacagtctagaattctgggaataagttatagtacaagttatatgtggctggttatagattcagccttgatgtttatgttccctgtttcaagtcacacacatcagattactcacttgtcagctaaaaatagggccatcactggcttgcaagtcgagttaggttttatttctctatgtgcttcattgttcgttcttttgtgctccctcctctgtgcctggccccctctgccatgcccaggtggcttcacagtcccccttccccatggtcaatacttctttctaactgagggataaatgactctgaaaaggaaatgtatttcaatggggaccaatccattacacccgagagagagaggccaagtgcagggacttctggaggagaccaggaatgagtgattatgtagcatattctgtgtgaaaggcattttaaaacacacgtagatcaatttattgtcacagcccctgagaggcataattctcatcttttttctttccttctttctttctttttttttttttttttttttttttttttgagatgaagtcttgctctgtcacccaggctggagtgtagtggcaccatctccgctcactgcaacctccacctcctgggttcaagtgattctcctgcttcagcctccccagtagctgggactacaggtgcaggccaccacgcctggctaatttttgtattttttagaagagacgaagttttgccatgttgactaggctggtctcaaactcctggcctcaacctatctgcctgccttggcctcccaaagtgctgggattacaggcatgagccaccgcgcccagcttctcatctttattttttacatgcagtcatagacattcaggtttcatataagcagccagggtctctcagtgcatcaggagcagagccagggtcaaaacttacatccatttgaacccaaggcacagttttttcttactgggtaatgctgctgtcttatgggggaattttaggcatcaataaacaaggaagagaagaaggctaatttcttttgggggctggtggatcgtcccctaaaattatgtagatagtcatctttcctatcttagctaaatacaaatgtagattgtaaacagctcctcaagactgtacattttttgaggatagatttagagcaaatcacatttgtatccccaatatggttagcccagtatctggctcctagtaataattatagcaagcactgactgaacatttcctatgtgccaaggacaattttaaccgttatagatattaattcattcctcacaataaccccatgaggtaggttactattactgttcccattttatagttggggaaactgagatactttgagttgaaggaacttgctaatgctcactcccaattaatggcagagctgggatttgaatcctataacactgggcccagattccgtctcttttctaaataggtactccatgaaaatatgttgttgaataaatgtactattactttgtacagggttgagggaattagatatgacttcactgaagaggtcaatttcgtctgagttcatttcttggtcaatatttttaaatgaatgaatggattccagtgtcctttttctctgaccacttctgtctcagaaaaacaagcctaatgcagaggaagaggagcaagggagttttcccagtattggtagatgaagatctatgacttcagagacaaatgaagccctcctagaattctttcaggcagacaataccaggtggcaccatgggacacactggtgggaggagtgcaaaatgaggatacagtttatgacagttttttttggaatagacacatgtccagagaaatgggcccacattcacttgtatgtgtgcatacgtttgcatagaattctcttttaaatatttcaaatttataagaaatcctttcttgtgatgaacagatttatcttgaaaagtgtttcccattttaaaagtcagagacttgaggcagggttggaataacttccaagagcatgtggctcgtatgtggagatgccaggaaccaaatcccctgctgctggttccagggaccacatttattgccacacctacagggtcctaggaagaggctggcagatgtgccccatggagataggtggggtttttatttacagtaggagaccagattgcccagtgatgatggggcattcgatggcagaatatagaccagtttgactgggccctagtgctttggcagatttttggaggagaatttgctgagtgtcagaccctgtgcagagctttgcaaacatcgttttctttaatctggatagttcgtctgtgaagtagatgtcataatccctatttcggagatgaggaaatgaggctaggagttacataacttactcagatgtgcagctgctggtggcagagcctgaatacaaatccttcacttctccaattaaaccagccatctctgagttgcaggggtttcatgccatactgcccactggaagttgggagggaatttacagggttacagcagatgatctctgtttaggcatcaggtgaaactttagtgttccctaaattggtacaagcagactctgtttgagtatctctgttgacagggagataccatctaacatggcagcccatctcaatgtttttaataagtatattatacatgcaataaaatgcatagatcctgagggtgcattcagtgagttctgacagagatatgcaccactgtaaaatggtctgtcatccatatcaacatagagaacatttttactatcctggaatgtttctttatgctcatttctgtcaatatctgctctctcctcccttgaacataaaaaaatcactatcttggcttcaatcactatagattagtcttgtctgctctcaatttttgtatgaatggaatcatgcagggtattcacttttctaactagctcctttccttcaaaataaggtttttgatatttgtatatattgttgtatatattaataatttcttccattttattgctgctaatattccattatgggatataccacaatttgtttatcaaaccaccctgttgatggccattaggttgtttccaactttggcttattttgaataaagctgttatgaacatccttgtacaaatgattttgtggacatatatttttttttcttgggtaaatacttagaaattgagtctctgggtcataggatagatgcatgtttaacattacaagaaactgccagttttccaaaggaagatacaccattttacacttctactagcaacgtgtgagggtgccagctgctttgtttcttcaccaacacttgataatgtcaacttttaaattttagccattctaatggatttgtggtgccatcttgttgtagttttaatttttatttctgtaa

SEQ ID NO: 571 - DNA, 4045 bp, Homo sapiens
ggacattgggatatgaacacaaagaaggagacaagtcacacagccatttatttataggaaaaaaatgttgaaataaatacatgagctgaagactttagaattacaaaatgagacttgctaacttgttttggattggaagaaattagtttatgcccatgacatcgctttattccagactgattagaagcataatgtacatggcaggggcagggagaaggggatgacaatccattctttgaaagagactcttctccccttaggttaaatagatcgtcaagtccttgcatgtcaaaagcagagatgtgaatcactgtccttcagaaagggaagaaaacactttaagcaagtgcaaagttcccagctgtgctaggcacgatggattatacccaaagaagttggacagagaccttgacctcaaggatttcatcgtctatttgaatagaaatgatttctatataactgaattaagccagagcaataaaaatagcatgatattaggttctaaagtgagtgttgcaggaaacagaaggaacttccaaatgttgttatttacagatttctaccttgtgaaatgtagaagtacctgttctcaaattaaacattccttcctcatttcaagatgtcagctacatcagaggttgaccaactatggcctacaggctacatctggtccatcacctatttttgtaaggaaagttttactggaacgaggccaagctcattcatttttgtatcatctgtggctagttttctcactccaatggccgcattgagcacttgcaatagagattgtgcagcttacaaagcccaaaatatttatgatctggccctttacagaaaaaaattggcaacccctgatttagattatccaggttgatcctggtgctaatttagagcttcagaataaaacacagctgaggtgtgcctggtagcaaattaatcccccccaaaacaagtacttcattttccttaaattaatgttgagcatcagaattaaacagagctaaatctcatgatacctgaggcccttgtgaaaatgtttttgctgacccaagattcagtgttatgctttctgtccttacagagagctaaatcaagagtccccttttggaaggagtacctctgttctttgtaaactgtaattgaagatataactcaccgtgttcttcagtctttattcaaagccgctggcacaaaaattctgcttgaatttaattttaggatagatttgatctctgaattggctttataggttttctcagttcacaatagtcataacctagttgtttctctcttgccataggtgacaggcaatgcagagccaatttcagaagtgagctcagtagtaaactcatggcaggtgcaggatgaggcaagagagaggcctgggtgcaaacatgagggtggctcattcccagggctatgcaaaggcagggtcagtcccaaaaggagcacctccttacatgttgtgcctgaagtgtccctttctcagtcttttcttggtggtggcaggtgctgcctggcaatccccatcccttctacttttagatggtgggggccctgtcctgctttatccttgtatatggcgcttttattttaaccatgtaaactgattcaggtcctccctgtagtcaacagagataaaagtctcaataatcaaacctgtgggtacttcagtgaccagggaccaccatctgtcccctgtgggtccagacatcaggcaggaggaaaagttggggccatgtgtcagcgtcccagctggggctcaccatgggaagtgggataagggaggattattccagttctcttctttgagttcaggtttttatctacgggaagaagagggagattggacgaggttagattcacttgtctccaatgtcctgcatggggttctgggacagacaatgcctcagaaatgggaggtccaagaggatggtgactttcactgctagctgatgatgaaagggaaagggatgagggaagaatgggctgaattagaggctattccacccctctgatggttagctttcagggggaagggaaggagggagggaggctggtggggtgggagacaaagacgaattggagattaggaaagattctttggaatagtcaaaccagagaccaagcaaagcatctttttcccttgtaacttgagacctgtgcaaatgacacaggcttctagttcccaaacttaataagagtaagtgcgtgaagaagagacctgcagacacttaattcaaacagtctagaattctgggaataagttatagtacaagttatatgtggctggttatagattcagccttgatgtttatgttccctgtttcaagtcacacacatcagattactcacttgtcagctaaaaatagggccatcactggcttgcaagtcgagttaggttttatttctctatgtgcttcattgttcgttcttttgtgctccctcctctgtgcctggccccctctgccatgcccaggtggcttcacagtcccccttccccatggtcaatacttctttctaactgagggataaatgactctgaaaaggaaatgtatttcaatggggaccaatccattacacccgagagagagaggccaagtgcagggacttctggaggagaccaggaatgagtgattatgtagcatattctgtgtgaaaggcattttaaaacacacgtagatcaatttattgtcacagcccctgagaggcataattctcatcttttttctttccttctttctttctttttttttttttttttttttttttttttgagatgaagtcttgctctgtcacccaggctggagtgtagtggcaccatctccgctcactgcaacctccacctcctgggttcaagtgattctcctgcttcagcctccccagtagctgggactacaggtgcaggccaccacgcctggctaatttttgtattttttagaagagacgaagttttgccatgttgactaggctggtctcaaactcctggcctcaacctatctgcctgccttggcctcccaaagtgctgggattacaggcatgagccaccgcgcccagcttctcatctttattttttacatgcagtcatagacattcaggtttcatataagcagccagggtctctcagtgcatcaggagcagagccagggtcaaaacttacatccatttgaacccaaggcacagttttttcttactgggtaatgctgctgtcttatgggggaattttaggcatcaataaacaaggaagagaagaaggctaatttcttttgggggctggtggatcgtcccctaaaattatgtagatagtcatctttcctatcttagctaaatacaaatgtagattgtaaacagctcctcaagactgtacattttttgaggatagatttagagcaaatcacatttgtatccccaatatggttagcccagtatctggctcctagtaataattatagcaagcactgactgaacatttcctatgtgccaaggacaattttaaccgttatagatattaattcattcctcacaataaccccatgaggtaggttactattactgttcccattttatagttggggaaactgagatactttgagttgaaggaacttgctaatgctcactcccaattaatggcagagctgggatttgaatcctataacactgggcccagattccgtctcttttctaaataggtactccatgaaaatatgttgttgaataaatgtactattactttgtacagggttgagggaattagatatgacttcactgaagaggtcaatttcgtctgagttcatttcttggtcaatatttttaaatgaatgaatggattccagtgtcctttttctctgaccacttctgtctcagaaaaacaagcctaatgcagaggaagaggagcaagggagttttcccagtattggtagatgaagatctatgacttcagagacaaatgaagccctcctagaattctttcaggcagacaataccaggtggcaccatgggacacactggtgggaggagtgcaaaatgaggatacagtttatga

SEQ ID NO: 572 - DNA, 4051 bp, Homo sapiens
tttcagcctagagtagcttaatctagttatagatatgggaattccaaataccttttctacaacaagagttcaaagtctttcataagtcaatataacaaaagatgaataaatagttaaataatactacagaagagtaaacatgagaagacatgcatttaaatgtatgcagagcacttattgctttggatagaattcacatgttatccatgcgttgactacaagatacatgcacatctctaaacacactcataactgaattcagcttaataggatagtaattgaatgatggaacctagtgtgcctgacttttctcagatgaaatatctggctggtgcaatgcagtaactactattaaaactccatcaggcatggtggctcacacctgtaatctcagcagcttgggaggccagggcaggaagattgcttgagcccaggggttgaagaccagcttgggcaacatagtgagaccccatccctacaaaaaaaaaaagtagttgggcgtggtggcttatgcctgtagtcctaactacttgggaagctgaggcaggaggatcgcttgaggcaaagaggttgaggctgctcagagccataatcatgccgctgtaccccagcctgggtgacaaacacagagaccctgtctcttaaacaaaactcactaggatataccagtgagtccatatgaagaatcctacccatccttctcaccttggcctgaatgaatgagtacaagtgtcagtaaaacagctgttatttatttccttatcccacatctgtccttgaaggctgtcatgtggtcaaggaccatggagccgacagacaatgtttctatcaacaggcagttcaaaccaagcctgtggctgaccatattgagtggatgaaagagccttggagggactgggccttttagaaaaataggctcgtaagtcaagagcatggtgtcagctgtctgtgtgtatttcatggtgagagtgaaagcagatctaaattatgagttgttgagtcacctgcatgaatcaattcaattcttaatttgaaaggaagctcagtgccaagggaacataacatatggaaggagtggcctcaatgactaacaaaaccagggcctattagggttgcctgagtttacttaggtgcatttataagacatgacatttccacagctgttcaactatgtgaaaaccttttgtaagcattactgtatttgataaactctgtgagatggatgttattgttatctctgaattggcagatatgggcaaggatgttccaagaggtctgcagtgtcacacaagtagtaaatagcatagcctgggctagacttagaggtcttttaaccagtcacattccccctcagcagtgagaactatggtctgcccctgctccctcagtgcacgccaattagttaggcctgtattcagatgggatgagttatgttctgattaggaaccacatgtagtatatgctataagttaaaagtaggcagatgtgcctgtagccatagggacttgctgggggagctggacttgagttgagtcttaaaacatggaaaagccttaactaagtggagtggagggccaagagcattccagacaagagaaaaaggtgagcagggggaggaatttgcatccttctttggggagccaggaagtggactggtgtgaatatttcagagtgatcatatagggaggcagctgagggatcctcagtgcgtggttatagtaactggagtggatttactctggggcaggacttactccgttgacacccttggagaagagcaggggaacaggaggagagccttcccagttaccctgttagggaccttctctttgaccgtgtcctgcagatgcacagtagttgggattcatccacctccatccacttatttctttttagctcattttgtttcattcaacagacattcccattaccacattctaggcactgtgtcaagtcttactgaagttactaaaaggaaccctcaatgaatgttttgtgaatttagacatgaatgaatgaacaaaagaaaagggacaagggctggtgagctcattcatgggggagaaggaagtaagtaaagaattccagtgtgttgcattgaatatggcaggagagtgctgggggaacaggcagaaaagagacagcctgacgtgtcccagggaagactttccaaaaggaggtggtgttctggctggttcctggagtctgaagtagaaatttgttagctacaggaggggggaataggcaggtcaaactgagggcaagtgtttgcaaatgaacaaaggcctgaaaattaggggaaaagcaaggatgtaggtgtaacttaagttgaagtggagaagaaggtaaggacagaagaccagggaaaacatttccacctgagactgaacagaaccacctggtccaaggtcacttcgttatgtctttaggcaagccctgggccaaaatggtgtggctctgggaactttgctcactcaaagccctacataagcccatctttcccataagaaggctgagggaacatctatctaagatagatgctagtaatttaacaaaaaaataaaaggcaacgatactatagggaagaaaagaaagaaaggagcggatgatgttacttggctattgttttcctaaaacaaaagcaagaaatgaagcatcttttaagagctggcctagaatgccattctgggggcttaggaaaaaaatcaaaatgtattagagctctctcagacattggatggtttatggcagcatctaaaattgctggtaaaattatgaccttgtaattcacagccgtgtcatatattctctagcacacagtgtaatttatgtaccaagccagttgcttcaaaaaagaatggggaaaaaactcacacaacacaaagtttataaaatgtggttatttttaatggataatgtctttagcctaaacctgtgttgttaggaggaagggtgtgccgttgctcaaggttattaccacagttcttgcagcatggggtgagagtatgaggattacttattacacttacgcattggctggccaggctaccatatccacaactacacagtcctcccttcctccctccctcaaagagagctatcaccttgaactccttcttcccttgaaataaaacctgggcaactaccgaagcttgaccttgactcatgccttaaacctgagcacaaaacttaacctctgctgggaaaccttcctccctatgaaacaaaggggtctcaagacaacttcttagcaagccaaaaatgagatttccactcagcttctcaagttagcctggctttgaccccagttatggagctagagaggggagaggagctgggagcaaactaggaatcatggagggggggactatggggaatatcagattcacacaactctcacttccatgaaaagggggaaggggagagagaggagactcccatggccgagtgatcaggtccagagacctccttgtggtccaggctgcacctgcaccagtctgcttgaccttgagcaacaagctatagtctctgaatcctatcaccctcacctataataaggagatgagctcttgccttcactacctaaaggagttactgtgaggatcaaagggtctattatagcttttaatcttgagccaatgactaggtcattatttttctcttgctctgcctgtatcattttctcctcatggcatacagctcttttgcctcaaagaagattcttgaggatgatgacctgcctcaaacttccttctccctaaaagtgttttcttttgttcagtttcatttctgtctttccacttattcctgattattttccctgagcctcttagagatctgatcacctcattgtataggagctatttacactccttctttgatatgaccacatgcttctctggatctgattcttaattctttgctacttccctccctgcccccaacccatgggggcaccagaagctgtgggaaaggaggcagcccatcgctaaggaggaggaggaccttgtcagggtgttggtggcgcaggtgaccagaggacagagctcac

SEQ ID NO: 573 - DNA, 4039 bp, Homo sapiens
gtctgtcatttcctttgactctctggctggtcttcatctcagcaaagtggaaaaaacatattttagatgggaaaaaatgggaagaaactgaaagagggaaaatatccctaatacaaggagaaacacaactctagattccctattgccatatggaacatttaggatttcccaggaggaaacacgttcaaccagttgcttctgttacctccggactaagagggatcctgatagtagctgtggctggtgaaggaacacctctattatctggctctgggtgctgcagaaccaggcagttaacaggacaagaaaaccaaatgatccatgggtgcaaatgtgcttttgccaaagccacttccctggggtctagatagcgaagagaaatggtggcttctagaggaggaagagctaggaagtaatcctggagtccagttgtcttttcttaaagatcatgtttcaggattccaaaaaaaaaaaagaaagatcaatggcatgtaggagggtgggggacaaagagggtgaattatgagtttgtgtctgtgttttaaaatagccacctgccttgaaactgccatttagaaatgtgcatggaaggagaatcttcctgattcttagctctaatttatggccaatttatgaagtcaaggtcatctctcttcctgctggtgtgtgttcaacctggcctccctttatgccaaagaccttgagcagaccttggctaaaacccccaggtatactcccattcactgtcagcagtgatccgtggaatggattggggctggccgccttgccttgggcagagttcatgtgtcactcaggaagatgcatcaggctgctgagtcagagggagtctgccttatgtccacagagaggagtgaatcagaaagccagatgagtccagctctcaggacatgacaaattgcagaatgccgagctgggaggcttgagtacatcatatccttcttattctactgatgagaaaactggggcctggggatgcccaggaatttgcttacatttcttctcctaatgaattaattctttcatttgttcaacagtgatgccctgagtgtctcccgtgtgtcaggctttgttctaggtgctggggttagaaagaggaagagtgtcacatgaggagaagacacatgtcacaggtcattctaaaagggaaacccaactgagaatgaagagtgtctcagggcagaaaaaggaaggagcaaagacatccaccttggcactagacaatttgggtcctgatttgacagtctttagtaattagcataaccatcagtacatcatggaagcttaccccatgtaccatttcttagctctcctcactgttgtgattgcaaaggtgcttggaaggttacttgatgagcctctttctgctgctccagacccagactgtgagttccatcaaggcagggatctttctcagctctctgttttatccccagaatgggacagagcactgcacgcatgggagatactcagtaaatagccactgagtgaacaatggaatgaatgacaaatgataagggttcccaagttccattctatagaataagggtcagcaaaattcttccataaagggcctgatagtcaatgtttttggcttcaggggctgtatgatctccaccaccaccattcaactctgcctctgtggcatgaaagcagccataggcaataggtaaaagagtggacatagctgtgtcccaataaaattgtattcgggacactgaaatttgaatttcatacaattttcatattccataaaatattctaatttttttagctgttttaaaatgtagggggaaaacatttttagctggtgtcctgtgcaagaactggtggtggccagatttgtctcacaggctgtagtttaccaacccctgctataggaggaagattaatagggtaaagattttatgaggtttttaattgattcatttatccatatgtttgagcatttacttactctatgtcaggctctgtagcagacactggacatacaaacagaaatattagtcaccaatatcaagatgaaatcattatccttgatgggtcagatcttccgaggatgagtcacgaccgtgtaggaaatatgaaccccgcagtctgtttaattgatgtatgctatgcactctaaaattaattggagatttctagataaaactttccaaatgtcacaagtatccttccagcatttcatatttacagactggaaaatcaatggagatggaatcattctcccactgtctctaagttaatttgcctgtctaatgctttaacactttctgctagttctgtctcattctttacccattggagagtaccagtgggttttcagataacttccttaaagaccagaaagaaagatttaaaaaaaattccagctccttccttttggctcgggtcttccaggtctttatcttgatgaaaactggaggcaaagatgttatctctggattgtagtcagagaacaacaaaaacccccatcttttctttcccaggaaaatattaatcaaaatagaaataaggtgagattagaaccttagaaggttttgcataatacttttcttgtttgactgtttctggcctgtcttaatccaataatctattaaactctagctagtactttctttcttcatccccagcaaatttgcaatcctccagaatccttttgggaattccaaggcaaacggccttaaacaagaacataattgtctgagagattttgtttgcttatcggaactgtttggtccacagcattatctgcatgggggcataattcccttagctgcagtcagttttacaggtctttgctcataggattacagttcttttacataaaaggatgcttggaatgggggccaccaagagtgccaatatttagtatctttaactgagctcaaagtaataactacttaactagaatcagtgtgcttcttgatatctaggaaaaaaaggcaaaggaaggaaagaacaggatttggggatgtaatttgagattaataaatgattcactcaatagatacatatggatcatagcactctgcttgttgtgcatggtatactgtgaaatgtaagacacaatttcagcctagagtagcttaatctagttatagatatgggaattccaaataccttttctacaacaagagttcaaagtctttcataagtcaatataacaaaagatgaataaatagttaaataatactacagaagagtaaacatgagaagacatgcatttaaatgtatgcagagcacttattgctttggatagaattcacatgttatccatgcgttgactacaagatacatgcacatctctaaacacactcataactgaattcagcttaataggatagtaattgaatgatggaacctagtgtgcctgacttttctcagatgaaatatctggctggtgcaatgcagtaactactattaaaactccatcaggcatggtggctcacacctgtaatctcagcagcttgggaggccagggcaggaagattgcttgagcccaggggttgaagaccagcttgggcaacatagtgagaccccatccctacaaaaaaaaaaagtagttgggcgtggtggcttatgcctgtagtcctaactacttgggaagctgaggcaggaggatcgcttgaggcaaagaggttgaggctgctcagagccataatcatgccgctgtaccccagcctgggtgacaaacacagagaccctgtctcttaaacaaaactcactaggatataccagtgagtccatatgaagaatcctacccatccttctcaccttggcctgaatgaatgagtacaagtgtcagtaaaacagctgttatttatttccttatcccacatctgtccttgaaggctgtcatgtggtcaaggaccatggagccgacagacaatgtttctatcaacaggcagttcaaaccaagcctgtggctgaccatattgagtggatgaaagagccttggagggactgggccttttagaaaaataggctcgtaagtcaagagcatggtgtcagctgt

SEQ ID NO: 574 - DNA, 4041 bp, Homo sapiens
ttccaccagctctcaggtgtagtgattctcctgctctgtggaccacactttaaatagccaggcttaccaatccacttaaaaatggccaaaaccacaattacttttgcaccaaactaatacactgtgctgtccagtatggtagctcctagccacatttgcctatttaaaagctcagttcctccatcctaccagctgtttttcaggtactcaagagccccatgtggctcattggctgcggagctggacagcacagatgtggaacattccatcatcatagacagttctgtgggaccacgctgctctagaatgagtctgtgacagcacacaccatggctttttactttttgtatgcccaggacactcttgcacatagtggaagcttagcaaatgttttttgaagtgattttgagtgaatggaccaatggtaaaaattctatatctaaaagaaataaataactttcctgaagaaatgctagagaaatcatgaatacactgttaaaaggaaccctctaccaccctacccaaattaaattaaatatacttaaggactcagtaggccaaaaagcacaagagacactggaccatgctccagctccaggacacactactctgctgctactgaaatggcattttgggctctgaaaggaaaggtctctggtgccccctagaggctggtcctgcaatttgctggatttgtgagcaattaagtagcaaggggagaggggaagggggccaatttcatcatgctcagatgggcagttcgtggttagcagtggtggagataggctcactttgaactcctataagctatttgacatctgataacttgactcaaccgctatgaccaaaagcacccctcccccaagggagttgcttctcagtgacagtgcccgaagcctggaaggaagggcccctgagtgcccccagaggtcacccactccatgttccaggcagctgactttcaacttggacatctagattccctgaagcccagagccttctaagtaaactgctgtctgtagtctgtgggtttctttagaataagaatagtgaaataaagaaaagaaaaagtatgatttccctttttgggccaggtgtccttaggagagtgggggttggggggtttgagagaaagagaaatccaaaagaaaagtgcttccataactagaataaagttagatgtgttcatattacacatattacatatatgtgtatatatatgtatgtatgtgtatgtacatacagtatataattgtctcaagtgctcttccaaacagtactatgaaataggtgtcatttgggggcccatattacagatggggaaactgaggcttcagaaggttaaataaattgctgagagtcacctagtgagtaaatggtagagctcagctttgatctcaggcaatctacctccaaagtccatgttacttgatatgatactatgctgtctctcaagctacaagttaacacatttttaataacttaccagcctccaaactacttttttcccccatgttcaccagtcccctcttctgagcttcttgacccattctatacaagtagccaaataaataaaaacaatccatgtttttaccattagtccatgttgaaatagtatcatgctagatgttatgggctgctatggtctgaatgtttgtatctgccccaaatgtatgtgttgaaatgaaatcccaatgccgtcgtgttggagatggggcctctgggagatgattagatcatgagggtggagccctcaggaatggtattggtgcccttatgaaagaagcccttgggaggctgtttgtccctcccaccatgcagggaaacaagaaagtgccatctatggagcagagaaaaaaccctccccagatgctgaatctgttgtcgccttgatctgggacattccggcctttagaactgtgagcaatcaattgctgttgtttataaattacccagtctaaggtattttgttagcgcatatagactgacatggggctctactcttggcttgagcttttttttttttgtttttttttgagaaagaattcaatggcaacatacaccttatgaatagcattgcaactgaattgctctagtgtgacaagaaaaatgaactcattattaagttctgtccctatgattgggctctgaagaaggcagcccagccaagtggaatactaaaaatttggatgtatttcagggagctcattgctgttccggtcgctgctatagctaaaactgcttctagagaaattactcctctccaagagatttccaattgtgttcccttgatattgctttgtcagggacacgctttaaataagatgccctccgtaagtagagattctaaatcctcattgatttgcatggctctgttatatgccaaattggaaataccatcctaaaatgaatgtcttcaaggaacgaattcagcagtaggtttgcatggatgccaaaacctctccagatggctgtacttcatctggggtattattggaacagcctcctcagcaacctaaatctctaggactggacgtatatttaccttcacatcatcttcaaaaaatagatgccttgattcttttccatgagaccagggccataatggattgacctggctagcagatcagatagggagaaaatgaacacctgaaaccagctcagggattcgactgcattattcagctgaacacctactgtgtgcaaatccctaggtgctaggagtgacccaaagatggggaaaacatagatcttgcctctataagatgttaataacttaattggagtgtcctctagaaagaacagtaagtttataggaatttagaggaggaacagatggaggaaagttggccatcccagcccaaagaagatttcaggtatctaaaatataaacatgtttctcctagagcaggactactcgaggtgcggtctgcaagccagcacatggcctgggagcttaatagaaataaaaatgttggagttcaaccctaaacctggagaatctctgaaaggtagggctgaggaatctgttttaacaaattctcctggtgattcttctatgggctaaatgatcttggcagtatgttagaatcacccaggaactctgacacgtcctcctggccagactgtatttctaaccaagcatatgagaattggggatgaactcagtcaccagaatgttttcaagttctctgaataatttcacttgtgcagccactgttgagaggcctggcacagtggtggttcttaaaccagaggaacatacctgaatacctgagaaacttcaacacacacacacacacacacacacacacacacacacacacacgcacacacacacacgcacacgtactttccgaaatctattctgtgaggctctttgggtcgtggtaaggacaattgctttggaacaagcacactatgtattctagatagaccagtggttctcaaactttgagtgcaccagagtcacctagaggtctggttaaattacagatttggggtgttccatccccagagtttcagattcagtacacctgggatggggcctgaggatctgcatggctaacacattcccaagtgatgctgctgctgctgatctgggggccacactttgagatctgctggtccagcccacggtgaggctgaacttgaattctagttgtagctgctatgcaagtttccaggattctggtattagagtaaaccttgctattttgtgctcctaaatatcagtattcttattaatgtaatcctttatttcatatgtttttgagattaaaatctgagtcatttacatcttgagatatactcatcctatgatattccatattacaatttcaacttgaacagcagaacccttttcccatagctcttggatcttccacttgtaatccccttctaaggtattccaagtccttggttactagtaagaatgagcacctttgcttgactttattagtcactagtattttgtctagagccaatttggttgatatcgcttcctaaactctctgaaattaggatagggtcaactcattc

SEQ ID NO: 575 - DNA, 4041 bp, Homo sapiens
actggctttgtgacctgggagctcaattttctttacctagcctgttgtttttcatctgtaagataaagatttggctagatgacttcgaagaatcttttagctcagaaagtctttaaggttcttgggtcattaatgggaaatttgggatctaggtcattggggtggacagggaagctagtagaattctatcagcagcacccctgagtcaaaattatggatgagttgttaacagggactccttttaaaacatcttgttgctaagagttcaaacacatacccatgcacacacagggaaatcgatggggaaggggagaggtgggatctgccttcttcactgagctgtgcttaattaccctgtgcactcgaacaaccactttgcttttctggatcctcagttttctcatctgaagaatgggggtttaaatgaaattaccttctagtcctcacacttcatgaatctgcactttctgccagtgtccattgtctcttggtcccctgtgggcctgggtgatggaagggctccctggtgactgtggtggagacatcctcctctgcagtgagcagaacatgcccccggtaaaagtgtggagcccagcttccttgtggtgagtgacacgttccctgaagcattttagggccaggagttctggtatgctttgaaatccatagccttcctgtggatgatttaattctgatttttggagatatgttgtgatctcataaaaaatctattggcacaaacacagaatgggggtgaaaaaaattgaataggaaataaaagaggtggaaatgaatttctaatgagatacatctttgtatcaactgtggtcgctttccaaaagaaatgtgctctaaatgtgcttccatttgtatattaatatttattgagcatctactatatgtcaggtaccattccagatgattgggaaacaacagtgaagaaatagagtcctatccccctaccctcctatactgcagtgttgggaaagcaggaaacactgaacctaataaggaagtaaatgatacggtatggttaggaagcataagtactattgaaattgaacacatagaacaataaccttttgggatatgaaataataataacaaaaataaaaaaacctctttcctcttgtaggagaaagcacctttaatgaaatgctttaggttctttggtagcgaaatctccttgggtgaaatctaaaactgatctccctgttatggaagagaattcagtacaataatatttcaaggaggttctcatctgacttaatacatgggttattacattgtgaaacaaccattgtaccaatgagcttccagagagaaaatgaacattcccatgagatatgacttataaaggagaagaaataatcccattaaataggggcatttcaggcatggctgcccttctcctggaaagtggaagggtgctgccttttctggctgaggtttgggataagatgcaggaaaccgaagtctatccccattctcctgcacaaactttcctggccctgctgagggtacaggactgtgcggtagctggctctgtgggagataaaaaccagagtgaatgcagggtccctgcccttacctgtcccagaacgctccccacaccgtgtttagttttcaattgtcggcatatgattgcgtgttgtatagtacagaatatattcattgtgcagatcatcctagtgcatgtaacggtgtactcatagagacactactatgtagtcagctcctactgtgtgatgggcactctggaaagcccctcacagacacggactcacttaatcctcagagcaaacctatgaggcaggacttgtcatttccccatttacagatgaagaaactgaggctaagagagattatcttgtccaaggtcacatctcctgggagtggtgggaggggtgcattccccagtatgtggtctgactttatgtccacactcttcctctgctcttctttctgtgtccttaccccttgaatgatttggagttgtgaggcctgggttgggaatgacagggctagttttgctgtgttgtgttggcatccctccatcggtgcttactcataaagggcttcactccaggcaggaagagagggaagagatcttatttaagactccgtgttctcctggctcctctttccccctcctccttgcccacctccagtttctagaaatgccaggaggaccagaagaatgcagagctagcctggtgtctcccgagtcctagtgcccctcagcagcttggagatccgacctgctccatctgggacagagagactggggcttaagaacaccccggatattggcgcagagtagattaaagctcagctctgagctccaccaactcagtccacatcttggctaaactgtttgctgatgggtcgctcagcatgagcattttatctgcctcaggctcagttatctcacctgtacaatgggctaattacagcacccacctcatagggattcaccgaggtaatgtgagtagcacagcacgtacttcatacgagcttaatgaacagaagccaggattacctcggtctctctttctaacctacccatcatattttaaagcaccgcaggagaaaacaaaccagaacagaataaaaaataaggcagcggatgtgaggacagtcatgtcggcaagcagcaagacgctgcttattttaattcctgtccccacccaccaacttattcattttgtttcccttacaaatccaaacctcactaaaataaatgcaccttgaaatgagagctttatcttattttgagatttgaataacatgctccaaggagaactcatatgtccgtctgtctcattctcttttgggaatgtatccccaaggtaggtcaatgggctgtgctgcctctgtttgtgtgtatgtttttttgtttttgtttttgtgttttggagtttcgcccttgttgcccaggctggagtgcagtggtgcgatattggctcgctgcaacctctgcctcctgggttcaagcgattctcctgcctcagcctccccgatagctcagattacaggcacttgccaccacacccagctaatgtttgtatttttagtagagacgggatcgccatgttggccaggctggtctcaaactcctgacctcaggtgatctacccgcctcagcctcccaaagtgctgggattacaagtgtgagccactgcaccttgcctgtgtgtatgtttttgttgagggtgatcttgtaggatttaaagaagggagtaggaggaaagtaatgatgcactcaccagccagttttctagcccatttttattacctactgtgtgctcagcactgggatgagaggaacacatgccgggccaccctgtatcctactggtactgtgatttccaacaccatcccctgttctttgactgatgaaatcggcatatgataagggaccatggtcattggaaccatgattggaaaactataaacttgattctattgtctgtatcagaactggccttagaccttaaaccttaaaaccttcagtaaactctgctagaaaatagaaaaatgagttaatgcccaatcacagggcagttgcaatgatgtagggtatctgcttataaatatatgcccaaaatagtcctttttttgtgtcagaaggcaataaaaacaggattatataaaaaaagcacaggtgcttaaaaacaacaacaacaaaaggacaaaacattgttcctgtttgagactaaagtttcaatctcattttggaaccaaaataaacacacatgcagtgacagcaggtaacactacccactatataattaagcccgtaattgcaaggtacaggctgtaaaggccatgggagttcagaggagtgagagctcatgtgggtgggagaatgaggataggcttctgtgagaggctggggctcagtggaggctgcaatgatgggctaagacagggagaatgaagcctagtatgtgtggagcatggtgtgtacccacagaagctaataacagcctagagaagaaagtggccttgctactggggaggatgaggcaggaggac

SEQ ID NO: 576 - DNA, 4049 bp, Homo sapiens
agtcctttttcctcctattctattaaccatatcccatgtattatattgaaatggactttgcttagaatttcataacatgttcttttggtaaccagtaaaaagatcctttgaatgggagcatttcgctttttgaaaggagcttaaatgtaattacagtacagacctgtgcaggcaggcgatcctgcccagcacgttggcatattctcactttatgaacgttttcatctgggggcttggcgaaggaaacatctgattctcttttgtgagattcttcagtacagagacccattcctctttcccagaaaaacacagtgattcctcataaaatgaaaggatttctgaagcccaacagaaagtggggatacagagatccattcacagagacagaagagaaaatcctaagaaatcggcttcctggggccatcctaggcctctcacagagatgtttttataatgataggaataacatctctagagaagttcaaagataggacaataaaattaaaagaagggcctgcaggaggaagcaaggagaaagacacttcaccccactgagcaggtaattcatcatatttctttccaaatttatacccaaaaatctagtggatgtcattgatatggtggaaatagctatttattattatttttctttttttgagacagtctcactccgttgcccaggctggagtgcagtggtatgatcttggctcactgcaacctctaccacccgagttcaaaccattctcctgcctcagcctcccgagtagctgggactacaggtgttcaccaccactcccagctaatttttgtattttcagtggaggtggggtttcaccatgttggccaggctggtctcgaactcctgactttaagtgatccacctgcctcggcctcccaaagtgctgggattacaggcttgagccaccatactcagccagctatttattatttctgaaacatgggcaggggaaacctaattttgataaataaatgattttcaatgttaattagaagcaagaaggaaagaaaaaaaaaggaaaagaaatgttccaggagatgagacattactttcatgaagttgtcaagaaggaaatgaaaagtgtgcatacttgaagatatgattgtataatcataggggttaataagtcattgccattttccctattaatgatgacagtttgttttaaaggtaactcatcctgtctgattttccatggtggtgttggtttctactgcccaggtcctttatgacattcctaaggagtgactctagccttgtactcagcagacccatgacttctaatcagcagcatctcagacactccgttttggctgtgaggctgctaggctctcaacaaaactcctaaataggaaaacttacaaaacttccaggccttagctgtcagccaaagacggagctaagacacagctattttatttccttgtgcaataaaggtataattgtcttctatgccagatgtcagaaagacttctaccaggtctttctctgtgtgttcttaaaaaaaatcctcaacaacaacaacaacaataacaacaacaacaacaacaaaacttcaagatgttagaaatagatataagccattataattatccttcagcatcacatataaattcatgtgtaactttaaacaagctggtgtccttgtggtgactatctatgttatgtgacattgttttctgttcgtcaaagtgaagcagcagataaatggaacaactgttttttaaacataattatttttttttccagatgttctcaggcttcctacattcaggatcagcaagtcttcagcattggtactctttgttagtgtagaccttgagtgccctgctgaggggcttgtgtgccattctgcttgagtgcagatgtgccaagaggtacaagagttggaactgtaatagacctcttaggctactggctgaaatactaaggttcagaataagaaagagatacgtctcaggcatctcattatccgcaactgtcagtccggaactcagaacaggctggttctagctgtcgattcaatagttttagcttctgtactccaaatccttacaggtagacccatagcaaggtgccattgccagggtcatgccatccaggtatgacaggactatgtcaaagccaggtaggagggcaagaaaagggagtataaggcataagttaaataggggactggtgagatgaccaggggaggcccaaagagtccaaggcaaacatctggagaaggctcagacagaattttgaagtctgcatctagtaacagcccaaagaagtcccacagtgatttgacagtctgttatgctatgggagtaccagcctacctgcccaaccgtgccctgattggccagcctttggcaaatagagagctcttcttttctcttaggagcctctgccatcccctgtatgaatatgagggcttcttatttgggaagccttgatatgaagtgccttgaaactgtaccctgagctactttctctaggatgccctctctttcagaaatgtgagctccaggctgttgctccccaatggctaggggttgttggctatccctggttatagattattgtttatcagcctcctagcacataggtggcaattttaatatccagaaaaaaaaggcataggaagcagaatgtagtggttacatgaatagtctattcttgtttccctaggactaaattcctgtagatgtgagaggagtatggatccaggggtcagaggttccattccccatgccagcatttgtgtctagattctcagctctccattcagacctgggacttctcttctctttcctttcccccatttctaatcacctcatctaggctgtcctgttttgtgagtggtcccagagtggggttggggttggatggagagcatatatttgtgctgggaggctggggatgtttgtgtgtacacgttgtgtgggtgcccacccacatgaaccactccatacctatacatggctcattgaccctgccctcgaagaactttcactctgtcttctggtatatgtgcataagtgcatatgcatttagtgctatttgaatcacctactccatcccattccttttctagataaataagggttccctaaaaaaaagggatggctagaatcagtggagggagtggaacgagtgagtagaattggtcagtcatgattcctaagacagtttagtgaaaactaaaatcaagcaatacttgtttggaaagactctgttttatgtagtagcttagctctgatttattacatagaagttgctggcaaatatgaacactaattctactctggtaacaactgtgattgaaataattgtagtctgcagataagctggagaaaacaagcattagtgggtaggttgtcttggacatcattccaaaagtgtaacagtgaaaaagtacgtgctcttagagaagaaaacttacaagagatatttacaagacatatgactggttcagatctctgcctcttatgtagatccgtgctaagccaaccaggcaaggaaagctctcatctctaaaaaaaaaaactaggaaaaaaggagaataacaaactcctgtggccactcattaaagtgacttatggctttctctgtcaagaaatcttggctaattatttagcatttatgagactgtgtggctgccttcatggaaatataattttcactttttcttctttaatactctatagaattatactaggcatttgtgaaatcttacagtagcccaatgcacagcctgttgggcatttggattacagtgcaacaccagataaagaggcagtaaagcagatacaaatgaaaaaaatagaaacaattgatcctatcagtttttgttcagttgaatgattgccttttgggggcattttctacaaacagttactattatcactattattattaccttagttttggaaattactatcacttttgagtgctgagtcatctgattcagtcttagaacaacgttgggaattcgtaaccttatccccagtttacagaagagaaaacaaagacttgaagaggt

SEQ ID NO: 577 - DNA, 4041 bp, Homo sapiens
tgggttaaaatcctcacccacactcctcttcatctatgtattcttatgtggagattttaattcatctttttccattgttgcttgaacacctgattccttgggttggcttcctggagaaatgaatcagcaagagaaacatgagctgacttcctcctatttgatatgcacacatctctagatttttagctttgctcctagtatgcttcgtgtcaagtttaggtccagcttcctgagctagagcacaaaaaaatatatcatttgaagcaaagagagaagaacgaactggggcttcaatcacctctgtgtattatttctgatatagaaccaataagtttgtgtgcccactgcatagtaacagacccattaccctgagacagcaggtttgcagcagagaagggtttaactatctcagggcaccaagggaggagatgggaggagagcctcaaattcatctttctgaggagctctgggctgtggtttttaagaacatcatggagcgtgatgggctggaaaattggggttgttgactgatcaggggaagggggattaaatcatcagaatgtggaaattgtgttctttggtgagtcagcttcttgtggtgttcctcagaccttcctggggtcacccgtggggtctttcattcagatcagctgatgtagtagtttcactcgtatgcaggacctgaaagactacctcacggggaaagcttaacatttcttaatgttcaagttgttatctatagagcacttaaggggaactatcatcttatcacagagtctacatgattctaggacaataggcaccaaaccatgtcgaggaagcaggtcagagaatgagttgacctcatgcttaatgctgaatgtgcttcaagcttggtttattaatttattttttcccctttcttcttccctgattaattttataatgtttacaggggcaacttcatttcaatcttggtttcccagttatagaagataaccctcatagaaggagaaaagtgcatactcattagtttcagaggaatgacttttttttagttttaggcatttagattttgtgatgcctaatgacacagaaattgaatgccctcggggagactctcctgtggaattttaactatcccatagccttctcaggtcttggacctctcatggctagtgaggtcaaatggctttgctgagtggtgaatcttgttacctccaaggtcattcccattcttcttcttgcacacatgaggtgagataacctgaaactcccctgaaacacgggaagagcacacaaatcagtcctttgaatgcacctcatcctctagggattgtagtaatattgtaactgatgtaattgtcatataatttaagttcttttttctttctttcttttttttttttttcctgagagggagtctcactgtgtcccccaggctggaatgcagtgatgtgatcttggcttgctgcaacttccacctcatggattcaagtgattctcctgactcagtctcccaagtagctgggattataggaacccgccaccatgcccagctaatttttgtattctattagagatgaggtttcactatgttggccagactggtctcggattcctgacttcaagtgatctgcccgcctcagcctcccaaagtgctgggattacaggtgtgagccatcacgcctagcctaatttaagttctgaattggtatgggactatggggccatttgaaaccatgttgggagatgggacttccctagtatcttggtactgttgaattataatcagtttcctccaggtttgtctattttctccctcaattcatttatttttctcctcctccttaaacatgtattgagggcctattttgcgggtaccatgatgatgggaacccagacacaaaacaccaaggctctcccctcaggagctcacagtctagcagggaagggagacagatacacaaacaaataaattaccacttcatgagtgatgagcgccacaacagaagcacccaggaagaaaagcctagaaaaaggttcagttacctctgggtgggaggaggatcaggggaggctttctggaggaggcagccactgagttgagtgttcaaaggtggatgagtaagagcttgcaagggaatagcatgggtgtgaaacagaggagtgaatgcagcagcccgtccattcttagctgctgttcattcttacagatgtcaaatatttctgggagtcttctgtcttccactgttacaaaacttctttaaaaattgttgtgattaggataggacccttcttcatagcaggagtttcccagttctttggggaatgctttgaaaaattcatttgttcccggattgagctgttctagttgtttatcctttaaacagcaagaaaaagatggtacttccagacttcttaaaagcccaagccacttgcaggtaataacggtgtcaggttaacagcagtgacacatcttctatttcaggaaggattgaattggctcttcctggatattcatttgctgaggcttcaattccaggagattttattctttgcacatttctctgttttctttttgttcctgttagaggcagcttctcagaatgataaaaactgttgacatgttccttgcaaagtctttggcattctaaggatccatccttattgcctcatttggccttgactttacttccaatataattgcccatgacaacttattttagtagagagtgtggtagatggccatccttgggtgagtttgagggtgctgtaaatactcctatactccaaaacatctcttctaacttgcaaagtacctgaaattccaccaattagacattcattcttgaagccttttcagttgtttcttaaaatctaagtagctcttagtgtcaccctgcaccttcattaagcaggtatcacttgttggctcctcagtgtggtgagcactgagttctgggaaggacaaaacagggactgaaaaactaaggaaaaggatggcttagcctgcaccaactgtacgtgaaggaagagagtcattatcacatcagttgcattattcagcacagcttgttacctgatatctgcttacctgaagagattactgtgggttaattctagaagcttgcttattacattaacgacctacatttattgacagctgattatcttgggggattgtctctgagaatttgtgcagtaggtaaatgatgtctttgcctcaattagcactcctttgagaaaggaactaagatagttaatgttgatttgtatcactgtggtttcttatccctcttttatatcttttggaattgaacacagtattatacctataacaggtgctgagtaaatgtttgttaaagaaatcagtctgtagacatttagaggcacatatcaccagaaatagaccactagcctgatgtctggctacagtaaaaccaaacaggagaataactgttttttaaaattagaacttcattttgaaatagtttaagattcacaagaagttgcaaaaacaggacagagtttctgtatcctttccaagctttccccatgatagtgctatatgctacataggcatgcatggtatgttatcaaaaccaggaaattgatattggcgtactgctgtaaactcaagtacagatgttttgccagtttttacaagcacttttttttttttgctgtgtagatccaagacattttatcccacataaatttgttttattacctctccagtcagtatacagaactcttccatcagcacaatgaaattctcttgtgagaaaccaaattttaaaaagaaaaagaaataacttaaaaataagcaccaacatttttataaggtcacatgcgtgaactttaaaataatactaatttcaggctgggtgcggtgcctcacgcctgtaatcccagcacttaggcctgttctactctcctttgaaatgaggtccttccccagcatgccttcctgctgagcaattgctgcctggagcatctccctgagtgtctgctgtgcagcaaggtggctgccactttagggaatctcagcctgtgctc

SEQ ID NO: 578 - DNA, 4036 bp, Homo sapiens
tttttttttttttctgagatggaaacttgctctgtcacccagagctggagtgcaatggcatgatctcagcgcactgcaacccctgcctcccgggttcaagcaattctcctgcctcagcctcccgagtagctgggactacaggtgcctgccaccatgcccggttaagtttttgtatttttagtagagacggggtttcaccatgttggccaggctggtctcgaactcctgaccttgtgatctgcctgcctcagcctcccaaagtgctgagattacatgtgtgagctaccacgcccagccccaaattaaaattctttatagccaaagagaaatgatataatgatttcaatgcagttaaactctgcagtagcatgccccacaatacaatcataatataaaatcagatatgtagagaatggcaatcagcttcaatcctctgcctgtctcagataataaagctaaagttcttttttctgggagtgaggcaaccttgccatgagaaatagaaatgcaaaggtggggtcctcttggcctgcgttctgttggcctgttctctggaatcaggaatctagcccatacaacaggagcagattaatcgacttcaggatgtttttgaagtcattgatgctgttctggaagtcccaacagccaaaggatctagaagcctctaattgatatttaccccagagcagcgaactgacccaggtagaacctgaaaatattgggatcttgcagaaggactgcagacatctggctatgcgggcttcctgaggtcatttcagtgcccttactgtggtgcaacttcacattgtacatgattgaaatgtttaggctttgcttatcacattatgttgggagtagtaggtagagacagtaggagaatagagggttagaggcttattttaaatcagattgggcatgtcactataagatctataaaaaggtttataatctaatatgatgctcataaagagtgctcttccaatctgattcttatggatttcccaggggtgatcccaatctgattgtctttgtagtacagtgaccttcatctttagcaaagccagaaatgcagttcccaaagatgggagagcagcgtctctactcctgagcctagatctgcctttttttctctctcttgtagggaggattttcattttgccctttctatgtacaaatgctttgtgctttctcgtattattttgtatagtcacccaataatcctgtactgaaggagttatgatcaccattttacagatgatgaaataggctcagagaatttgacatttgtctaaattcatgcagctcgtaagtgacagagctgggatttgaacctgcatctgtctggctcctaagcctgggctgtctcactctgcatcataaatattccttgtgatgcagtgtttaggtgggtacagtctagtcctttaatgcttaatgctgttttagggggttggggagaacatagactttcttgagaatttgatgaaaattggacctcttgggtgggcagggagccaggaagtaccctaccctcacaattttttgtttgtttttaatttttaatttttgcgggtatatagcaagtgtatatatctgtggcatacatgacctgttttgatacaggcacttattatgtaataatcacatcatggagaatggggtatccatcccctagagcacttatcgtttgtgttgcaaacaatccaattacactcttgcagttaattttaaaaggtacaattaagttactattgactatagtcaccctcttgtgctatcaaatagtaggtcttattcattctttctgattttttttgcacccacccccacaattttgcatataatttcagctagctcatggggtccctgaagcgcatctatggattatttaggcctagggcagtccttggatcccaggttaagctaattagggtcttgggaagattcgttaaatttttttagagaaaaagcttgagtgattagaaggtcatttccagaaatttccttttggctcttcaggaataaagagactgggtgaggagagaggaggatggtgaggggaagaggaactggatggaagacatgaagaaattagcaagcagtaaaagcaatttgcatttgtgaataattaaggttgttaagaccctacggacttggctaacgcaccattcactagcagtttcttttcaggttaaaattaattggagtgttggtttatttatcttttcccttggtgaatcaaatgactcatcctgatttataaaccttccacctatccactctctattaagacctgtgggggctagcgattgataattttattgagttccccagggacattatttgtagaacccagttgctaatggttaggtcagtgaccgctagagacatctcagaaccccagaagctctggtttctatgaaaagagaaaacagccccaacagttggatgtcacttatatcttgaggcagactttttttagcagaaactggaatatatggctaagggggtaaaaaggaccagatccaagagcttggggatttttagatttcaaaactagatagtttcaaactccccaggaaaggaagagagggctactaaaacaatctcctccccttttgtctagaaaagaccccttgaaaccactattagaatggcccctttgtatgcacaaaaacgacccagattttcttcttatcacttatctgctctcctagaagttttaaaatctcctgacatttaaaaaataaatgacaaggaaatgtttttcccagcctagctctgagaaaggcagtacatccatcccagaccctgctgccagccgttggagccactgcagaggaaatctgaccccatgaacatctaagcaggccgcagagcacatggctgcccctgtggctctagattctgaccacatggagtagactcaaactccagccttaaccagtggtgtgactttgagcaaatcagcctagcagtaaaagcacagctttggtgtcaagctgcccaagttcaagttctgcctaattactcaccagctaagtgatcttatttcacctcttccctgtgcctcagtttcttcatttgtaatatgaagacaacataaatagtaacacaaaaagggtgttatgaggattaattgagtcaacagataaaaacactcagaacagtgcctggtatgtgtagtgggctagaagggcacccttcatgaattttagttattattattatttaagctctctaagtttcaaggtctccacttgtggaatggagctgataatggggattttatgaggataatgagaagatacacttaagttcttagaaaacaatgccactgggcagagcatgactgctcagccagtgttcggcaatcatgagttaccatgttagtgatgagaaacaaaccagtagtcttcttacagttcctatatggattaagacttgaggttgctaaattagccaggtgtggtggtgggtgcctgtagtcccagctacttgggaggctgaggcaagagaattgcttgaacccgggaggcagagcttgcagtgagccaagatcgcgccactgcactccagcctgggcgacagagcaaaactccatctcaaaaacaaaacaaaacaaaacgaacaacaacaacaaaggacatttgaggtttctgagaaatcatatggtgggtggagactttaaaacactgatctttctttactttctgtaccctcataatctttggcactaactgcagctgctgggtttagggctcagggaaaagccaccacccctcttagaacccaagaccccaggctggtatggatatggaatgtacacgtctctcttcttccccactccgctagtttaagcagagtgagcctgagtgcctgagtcctatgtctattaactttttgttgtcagctccactggtaatagtgcttcaaagaaatgaacgtcttaggatccttcttagaagcatgtcgtcacgattgtattaagctgatggaaagcagaacaataacaacaacaacaaaaacaacattc

SEQ ID NO: 579 - DNA, 4026 bp, Homo sapiens
tgagaagcagcctggctttcctgagctctgggctgggtctttgggagctgggattgtcctgcagcccctttcttgtagtgtaaagactgtcatagaaaaggcaagttcatcagggtcctgcctttgcatccagggggcttgagagctatactgaaaagaggagaagatgtgaaatccacgtgctcagctccatcctcaaaactccacttctaaagtcactcatttgggactgaaagttttttagaaactgttcagaaggaatgtggctcctctcccagtctggggctatgggccatgggcctaggtcacaccttgctgatcaggacagaaactggaataaatgactctctattttgggagcagacacatgtaaggctaattaggtctgctgaaccccaggtgtatcagggtctgtggaactgtaccatcccagatagggagcaaatatggcaaagtgagaaggcagaagcagcagttgagaatggctgactcatgggcagcacctcttccctggcctgacttcagcagggggcagatggcagaggcgtggcagagcaagcaatctgagccctcctgtagctgctgggtccatgctggaagaggctcctctgttctggaacttctctcgtggcagttggatattttaagtcatgaaggcttccatatacttagcagatctctgactcattgggctgtttgattccttgcgtgaaccagtaccaccaagacttcacttttgtcttcacttcgtccatgacctctaccagatccaagcacaccctccttgaaactgtgctatctgcaaccgtgcggtgtaaagaagtcatctgtggttagaggacagtgccccacaattgaggaaggaaaaaaggcatgccaatcagagagggcaaaacactcacatttgagaaaatgaacttgtgttctagtaagctccatcgctctgaccctcccggcttctgagttttctgtcaccatgtctgtctgtatgtccaatcaagactgtatcccatcttggatgtcatgggattctcattttttattcattctagatacactctgattattctgcactttcttttcaacttgtttgggggacaaacagcttttatagctggggagtgaggttgataataaagactttaaagacaaaaatacagatgtgcaggttaactgagcaggaccaagatgagcaggtggctgggttaatgtcatctgaaaagccaatacactgtgtgtcacaacatggtctgagcaaaaactacaaccactatgaatggcttccaaattaaaattctttttttttttttctgagatggaaacttgctctgtcacccagagctggagtgcaatggcatgatctcagcgcactgcaacccctgcctcccgggttcaagcaattctcctgcctcagcctcccgagtagctgggactacaggtgcctgccaccatgcccggttaagtttttgtatttttagtagagacggggtttcaccatgttggccaggctggtctcgaactcctgaccttgtgatctgcctgcctcagcctcccaaagtgctgagattacatgtgtgagctaccacgcccagccccaaattaaaattctttatagccaaagagaaatgatataatgatttcaatgcagttaaactctgcagtagcatgccccacaatacaatcataatataaaatcagatatgtagagaatggcaatcagcttcaatcctctgcctgtctcagataataaagctaaagttcttttttctgggagtgaggcaaccttgccatgagaaatagaaatgcaaaggtggggtcctcttggcctgcgttctgttggcctgttctctggaatcaggaatctagcccatacaacaggagcagattaatcgacttcaggatgtttttgaagtcattgatgctgttctggaagtcccaacagccaaaggatctagaagcctctaattgatatttaccccagagcagcgaactgacccaggtagaacctgaaaatattgggatcttgcagaaggactgcagacatctggctatgcgggcttcctgaggtcatttcagtgcccttactgtggtgcaacttcacattgtacatgattgaaatgtttaggctttgcttatcacattatgttgggagtagtaggtagagacagtaggagaatagagggttagaggcttattttaaatcagattgggcatgtcactataagatctataaaaaggtttataatctaatatgatgctcataaagagtgctcttccaatctgattcttatggatttcccaggggtgatcccaatctgattgtctttgtagtacagtgaccttcatctttagcaaagccagaaatgcagttcccaaagatgggagagcagcgtctctactcctgagcctagatctgcctttttttctctctcttgtagggaggattttcattttgccctttctatgtacaaatgctttgtgctttctcgtattattttgtatagtcacccaataatcctgtactgaaggagttatgatcaccattttacagatgatgaaataggctcagagaatttgacatttgtctaaattcatgcagctcgtaagtgacagagctgggatttgaacctgcatctgtctggctcctaagcctgggctgtctcactctgcatcataaatattccttgtgatgcagtgtttaggtgggtacagtctagtcctttaatgcttaatgctgttttagggggttggggagaacatagactttcttgagaatttgatgaaaattggacctcttgggtgggcagggagccaggaagtaccctaccctcacaattttttgtttgtttttaatttttaatttttgcgggtatatagcaagtgtatatatctgtggcatacatgacctgttttgatacaggcacttattatgtaataatcacatcatggagaatggggtatccatcccctagagcacttatcgtttgtgttgcaaacaatccaattacactcttgcagttaattttaaaaggtacaattaagttactattgactatagtcaccctcttgtgctatcaaatagtaggtcttattcattctttctgattttttttgcacccacccccacaattttgcatataatttcagctagctcatggggtccctgaagcgcatctatggattatttaggcctagggcagtccttggatcccaggttaagctaattagggtcttgggaagattcgttaaatttttttagagaaaaagcttgagtgattagaaggtcatttccagaaatttccttttggctcttcaggaataaagagactgggtgaggagagaggaggatggtgaggggaagaggaactggatggaagacatgaagaaattagcaagcagtaaaagcaatttgcatttgtgaataattaaggttgttaagaccctacggacttggctaacgcaccattcactagcagtttcttttcaggttaaaattaattggagtgttggtttatttatcttttcccttggtgaatcaaatgactcatcctgatttataaaccttccacctatccactctctattaagacctgtgggggctagcgattgataattttattgagttccccagggacattatttgtagaacccagttgctaatggttaggtcagtgaccgctagagacatctcagaaccccagaagctctggtttctatgaaaagagaaaacagccccaacagttggatgtcacttatatcttgaggcagactttttttagcagaaactggaatatatggctaagggggtaaaaaggaccagatccaagagcttggggatttttagatttcaaaactagatagtttcaaactccccaggaaaggaagagagggctactaaaacaatctcctccccttttgtctagaaaagaccccttgaaaccactattagaatggcccctttgtatgcacaaaaacgacccagattttcttcttatcacttatctgctctcctagaagttttaaaat

SEQ ID NO: 580 - DNA, 4031 bp, Homo sapiens
atgttaaaatcagttatcagattataaaaaacaaattatgataaagtctgcttgcttcttgattagggcatttttatgaagatccagcaataattctaatataccaccatcattttaaagtaggattaatataagtaatactttgagatacctgtaacaattgtaatcttatatgtaaatatctgagatttctgttgctaaaaaaagttacaagtgtcattaatactgttctaatttattgtagaacacctgattctgtcactgttcggggtgccacttgtaacctgccatgatccctggtggactgaacaaagtggggctaactggggaataaaagtcaaagacaagagagtatatttggaagaaggggttgggggcacctcgcctctagtggacaagggccctgagctgtttcggtcctccgaatttattaggtaaaagagataacgagaaaggggcaggtggttgtcggccagcagtttgaatcacagcaggcttgcaagactgcattcttcaaacaataggcactagatttcccagtagataactttaaggagcccagcaaacctcctggcccttagcaaacctcctggaggcatgcgcagtcctgagtttgctcacattctgcattcacgataaacagtttgctgtttgatcatatagcctccagtggaatgctgagttggtcatgtcccatgggcctttggctccctacagtttattgctatattcataattaaaggaaatgccaaatttgaattagaggttaataaaaataaagatgtaatttttttggtccaaatcatggactccctgagtactgcacaaggacctcttggaagtatatggccccaagtgaagaatccttgggatagagaatgacttgtattgggcattaggctattactttagaaagagtaataatgcaatttccacttttaaacagtcattctggacatatagatcagtggaatagaattgagagtccagaaatacatccagtttttatagtcaactaatttttgagaataataccaagaccatttaatgaggaaagaatagtttttccaattaatgatgctgtccagtgtgggcaacatagtgagactctgtctctacaaatttcttttttaaacattagccaggtatggtggcacacgcttgtgaacccagctacttgagaggctgagatgagaggatcacttgagcctgagaggtggaggctgcagtgagttgtgattgtgccactgcactccagtctgggtgacagagtgagaccctgtctcaaaaaaaaaaaaaaaaaatggtgctgggataactagataggcacatgcaaaataataaaattggactcttcacatcaattaactcaaaatagatcaaagatctacatgtgagagcaaaaacatttaaacttttaggagagaagacggggtagacctttgtgacattggatttagccatgaattcttaaatatgataccaaacacaaaagcaacaaaagaaaaagtagataaattggacctcatcaaaattaaaaacatttgtgtttcaatggaaggacattacaaagaaagtgaaatgacagcccagtttaaaaatggtcagtttatgaatacatctctctctaaagaagatatacaaatagtcaagaagcacatgaaaagatgttcaacaccttagtcatcagagaaatgcaaatcaaaaccatggtgagataccactttacacccatttggatggctatacttgaaaagacagatcataacaagtgttgacaaggatatggataaattgcaacccttgtggctgctcgtggggatgatgtagaatggtgctgtagctttggaaaacagcctggcaattcctgaaaaactgaaagacagagctaccatgacatgtacattccactcctaggtatttacccaacagaaatgaaaatacatgtccacacaaaacttgcgcttgaacattcataacagcgaaacaatctaaatgcccatcaacagatgactggattaacaaaatgtgatgtgcttatgcagtggaataccatttggctataaaaaggaatggagaactgaaacatgccacaacatatgtgtaccttgaaagcattatgctaagtggaagaaactagtcacaaaagatcacacagtatatgacttcacttgtgtaaaatgtcaagaataggcaaatatatagagtcagagaatagattactgactccttgcttgtggggagattgggggttgatagctgaaggctacagggcttctttttgaggtgatgaaagtgttttaaaattgattgtcccattgaattttaaacctcaaatgggtgaattgtatggtgtagaaactagaactcaataaagccattagcaaataatgactgtgatgtggagaatagagttcagggaaagacaaaagcaaggaaaatatttgggaggcagttttcttaggtctcaactgagaggatgctgccttgggagaggtccgaggccattggggtgtgagcacatgctggaggcgtcacagacagagcagctgtttagttgaaaatggagaggaatcaagagtgactcttaggttgttgaccataacaggtattttcctcctagaaaagctgagcttcagttacaatctgcagaaatgctgggaggattagtggcaaacctaaaaaaaagaaaaacactagaagcttatcggagagttggtttgcaaagtttcactatcaatttcattgtaccttttagcagggaaaaatattcatcatacatgcacacaaatttacacacaacttcacatcttgaaaagcaacaatataaaactcacacgctttagaaagccaagccagggaagaaagaatgaaccccctgccttgtgacttctcatgctgatactcaatttgttcagtggaaacggatcagtgagtagagcaagtaggaaagaatctcttcaagaacttatgtatcttcgacatgtccatcacacataattttctcctagtcacatgtacaaatgataaaggagaggaaaatgtcatttcagggccttgagtatcacaggattttgataatgttagcaaaataatgggtaaaataactgatttctcaattaaagcccaagctaagtaacttgtcagcccaggtgtgttaaaatctgagttactctaggtccttctctagagacagtgtggcttcggtaatgagcaagctctggaaattaaagaagtaatcagatgttgattgaggttatctgcttcacttcaagcagaagcaaatcaagtggacttcccttgaagacagaaatttctctattgatagagctaagggtgtttcatgatgctgaattctttgtggctccttttcacataaaagtaggaagccattttccctggagtggaagggaggatgacttcccaggaatatgagctttgagccaaagaggcaggaactgggaggctctcagttacacttgagaaagaattatttctctcaatattgttcttcttttcctccagagccccagtgtgagcctgggtgcaagctctgataaattaattgacagagggttgacttctaaccccaacttcaccggcaaactttagctatgtaattccgcactggacagactgacagctcattttcctcatccacaaagaatgcagtgcaatagagaacttgtgaaatatcttctaactttaccactcttttgttttcttaatcctggcaaaattcacagagcataaaagtaactattagccattttaatgtgtacgatacagtggtgattcgtaccttcacaatgttatgcaaccatcacttctatttagtcaagacatttctgtaaacccaaaaggaaaccccatactcatcagagtcactccccattcctctgtcctcctaggccctgacaaccactgatctgctttctgtctctatggatttacctcttctagatgtttcatctaaatggaatcatatatttgcgacctttgtgtctggcttccttcattgacataatgct

SEQ ID NO: 581 - DNA, 4023 bp, Homo sapiens
cctgagatgagtgaggggaaccgcaacagacaggcctgagagcgctgccttcgggtagaaggtcacagagctttgcttgaaaagaatgctggctgaagaggaaacattgccaactccctcctctttgagcccactgggccagaattgtatattcatatttgtcatctgtgccctttccactctggggcaaaaaggtctgctgggcagctctggcggggaatgaaaatgggtgggaatgtagctgggcagggtggctcacatgaggtaagaggatcacttgagcccaggagttcaagaccagcctgggcaatgtagtgaggccctggaaaatgttttaaagattagctggtcatggtggtatgtgcctatagtctcagctactcaagagcctgaggtgggagcatggcttcagcacaggagtttgaggcagaagtgagccctggttgcaccactgtgttccagcctgagggacagagtgagaccctgtctttaaaaaaacaattttgcaaaaagaaagtggggaggaaggagcctagtggtgaacaccagggtttggaatcagaccagaccttcttggcttacttggctctactactttgtagctgtcctgggcaagccagttaacctttccaagctatgaagtctttcctttgtcacatggggtgaaagtggtgatgagagatgtcatagtggataatacctacctgatagtagtgtgtggaaacaattagacactgcatggaaaggctcttagtacagtgcccagcttgaacatgaccaaaaaaagtattagatattattggtattgttctttttgaggtctgttttgaaacttttaatcaggtcttgagagagatgagatataaacacagtgaagttaagaaacaaaataagatgtattgtaaggcagtaaagagatcggttatcagaataatggacgagacctgtgcttctgaaaactgcaatctcaactcattcatggtttgtgaaaggaaaaacaagcatttaaaaaagatgacacagctgggcatggtggcttttacctataatcccagctactcaggaggctgagtcaagagtatggcttgaggccaagagtttgagatcagcctgggaaacagagtgggaccttgtctctaaaagtacatacataaataaataaaacatgagattgatcagcccaagatggaaatatagctagagaagttcaatttgattttatgaaacttttgtttccattacatatatagatctatgtactgtataaatgtatatatactgtataaacgtatgtatactgtataaatgtactgatttgtgacgtaaactctgtttcttactgtggaatttgctaaaaagcgtttaagaaacactagcttttagtgtagaagccagcatacttgctggttgcagtaatccagggaactttaaggaaggatggcaggctagagttgggtcccaaggcatgggtagaatttggatgctgcagaagaggggcatggggtgagcagtccccaagaccatcctccctctgacatcaactgcaggtttggcacgttccccaagtcaccttcaggttcgataatgcataggactgcagagctcactgaaggctattatactcacggttacaatttattacagggaaaagatacagattaaaatcaaccaaaggacaaagtacataggccagagtctgggaaagatccaaatatggtgctttcattatctcctccatgtggagtcatggatcgtgttacctcccagcatcaatgtgtgactacacgcaaggagtactgtcaatcgagaaagttcgcccgggcctcggagttcaaagtttttactgggactggatcatgtaaacttgaatgactgccctcatggccagcctcagtcccctgctcccctggaggtggatggataccatgtaacccaaagcctccatcataaatgacattgttagactttctggcatggtcagcccctacccaaaataacactgttactatctggccagcccaagacccctggaaaagacacttttatcaggcatgacactccaagggcttagacattgcctcccagaagctcaggacaaggccaggcctctctttgggcaaagttaatgtctttacaaaaatagtcagtgaagggactttgttggctggaggagaggcctctcttgaggaaggctggaagtgggtcctttgatcacttgcatgaatagcagaggagaggaaaatgctactccatgaagtggatgcttccagattctactaatgtcaacaaaatccctgttgaaaacgaagcgatttattccttcccttggctcctctgcatacccgggctgaataacctgttagccagtaaggggaaaatgaggcacaggaaagaggaaaggggtcagcctggatgtatgcttgccatgtgggtgagtgaccttgggcataatggacctttggttagatctcatttgctgccacctccgggtgaccaggacttttcctgtgccttgtttctttgcagacctgatgaatggtcctctgtgtgcccgtgacaactttagtaaggagaatatctgtctccctgctccaatttaacttcctttctgtaaaacttgatgaggtcaaagccagaaagcactgaaacttcaagctggggatcaaaagcatgtcatccagccatgctgcccccttgcaacctggcaaatgagacaacctccagccagggacagtttataattgtgcaatcaaattaacttggatttcagcctaatgaagtccttaatgccctgaatgaggccaagccctaatatttagagaagcagactggaccccaggaaagaaaagaacaggcttcagttaatgcctgctagtattaattatgcttcttccaaaattcatcttctcgtaggaggcaacctgatagcacccagttctgctaaggggttttcctgctgtggctcataaggagaacagtggaaagaacattttattggaaatctctgctgaactctgcgttctgggccacatttcttaacttcacaggatcttagctttctcagttgaacaggaagaaaattcctcctctcttagaagtgttttattgtagttaaaaatcaatactctgaaggcaggtaggcttggttgcaaatcccaactctgtcatttgttagctatgtgaacttgagtgagaaattaacctctctgaggcttagttcccttaactgtaagtatggttaatgatattcttggttgttagtatggagaatagtgaatgagatactgtgcatcaagcacttaatacagcacataggacatgctggcatttattaaatctaatgatgatgatggcataaatgtaaaataattttcagtatggattacatgtcactaatttggtatcagtagtctttattttcattaagccaatgatttagctcttgtttagaaaattgctgctgattccgtaattaactcaataaatatttattgaatggctattatgtgcctgacactattttaagccctaagcacttacattccagtatcagaaagagacagaccgtaaacaagttgacaagtaaataagataaattcagttgatgccatgtgctgggaagaaaataaaactggtaatggaaaaagcagggtttcttaaatgttttgtgctgaggacttctttggcagtctggtgaagactatgacccctttctcagaaaaatattatttataaaggcataatataaaaacattggattataagaaaatagattatgttaaaatcagttatcagattataaaaaacaaattatgataaagtctgcttgcttcttgattagggcatttttatgaagatccagcaataattctaatataccaccatcattttaaagtaggattaatataagtaatactttgagatacctgtaacaattgtaatcttatatgtaaatatctgagatttctgttgctaaaaaaagttacaagtgtcattaatactgttctaatttattgtagaaca

SEQ ID NO: 582 - DNA, 4046 bp, Homo sapiens
ggtactggggaattttgagtacttatgtataatgctagatcttttccattaagacatttaaattatacatatttttacaaggggcaggaagtccagccatatataaaggaaaaataagataacaaaacaagaacaagtaaggcatcgctaagcaatatatcaatgactaatatgagcattgcacacagtaagtgctgaaggttgaggagttgaaaagatagctggatgctataacatgttttggctgtaggggagattttgagttgaatagacagaaaactcagtctgccctcaactctaggagtccacaagagaagactctcattatggcctgtactcgggctttgtgattttcagtatacgctaaagtcaagcaaaaccttgccttgaaatcagctactgagattagggattgagaatgcttcagggacggcataaaataatcagagaagcggactctatccagtggcagtaatacctgttgtccaatgatagatgattaaaacttttggaaatttttatttggaaatttccagaagcatctgaatggcatccactccatctttttgaaactgaggtcagtgtgcgacgtgctttgcaggggtcttgttacgaacttgccacatacagagcatcacaggggcatgatggggaggagagtctgcagtaaaatgagcttgtgctgctcgcaaacaggccacagtgtgggcatggttgttggcctgaagaccagcatttgcctccagctccgtgctgtgatttccatggactctaggtacgttggctttgttgagccaattcttccataagaatattaaatattatattttgcggctgcattggtataagaatgaatataatccaggctggatttattattgttgttattattactattatttttagagacacggtctcactctgtcacccaggctgaagtgtactgacatgatcatagctcactgtaaccttgacctctttggctcaagtgatccttcagtctcagtctcctgagtagttgggattacaggaatgcaccaccatggctggcaaattttttttttttctttgagacagggtctcactctgtttcccagactggagtgcagtggtgcaatcatggctcacaacaacctctgcctccagggctcaagtaatcttcctgccttagctttccgagtagctgggactacagctgggcaccatcatgcccagctaattaaaaaaaattattgtagagatgggggggtctcactgtgttgcccagactggttttaagctcctgtgctctagcagtcctcccacctcagcttcccaaagtgttggcattgcaggcgtgagccactgtgcccagcctggattcgttgttattattcgtcatttattattatatttattttcttctgattttaaagaagttaaaatttagacttttttgtgtcccataagtacagtggcctcaggcactgtgcctgcactgcctgctggagaaattgactttatttctccctttccaacagccccatccttctggaaattttcacagataagaaaacatgctcagagacagatgccttatactaaaccccttcaatgtggtctaattgtttcaaatgagaaaattaaaataagcattttattttaagccctgtctgataacttggctttgggaaataggaacttcagcaacccagcattcaaaacaatggatacaacaaaaattttaagacaacttaatagtcttgcttttctcccgagttttggaaaaacatgtgccttttccattcttttatctgacaatgagtcttactggtttaagagatctgttcgctgagagtgcaacagtacaaaataacatttttttcatctgatgtttgcaaattcatctggacagggaagggcagacattggaaatgagtgaggcggatctggtgaggactgcaatgagagctgaagcctcacctgaagtggcttcccaggtccagctgattgttcctatgcagaaatgcaggctctagtggccagatcttcctgtgtttcaaagaggagacagaatactgcattttatgttgaatctccaattttaaaatattggcctcaaatccaaaactcttaaagtacttgcaggccaagcaaaacacctctgcaggccagatttgggcctcctgttttcagcctctattctaaactgtctctctttctggtcttgaattggctgtgctccctgagtgccaggaaacgttcttaacccttgctcctccatctgccaaaaaggaccccttctctctctaagatgggaagcctttggtctcagggtgccccgggtcgtttgccatctaacacattttcaaacactgcttaaatttccatttttctcgaggcaaatactgtatgccacaccaataaatcatctacagcttactgtaagccccagagctacatatcactaactctacatcatctctgaaaataacgttgttagaagctcataaacatacactctgtttgtttaagaactgcaagagcttttaaaacatggttgctaagtcacagggcatattttccaggacataaatggaagtgaacatatgccccttaaattgtcagattctttttttataagaagagaggcccaaatctgtctgttctgccaggatattaacttgaccaaagaagagttgattatactaagtgtgtaagtgttagtaattattggaaactatcctctgacttacttagctaaatgggcacattgtatgaaacttgatttagtttctagcatatgtaggtataaggtacaggttgacatggataaatcctggctttagttttcatgaaccctaaagttcacaatttgctgaactttgtatttaatatttactgatgaaattcttacggtgtcgtcccttccaaaacaaaatcggaggcatacttagacttttcccctgagacatggtcccaagtctaggctacaacttcatcactgaccctttttcatggaaatttggcagttagtgataggtagcgtctgagcttatagctcagatattttcaaagtaggaagtagatggccctattaatatcaactgccatttcagtagagctgcctcatcagtctcttttccccgtggaagacactcacaccaccttttacctatcaggacactctcaggaagaaatagtaggtagggctccaggacctctgatggtggaatctactagaatgcagttgtccttaacaaggatacctatctcatgttgctcatcacacccatgcagagacctgccaccttgtaatttgagagctggaatttccatacacccgctaccctcactccatgccagaaaatgcagaaaatgaacccatggcccagtttgagatacaattgatcttgaggccccagagagaactgcagggacagtgtgcagagaaggtgaaaataacgtggatgctattagatgactgtacctagcatgtgcttttcctctagcagtgggaggaagtggcacaggagtgcattaaggagtttgccctcttcataatagcatgagtagaaataataaggcaaggcctttaaagaacagcattaataattgaaaggtgctccaggcagccatgtggtcttccagtgcctttgagtacaatctgttatcaggtacgaggtgaggctgaggagtagacaaggagggtgcatttggcggctgtgtctgtgtgcatgcatgtgcttatgcttggaggaagtatgaataagatttggcagctacagcaagtaaaattatagaaggcaatgtatgtatattaccatgtagactggtggtggttcttttgtgggtcaaacacccatttgggaattggatgaaagctgcaaaaattttgcctgccaggtaccctatagttggtcaatgaaacccaaactaaggatttctattctcttaagatggattcatctgctcattcactcctgtttcttctgccatgaagatcaggtgactgccagagggccatcttcaaacccgaaggttaagcagaggttgactgggaactt

SEQ ID NO: 583 - DNA, 4060 bp, Homo sapiens
ggagcgaaatgttatagctcagaacagtttaatccaaacacaagggcagtgcttgtgcctaacacaactgtggtaggggtgtggtgtggtgtgtggagtggtggcagcttttacagctttatcatggggttcatgggctggaggagatgtgaactcttccttgtcttttaccccttgtcttttgacctgacagcctgacacatgtagctttggggagaccctggttggtgatgagtcatttgtggcttaaaaatagaactctcaaagcaacaatgcccttgggactttttgatgcatatgtctttgttcatagaatttgggagaaaagagagagagggagagaaagactctgtgtgtgtgtgtgtgtgtgtgtgtgtgtgtgtgtgtgtgtaggaaacaattatgtcctgcctaaaaattaagtggagaagaagagcatgggggaattggccaccaggctcatcacagtagcagagatgaggctgagagctgtctgtgtacctgtggccttaaaggtaccaatcagataatagctctccactgagtacaaactgtgtataaggcattttgctaggtactggggaattttgagtacttatgtataatgctagatcttttccattaagacatttaaattatacatatttttacaaggggcaggaagtccagccatatataaaggaaaaataagataacaaaacaagaacaagtaaggcatcgctaagcaatatatcaatgactaatatgagcattgcacacagtaagtgctgaaggttgaggagttgaaaagatagctggatgctataacatgttttggctgtaggggagattttgagttgaatagacagaaaactcagtctgccctcaactctaggagtccacaagagaagactctcattatggcctgtactcgggctttgtgattttcagtatacgctaaagtcaagcaaaaccttgccttgaaatcagctactgagattagggattgagaatgcttcagggacggcataaaataatcagagaagcggactctatccagtggcagtaatacctgttgtccaatgatagatgattaaaacttttggaaatttttatttggaaatttccagaagcatctgaatggcatccactccatctttttgaaactgaggtcagtgtgcgacgtgctttgcaggggtcttgttacgaacttgccacatacagagcatcacaggggcatgatggggaggagagtctgcagtaaaatgagcttgtgctgctcgcaaacaggccacagtgtgggcatggttgttggcctgaagaccagcatttgcctccagctccgtgctgtgatttccatggactctaggtacgttggctttgttgagccaattcttccataagaatattaaatattatattttgcggctgcattggtataagaatgaatataatccaggctggatttattattgttgttattattactattatttttagagacacggtctcactctgtcacccaggctgaagtgtactgacatgatcatagctcactgtaaccttgacctctttggctcaagtgatccttcagtctcagtctcctgagtagttgggattacaggaatgcaccaccatggctggcaaattttttttttttctttgagacagggtctcactctgtttcccagactggagtgcagtggtgcaatcatggctcacaacaacctctgcctccagggctcaagtaatcttcctgccttagctttccgagtagctgggactacagctgggcaccatcatgcccagctaattaaaaaaaattattgtagagatgggggggtctcactgtgttgcccagactggttttaagctcctgtgctctagcagtcctcccacctcagcttcccaaagtgttggcattgcaggcgtgagccactgtgcccagcctggattcgttgttattattcgtcatttattattatatttattttcttctgattttaaagaagttaaaatttagacttttttgtgtcccataagtacagtggcctcaggcactgtgcctgcactgcctgctggagaaattgactttatttctccctttccaacagccccatccttctggaaattttcacagataagaaaacatgctcagagacagatgccttatactaaaccccttcaatgtggtctaattgtttcaaatgagaaaattaaaataagcattttattttaagccctgtctgataacttggctttgggaaataggaacttcagcaacccagcattcaaaacaatggatacaacaaaaattttaagacaacttaatagtcttgcttttctcccgagttttggaaaaacatgtgccttttccattcttttatctgacaatgagtcttactggtttaagagatctgttcgctgagagtgcaacagtacaaaataacatttttttcatctgatgtttgcaaattcatctggacagggaagggcagacattggaaatgagtgaggcggatctggtgaggactgcaatgagagctgaagcctcacctgaagtggcttcccaggtccagctgattgttcctatgcagaaatgcaggctctagtggccagatcttcctgtgtttcaaagaggagacagaatactgcattttatgttgaatctccaattttaaaatattggcctcaaatccaaaactcttaaagtacttgcaggccaagcaaaacacctctgcaggccagatttgggcctcctgttttcagcctctattctaaactgtctctctttctggtcttgaattggctgtgctccctgagtgccaggaaacgttcttaacccttgctcctccatctgccaaaaaggaccccttctctctctaagatgggaagcctttggtctcagggtgccccgggtcgtttgccatctaacacattttcaaacactgcttaaatttccatttttctcgaggcaaatactgtatgccacaccaataaatcatctacagcttactgtaagccccagagctacatatcactaactctacatcatctctgaaaataacgttgttagaagctcataaacatacactctgtttgtttaagaactgcaagagcttttaaaacatggttgctaagtcacagggcatattttccaggacataaatggaagtgaacatatgccccttaaattgtcagattctttttttataagaagagaggcccaaatctgtctgttctgccaggatattaacttgaccaaagaagagttgattatactaagtgtgtaagtgttagtaattattggaaactatcctctgacttacttagctaaatgggcacattgtatgaaacttgatttagtttctagcatatgtaggtataaggtacaggttgacatggataaatcctggctttagttttcatgaaccctaaagttcacaatttgctgaactttgtatttaatatttactgatgaaattcttacggtgtcgtcccttccaaaacaaaatcggaggcatacttagacttttcccctgagacatggtcccaagtctaggctacaacttcatcactgaccctttttcatggaaatttggcagttagtgataggtagcgtctgagcttatagctcagatattttcaaagtaggaagtagatggccctattaatatcaactgccatttcagtagagctgcctcatcagtctcttttccccgtggaagacactcacaccaccttttacctatcaggacactctcaggaagaaatagtaggtagggctccaggacctctgatggtggaatctactagaatgcagttgtccttaacaaggatacctatctcatgttgctcatcacacccatgcagagacctgccaccttgtaatttgagagctggaatttccatacacccgctaccctcactccatgccagaaaatgcagaaaatgaacccatggcccagtttgagatacaattgatcttgaggccccagagagaactgcagggacagtgtgcagagaaggtgaaaataacgtggatgctattagatgactgtacctagcatgtgcttttcct

SEQ ID NO: 584 - DNA, 4037 bp, Homo sapiens
tgattatgtactgtctgtgagctacagagctaggcactttaccaaaaatagcacatgcaacctcattgaattcccctaacaacttcttaggataggtattactattcccacttacagatgaggaggctgaagctgcaggcatagcccaagctatgtagctagtaagcagtagagccaggattagattccagcatggctcattctaaagccatctctcttctaagtgtcaagaagtaaatttccagattgtgtaagtaactgatggggtttaatgagatgttgcaagaatgggaagttgcatcacctcatcctgccaatgcactggtcttgttttctcttttgttctccctttctccatttctcaccctgagaaccaagtgtgcagttgtgggtacgtaggaggctcctatcacaggccttccatgtaagacactgccctgggtcaggtgctgtctgatgtctgtttgggccttgattcagttcttcctaataatggcttgatgagaccagcttctctgttatctcagtggagtggcagcattttgcaatgagataggatcaaatgaacaaaaaacaaggagagctgattgttcctcattagcttccaccacctaggggtgtctttccaagtagaaagactctttggccttcctatccttacctaatctgtccttgtgatttggcatactgaaatagatatgagaaatgctgtttccccatgagatacattcttttatctcttttagagagttacagaattagttgatttgttatagttttgcattatgttatgcaatgtttatatgcccagagagttggtattatcaaactaatggacttcaggaaaatttggccccaaagaatggagccacataggatggaggtctttgaaatgtcataaagtatctggcttccttctccagccttgttcaaactgactaggcacaggtgtagacccactgcctctcctgtgctcagccccaagacaggcacctgggagagctgtgaggacagcacagatcccatcccattcatgacagcgcattttaaactgtaaaggactgtgtataccagctttcactatcccctttagtgtaccccatcctgcagcatgatgagatgggcagcctgtgacatggaaaaggaagctcaccagcctactctgtaaccagttcctttatgaaatacagcctttctaggtagtgttctggaaaattagctccagctgtctgccttcatgcccttttttgagaagtcacggcatgcatttaacctttgttgaagaagtcaacacaaatcactgtgtgcaaagcacctccctgtttttttttttccttttaaaatactccccccagttttctccatccctcactgacatttttattgccaggctttggtttggaaaattatgggtagggaaagttcaagggcaggatgttcagaacggcactgcacatctgtgaagggaacacaacaggagagccagcagctgttgaaagaatggaatgtcagatggtagaggagccgagcccactcagggatggtggaagagaagatgccttcagggcaaagaggctgtaaataactccaatgggaagtcttgtctcccttcagaatgtaccctttaatagcaacacttggtgctctgatatgagagtaactctaactcagccttcctagctcatctgaccttccatattgccatttgttcaggaatcgagtgaaagcctggtagagaagacaggtggagagtatgccaaggaacagagtcaacttctttatatgtccttgtctccatataggtagattttggggacaggatctgttctttggttgtcaaacagattggtttcatttacgtcaaagttcagagcattagcacccttcctccttctcccttccacattggtgaggaaatcttgtcttccttgcttatttgtcattgcacaagtggtacctaggcatcgtaggcaatggcatctagaagcattaagggaactgcttatctttggctttcattggggaaatcagggactatgctaggaaaggacaggaggactgagctgaacctttcaggtctgccacaaaagacaactgtagaatatagtattagagtcaaagaggcattggatcccaactggtgccactgttctctgagcctcagcatcctttcctgaggaatgaggatgagggacctcctcaaggtcatccgaccagccaggggcagagctggagctggaagatagaacttttctctcccagtccttttctacttgatctcctgggttctttctactaaatacagaaatgaacaaagacatgataacctactcattgaatagcaaagtatatattgtctttttatgccaattctggacttctaggcccttatcatgggggaaactttagggccatgggaaagaacaaagataatcccaggtggaaaagatcaaatccagccaggtggctgcgtgggattagtttatttcatcctcactggtgagaggccttgaattccttgattttatgaccctcctactaatctctctctctccctccccactgtctccctctcttttttgtactgtttcagcatggagttggggatgggtaagagttaagagttcagctccactgtggaagggtaacacagggctgaacgcattgaagagctgaacacattgttttggcctgtttggaatttgttatgcataacttttgaggacattttgcccaattgctcacttgtttcccctgtggaaacactatctgataactatgtctatacatccctatctactttgccttccaaaattaggatgaattatttcttcccttctcgccactctccaaaacttaaaaagaatgctttggacaacctggcactctctcagccctctcttattctttttaaaagaataattgtttcagggcaaatgaagaaatgcattccctttcagacccactagcccactagttacttctgtcctctacaacaagcctgagtttataccgcaagagggctgcatctcctccctgtcacatggcactgggcctttccctatagtcacaggctgacatgcattcagagactgctgagagatcaggataggagccagctggagcgaaatgttatagctcagaacagtttaatccaaacacaagggcagtgcttgtgcctaacacaactgtggtaggggtgtggtgtggtgtgtggagtggtggcagcttttacagctttatcatggggttcatgggctggaggagatgtgaactcttccttgtcttttaccccttgtcttttgacctgacagcctgacacatgtagctttggggagaccctggttggtgatgagtcatttgtggcttaaaaatagaactctcaaagcaacaatgcccttgggactttttgatgcatatgtctttgttcatagaatttgggagaaaagagagagagggagagaaagactctgtgtgtgtgtgtgtgtgtgtgtgtgtgtgtgtgtgtgtgtaggaaacaattatgtcctgcctaaaaattaagtggagaagaagagcatgggggaattggccaccaggctcatcacagtagcagagatgaggctgagagctgtctgtgtacctgtggccttaaaggtaccaatcagataatagctctccactgagtacaaactgtgtataaggcattttgctaggtactggggaattttgagtacttatgtataatgctagatcttttccattaagacatttaaattatacatatttttacaaggggcaggaagtccagccatatataaaggaaaaataagataacaaaacaagaacaagtaaggcatcgctaagcaatatatcaatgactaatatgagcattgcacacagtaagtgctgaaggttgaggagttgaaaagatagctggatgctataacatgttttggctgtaggggagattttgagttgaatagacagaaaactcagtctgccctcaactctaggagtccacaagagaagactctcattatggcctgtactcgggc

SEQ ID NO: 585 - DNA, 4046 bp, Homo sapiens
gcttgaacctgggaggcagaggttgcagtgaactgagatcgcgccactgcactccagcctgggcgacagaacgaggatctgtctaaaaaaaaaaaaaaaagagtatatttcatgactccaagtggcctcccatcttctgtttttcttgggccttatgtataggatatgttaaatacttaggtgactatttggggtgctctataataataccattaccatgcagactaaaatgtaatcattttgtgttttcaaacttagagttctcagacaatggggatttgttagagagatagagaaagagagagactaaactgacacttctaaggtggctttgctaggggcctagagaagacaagtctctgatggggattctattttcatggccacatccaaagtattgatgtgttttctgcagcacctggatctgggctgacaatgtgatcaagcctgacacgataaagaggcatttagcaagtttcaagactacgtgcacagttaccttaatactgagaggcagatcatctccccagggagcatttcatcgtacatcatggggcagtttgcctatcctgtatctcattgagaggaggccttccagctgaatacgtggacccaaatgcatgtccattcaacagagtcttcagggccagggagctgtggaggttatttccctcctggatttcttccctctcttaccctatcagagagatgctgatatttgagttttcatcttcagagggtagcaggattcctggcctcctcctgtcactggctgatttgcttaaataaggaatgcattagtccccatcactgactccaagtggaggcagctggagcaaattaggatcagctacattggccatctggatgctgcgaaatcattgccattgcaggggtcttagattttgagttccttacagaatgatgtagatgccatttgcaagggcttctttccagtccttttctgcaacagtggctttgggtggcataggcctatatagccagctctgacagatgctcagcattcacagatacacacacagggagccaaatggacagggattagtcttaaatcagctgtttatgaatggagaagaggcccttctcctgggttctggccacaccccttctctttgcagctttttgagaatgaggtcagggccaggatctaactgcttatgcctcagaaatagcagcacagatcaaaattaatcttaagctttttgttttgctgcctcctttagataatagaggaaaaagcgaaggcctgctcatgtttttgtttgcttgtttttgtgtgtacctttgaaaggaacatatgaatgaatatgtgtgatgggaggggttgaggtgaggcagctaagagggattagtgctgggcgggtgataattactgatagactgcagcattcaattggagcatgttttagttgtttttttttttaaatggcagaatgaaataaacctcagtggtgtattgttttagcacctccctttatatggagattttatcagttgctatgaaactgcatattccttttacagtgtccaattgtttttaatggtcattttctgggctgtgcaagccaccattctgccccaggagctccatgcagttttgcaatgctttaaatgagtatctcatgcagatttcattttctgtcagccactttggcacacataaaaaatacaggagtgtgtgtgtgtgtgggtgggtgtaaaagagagagattctgtctctcatacatacacaggcacacgtgcccgcacacacacacacacacacacacacacacacaaagcttgatcatgcttagtctttacataaattgggattcctctctacccaccagccaaggcctgagagatgtcaatagatggacactgaggagactgacttccaatgcccttcagcctgcagtctcttcagggtattagcatacctggaaaggttgacctagcagccaggcattgtgtgtaatggtggtgcttactttttattctcaggcttaattgttggctgaaagcatcttctttatttctgactatcctttatttgcattaatagtctcctctgtgaaagattaaagaaagtagaatgtgtactgaggacagaagtgtcagtgtcagcctaatctgctacatattcattctatggaccttagcatgacaggtatccactgaaggagatgccaaaactgtcttccatccatggagattaattttgagtgaagagtgtaaagtaggacaaggattgtcacataactggcctaatggattgcctaattgacttcctgaactggaactactttcctaaatatttcagaagtgttctaatcatatagatcatacatgcagtgaatatatctttatgtatgtccacacatacacacacggacatttgtacgagcaaatttgtgatcttcaaattggtatctcttatgtagtgacagaaagtagattagtgtggtctggggcttggaaatgggaaaggggattgatttaacaggcatgagggatcttactgggatgatgaaaatgttctgaaactggattacagtgatgattgcataacttagtagatttactaaagtcattgatgaattgtactttttaaatgggtgaatattgtggtatgtaaattatgcctcaatgaagctgttaaagttgatattcctctattggagttcctgcagatcctagactacatataatattaaaaattgtatcaccctaaattttcacctgcttttttcccactgaagtttatcaactacaattgcagagaagctggacttcgagataacagggtcagataaaaacccagtgccctgagacataaaaggctaccctgacccctattggcaaggagcgaggttgctgcccattgctgtatgaagagccaaacctgaagcagtaatggggggctggggatgagggtgagatttccaagcaggtccccaagggcaatgggcaccgtatttcaaagctgcttcggtatgtgtcaaaaaacccaaacatcctgaggtccaactcttaagtgatggcattctcctcttcttttacaggttgtcttagtctttgctctcagcatcggtgcacttgtaatatacttcatagattcatcaaagtgagtattcaaatatactttcttgccctcgtttcataaacaatcatgagcctttacattgatccatttatttaccttgacaccaacctttgcaagaccttctgagtgcagaagattttggaggaagctagtgctgtactgtactgattttctaaatgggaaagaaagttctcagaaggaaggctattttgagtctgctggcataggagggtgaggtatatgaggtcaagtcttcttgctgggtattacttatttttaaagagctgtttcctaatgatgtatttgcactgaagatgtcaagtagttaagatgacttgatgggaatttgcaacttctgggagggtgacagtttcccacagatgagggtctgagccattcttgctatggttgtaggatccttttctcaattgggtttccaatgctttgatcttactggaggtcagattagaaagcatgatgctatcctttcacctgccaatcgggtattcagctgaagcattgcacgctggtgcttcttgacttgtgaaggtaaggagatggatggaggagttcatcatgacccccagaggtggaggccctggccatttgaggacttctagagtggacactcatgcagactccttgggtgccagccgaatggactggtgctccagagtgagcctgggtgacagatgataaagaccttgcagaaggatgaagagggcacagactagaactgcaatgttgcagccagttctgccctgattcctgcaggtgccaaccctgaggaaataatttgttccaactatactattgcaaatcatgaagttgatggcatctgggaaacaagctggagtctaactcattttctgttgtggcgtgaacttggcaactctggtgacaatggccttgagcttgttgcctttattgtccactg

SEQ ID NO: 586 - DNA, 4084 bp, Homo sapiens
actgtttccaccaggggaatactgatcgctgtcctttacagaggcactgtgctaagtaagtacttttcacacatctcatctaatcatctgaacaacccatgaggtatgcataataacaaacctcttcctttaaagatgaggaagctggaacttagagatagtaactggcttttccaaaaatacatggccagtaaggggcagaggcagcatttgagcacaggcaatttgactccagagcctggcacctcacccctatgccatgtggtaacacccagtaacagccccagagaaatctaatcagagaaaattccagtcatttcagtttactacctggggcaaattgagtttatggtgggggaaaagaaaaacacattttaaagaagggcaaaacaccatcctaaacttaatgagtcccatatgccatccctatgtaacatcttaattttcacctgtttcagtgtctgttctatttctctcataccactgcctgtagaaaatagatgcatgttcttgaaattcctactttttctcattaaaggttagattttattattctttctctcaaagtttggattgccaaagcttttggatttggaatatatttggcttgcatagatgccaatatttatacattgatacgaagattaaaaaaaaaactttagaggagagatccttttacaactagacttgatttagagtctatcagaaattttcttacatatttagcataagtattgtgagataatgtatgctttctaaaaatatacatgatgttctgctcagtcgaatgcatttatttctttctttaaagttttctgggtaaatttcaagagcatcgggatattacttaacttggtagattttattaaacctccaaagaacataattaactcattttacaaactgttaatgcttacagaaattcatgataaatgagatcacttaagactgtttcgggagaacaggaaaagccagtttgttaatgctggtcctcttctctattataatattgtgagaaatgaaggaatgtttatcactagctgttataaccttaatttgagagttctttaaatggcaattacatatatttacagaagaatgacactggcatttagctcaatattttcagcttaacagagtctcgttgggcgcggtggttcacacctgtaatcctagcactttgggaggccaaggtgggaggatcacctgaggtcaggagttcacgaccagcctggccaatgtggtgaaaccccatctctactaaaaatacaaaaattagctgggtgtgatgccatgtgcctgtaatcccggctacttgggaggttgaggcaagagaatcgcttgaacctgggaggtggaggttgcagtgagtcgagatcgtgccactgcactccagcctgggcaacatagagagacaccatcttgagcaataataataataataataacaacaacagagtctcccctgaaagagggattataaaaccagggcaagcctgtcaaagagaaatttgatttggttctgctgttttacattttaatatgcctgtatgatgacctagcccattaaattttttttctttaaattatcaataggctgtctcaacctctgttcaattgaattttactctactctcccagggaacaaaatgacagagcattttgttctaggtaccttagttcttgttgcctattgtggcagctctatttccagtacagagtttcataggaaacctctcttcttctggtcatgcctatcacccagtcacctttcctgaacaattaggaattgactttctcttccccaatgctgcatttcactctcaccctcagtgtccagccctggtcatattgtctttagcccaatttttcaccacgccatagtctttcttgccactgggctttgcatgtgctgttccctctgtttgcacatgctgttctctctttctcctcttcttcccatccctttcccacagcacacgcctttcacccaaatagcacctactcattcttcagatgccagctccagtgcgactttcttgagaaacttcttttcaccttgatcttttgtgagcagctcttctagaattgtgttatgttcttccatgcccttatttcattttgggttcacattcattggggatgattatgaatggatacctgtctcccccattaactgacattgttaagttccctgaaagcagctactatctgttttttgtctcagttctatcccagcacaggatgagcactccattaagtatctgcagtatacataagtggacagaagtgtttgtaaacacccacgttctgccattcttccctcaatgccaaaggatccaactctaccacctcatcaaattcagagacagcttctgattttgagccataggggtgtcaacagcacaagtgcctgaagggcccacagaattcctggcatgtgctgtactttatcaagaatctgacagggaatgcggctgtccctatcaagctgttgtgcctgacaggcaccatcttggttagctgtgggaccactggtgtttctcctgaagctgcaggacagccagctgcaatgggctgactgatcttgaaatgaaaccctgcctccttctccctcctcctcgagccagagtgaggtggttttaacttctatctagacagttctgagattggtagaggagaaaatagaaagttcttacttaaattattggtgcagaaagaagaaggtgtatgtgaagaaagaaaatggacatttactgactattctgcaacacagcctgtgcagtgtgttaggatacacacccaacatctcctttaactcatctgttgccgcagactagtcaatgggagcaccaaaaactaggtaaaggctggtagttgaactaagtctgtttggctccaaagcttatgttggcaccacaacttcttcctaagacgaaggttggccttcactggtctgactcaaaagtagagaacatttactctgccagaggcaggaacatattcagctagcttcaggggtcctggtgctacaatcacttgtgtttctttcttttgtttttttatgtcaaaagtaattagcaaagaaattctgttttgattgtttgttttagagatggggtcttgctatgttgccccggctgaatttgaactcctgggctcaaggggatccttgtgagtagctgggactacagagcacaccacccgcccagccacctgtgtttcttatcagagcttctatctctttgttgttgcagattggagcctgggaggctgggggctggggagatagtcaggacccctagaagggcaggaaggatgcacaattattccacagaagaagcctgcctctgtttcccttgatgtcacctagtcaacaaagtcccacagtttatgagtttaacctacagaaattctaatatacctgccctgcacacattctgctatgagagccaagggattaaagatcaacaaaggcttccgagaagaatgcttggcttgagattaggaggaagaataagagtcatccttcatccatgatgaaagaagactggtgggaggagaatgggagagaatgttgcagataggagaaacagaatttgcaaagtccacgtggtggcacagaggaaggttcacctgagtcatggaggaaagtgcagcctggctggggtgtttagggagaggaagcctgatgccagaggtcaaggccatgacaggtaccaaatctgcccccacacattgttctctttccatcctgttgggtaaaacatacagatgtgagagatgggatctaagggatgggaggaaagtgggaaaaagctggggagaaagactaagtgatagttactaaaaataaaatttgctaagagcatgttttaaggatcgtggcagaaccagtcagtaataagggttgaaaaacaaagcatgaaaatgaggttaacctccctgttaacccaaactgaggtctccctggcttttattatcatggttatcgtaacacccagacacatggattggagtgtctggggaaatcccttcagtccgctccccaaccaccgcagctgtaggaaaccactaatctact

SEQ ID NO: 587 - DNA, 4041 bp, Homo sapiens
actactttgattacacagggaggcagtaaggactggttcctccttcatcttgtaaacatggccactgtttccaccaggggaatactgatcgctgtcctttacagaggcactgtgctaagtaagtacttttcacacatctcatctaatcatctgaacaacccatgaggtatgcataataacaaacctcttcctttaaagatgaggaagctggaacttagagatagtaactggcttttccaaaaatacatggccagtaaggggcagaggcagcatttgagcacaggcaatttgactccagagcctggcacctcacccctatgccatgtggtaacacccagtaacagccccagagaaatctaatcagagaaaattccagtcatttcagtttactacctggggcaaattgagtttatggtgggggaaaagaaaaacacattttaaagaagggcaaaacaccatcctaaacttaatgagtcccatatgccatccctatgtaacatcttaattttcacctgtttcagtgtctgttctatttctctcataccactgcctgtagaaaatagatgcatgttcttgaaattcctactttttctcattaaaggttagattttattattctttctctcaaagtttggattgccaaagcttttggatttggaatatatttggcttgcatagatgccaatatttatacattgatacgaagattaaaaaaaaaactttagaggagagatccttttacaactagacttgatttagagtctatcagaaattttcttacatatttagcataagtattgtgagataatgtatgctttctaaaaatatacatgatgttctgctcagtcgaatgcatttatttctttctttaaagttttctgggtaaatttcaagagcatcgggatattacttaacttggtagattttattaaacctccaaagaacataattaactcattttacaaactgttaatgcttacagaaattcatgataaatgagatcacttaagactgtttcgggagaacaggaaaagccagtttgttaatgctggtcctcttctctattataatattgtgagaaatgaaggaatgtttatcactagctgttataaccttaatttgagagttctttaaatggcaattacatatatttacagaagaatgacactggcatttagctcaatattttcagcttaacagagtctcgttgggcgcggtggttcacacctgtaatcctagcactttgggaggccaaggtgggaggatcacctgaggtcaggagttcacgaccagcctggccaatgtggtgaaaccccatctctactaaaaatacaaaaattagctgggtgtgatgccatgtgcctgtaatcccggctacttgggaggttgaggcaagagaatcgcttgaacctgggaggtggaggttgcagtgagtcgagatcgtgccactgcactccagcctgggcaacatagagagacaccatcttgagcaataataataataataataacaacaacagagtctcccctgaaagagggattataaaaccagggcaagcctgtcaaagagaaatttgatttggttctgctgttttacattttaatatgcctgtatgatgacctagcccattaaattttttttctttaaattatcaataggctgtctcaacctctgttcaattgaattttactctactctcccagggaacaaaatgacagagcattttgttctaggtaccttagttcttgttgcctattgtggcagctctatttccagtacagagtttcataggaaacctctcttcttctggtcatgcctatcacccagtcacctttcctgaacaattaggaattgactttctcttccccaatgctgcatttcactctcaccctcagtgtccagccctggtcatattgtctttagcccaatttttcaccacgccatagtctttcttgccactgggctttgcatgtgctgttccctctgtttgcacatgctgttctctctttctcctcttcttcccatccctttcccacagcacacgcctttcacccaaatagcacctactcattcttcagatgccagctccagtgcgactttcttgagaaacttcttttcaccttgatcttttgtgagcagctcttctagaattgtgttatgttcttccatgcccttatttcattttgggttcacattcattggggatgattatgaatggatacctgtctcccccattaactgacattgttaagttccctgaaagcagctactatctgttttttgtctcagttctatcccagcacaggatgagcactccattaagtatctgcagtatacataagtggacagaagtgtttgtaaacacccacgttctgccattcttccctcaatgccaaaggatccaactctaccacctcatcaaattcagagacagcttctgattttgagccataggggtgtcaacagcacaagtgcctgaagggcccacagaattcctggcatgtgctgtactttatcaagaatctgacagggaatgcggctgtccctatcaagctgttgtgcctgacaggcaccatcttggttagctgtgggaccactggtgtttctcctgaagctgcaggacagccagctgcaatgggctgactgatcttgaaatgaaaccctgcctccttctccctcctcctcgagccagagtgaggtggttttaacttctatctagacagttctgagattggtagaggagaaaatagaaagttcttacttaaattattggtgcagaaagaagaaggtgtatgtgaagaaagaaaatggacatttactgactattctgcaacacagcctgtgcagtgtgttaggatacacacccaacatctcctttaactcatctgttgccgcagactagtcaatgggagcaccaaaaactaggtaaaggctggtagttgaactaagtctgtttggctccaaagcttatgttggcaccacaacttcttcctaagacgaaggttggccttcactggtctgactcaaaagtagagaacatttactctgccagaggcaggaacatattcagctagcttcaggggtcctggtgctacaatcacttgtgtttctttcttttgtttttttatgtcaaaagtaattagcaaagaaattctgttttgattgtttgttttagagatggggtcttgctatgttgccccggctgaatttgaactcctgggctcaaggggatccttgtgagtagctgggactacagagcacaccacccgcccagccacctgtgtttcttatcagagcttctatctctttgttgttgcagattggagcctgggaggctgggggctggggagatagtcaggacccctagaagggcaggaaggatgcacaattattccacagaagaagcctgcctctgtttcccttgatgtcacctagtcaacaaagtcccacagtttatgagtttaacctacagaaattctaatatacctgccctgcacacattctgctatgagagccaagggattaaagatcaacaaaggcttccgagaagaatgcttggcttgagattaggaggaagaataagagtcatccttcatccatgatgaaagaagactggtgggaggagaatgggagagaatgttgcagataggagaaacagaatttgcaaagtccacgtggtggcacagaggaaggttcacctgagtcatggaggaaagtgcagcctggctggggtgtttagggagaggaagcctgatgccagaggtcaaggccatgacaggtaccaaatctgcccccacacattgttctctttccatcctgttgggtaaaacatacagatgtgagagatgggatctaagggatgggaggaaagtgggaaaaagctggggagaaagactaagtgatagttactaaaaataaaatttgctaagagcatgttttaaggatcgtggcagaaccagtcagtaataagggttgaaaaacaaagcatgaaaatgaggttaacctccctgttaacccaaactgaggtctccctggctttt

SEQ ID NO: 588 - DNA, 4025 bp, Homo sapiens
tcttcttgaaaacctctgatttcttttgtctgtccacgttgctggagctagacagtgtcgagactttgatttgagtaccgcagtggcgggctattctgggaggaacagacctgaaagaggcagcacatttagcagagactgcagccacaccggctggggccagggtgcttggatgtgacacagctattgtttgtgaaagagatttgatgcttcattagagaaaaactgtgtacagaaacccggcagagatttcttaatggcattctgattaaaggagcaaacaacctaaatgccagattagtcgcattttgggaaagaatgcatgatggggactgcatttctatttccttctttccctcagccttgcttggcagcatacatttgtcactttgaggacatgagaaaggggctctctgatgtagcagagaaagagctggaaagcagaggcatggaaactttcagctttctggcaggccaaggggaaggttggaggttctgatacagtgtctgcaactcccagggtccagagataaaagtctagacggtccagtggatcaccttggaatgcaaggctatgtggatgtgcatcagtcctttcaccaggaaccttccagaatggttaagaaaggaacccacaatgccccttagagtcagggctgtcatgcacatgaatggttacctcttctgtaccatggcctcagaacatggtagagctgatatcaagggaaccaccgtttctccctcagaaccatgctttaggagctatggttgtcccccccattcttgttgtgcaaactcattaggaggggtagctctctcttagaccttcaagatggggatatgcctggacagggtgaggcattaagggtctctctttataaacaatgaggaaaattccctatacattggccaaagtgatctttttaaatgtaaatgaaatcaattgtaagttccaaactccttcccatggcattggcccctgacacatcccccattgctcagatgcattggccacattggcttctggaggctcttgaagcacaccaagctagttcttcctgggagacctttgacctactgttccctctgcctgccatgctcttctcctggcctttcaaaggtagatccattgcgttcttcagatctcagcagagatatccccttaccagctgatatagctctccatccccaaatcctgccacctcgatgctaatttccttcataatcctaacatgatcaggaactgttcttattcatgtatttgaatgcttacttgcttattgtattcctgcccactggaatgtaagttctaagagggcagggatctggttagtcagattcaatgcttgtagaggtcagaacccagccaggaaaacaaagtggctcaagagagtatatttaatgtagggaactattaccctagcatcagaagagtggaatggctaagtaggtcactgtagggcaacccggaggttgacaagagaaaggagctggggcctggaaggacaaaaagaggaggtggtatcatggaggagacctaatcatggctgaagaacagacaggagagggacaggttccaacttctcccttccttccgccctctgggctttgcccagtgcttccactggccaaatccagtatgatccagttggcaacagtgccagaaaacatagtgggggccgcccctgtgattaagaatagagcaggcaataggtggggaattcatctgaaaacactgaaatgactggtgccttgctctatctccagctgtcttgacacatactaggtcctcagcaagcaattgttggatggatgaattaatggaacgcaccactccaaaggagtcagctttcaggtcaactctaatggagtggatccctaagagggaagggctttgcaggctgggtttaacagtggagacttcctgaggcccggcggggtctcagccggctgtgccttctatctctgctgccctgcccagaggaggatgaaggattcttatctctggaaataaccctctttcatgagccctttaatctgagcctgctgacacttttatatgtgcagggttatgttacttgaggaattcctttgaagacaattttaaactttcatcccttagttcaattttaaagtttgtaacatttgggacccttctcagagccctgaatttactcctggcatcaagatgttcagggcagagctgagctggaggggaattccgcattcctagtgatccttaactggtgcccctggggaatttatctaacatactggagcctccactggtctgtaaggcagaattaagaacaccttgaaagaacatgaaaaaatgaaataaacagcccaagtaaagcaccagcacatatgaggcacttgaaaatgttcactccttttcccccagacgctgggaaatagttcagatgccccctatcccaggacccatgaagcagctcaccgcagcctctctatgttgatttttagatttccttctgttgattattctccacggaaggcgactggagcaaaagaggtggttggccacccattaatacatctccttcttattgggacatttcgccctgctaaaggagtaatcatggattttctgtgaattttcctttaagcgttttctgtgttaaaaaaaattgtagtctgcctaaactgatttatgtgggtaatttatggagtacctgtttttcttttttctctcttcctttttcttcttgctgaggtggtacctttgctgcctcatccctggagttttgcatgagagttgaattttgagctgcaacagtttttcccatttaagtgttagagttgactggtactttatcaaagttccgtaagtacatttcatacaagaaatctcagcaggttagaatccggggactttttatttaaacctctaatgacagtgatactggcctgtaattaaggcatttctggaagttacttcaattgacttgcagaaaggaaggcagaaacccttggaggctggtactaaattcatggggaagagaggcacgggaagctgtggtttgggaggagggctcatgtgtagcgtggggcatatgtgtgtgctaactttcctgggtttctgtctgaattgctaatatgacattaggtgaaaggcatcttgtcaagaatgctgcatgtctggtggacttcctgaatatcaaatctccgagccttctttccaactgcccctcctggccagcctcatgagacactgatgagaaaaatgccacagctttcaaaacagttaacctctcctttggcaattcacagcactgggtttattcaagcttacgatgacacagaattttcctccctttgaaaagtactggttaagtctttctgtctcctgcccttcaaaagcagtcattgtgtttgtttttttcagaggtaccatcagggttgtcagaaagtggaatttcccgccagatcagaatttcttcagccttcattcatgacctgagtacttttggttttgagggacaaacttgctctattttgagcactgaaggaaaacatctaactcccaattatgggtctgtgcacgtgaataattgggtaatgggattaaagtgcttgaagatacaacccttcctcaggtgccccttttcacacataaggaaagtggagtacgaagggcactggctcacgggaaggagtggtggggaccccaggccttcagtccctcatttaacaaggttgtaaagtctgatctgacttcttactgcaagcaccgctacttctatgacatcctccatgccctttttatttcaaaagcagtttaatatgttatttcatttaatctccactgcaactatttccatttaaaattttgttagataatcaatagtgctctaaatatgaaccaatttggaagaaatatgaagaaaagtcatcttttagagacaacccaattcatgggccttgtaaacatttttattttttaggtaatcataaaataaaattgactttttaaaaaaatttggtgtgtaggtctatgaattttc

SEQ ID NO: 589 - DNA, 4029 bp, Homo sapiens
ctaattctccagtgcatggtagaatcttcgtggttggtgaaatgagtcatgtgtatgatttgatggactgtatctatgaaagtagaagatggagaggaaacaaggtctgccataaagaaaagagcttggtatggatgcaagaggaaaaagaagggggaaatataatccttcaaaagtccatcaagtttacctagaaacagatttacttaaaagttttgagaaatttatttctgatgatgatccttatgagtcactatttcttatggaatcaagccagcataaaagttatcttgcattctcagcatagctagtttagagaattaggtcatttgtaagtcaaaagatttctacaaagttcaaaataaataaattccaggtatctgagcttaagatggctgggaagaaggactccatttgaggcaggttttctcatttcccagcttagaattgccttcaaggtctttttctttatctcagaacaacaaagacactgcctgaggaagaacctctgctttattatggtgttctgcaacctaagtcagtgaagttttgattctcctggaagaggctggccagctactcattagctgcagggattgaggggatttcaggcatcagatggaggtggggacagactggagccagagttcttgattccactgcatgttacaaccatctggggagcttttaaaaatgctgatgcccgggcctcacttccattaatggaatcagaacctgtggggccagcgagtgccctaggatttctgtgagcagctcgggctcagaaccacttgttggatgctccctaaggatctggcaaggattttatgagtttaggtttgagagcacctgaaggagtccagaggggctggagaagaaaggagatggtggcttggtaggcacctacatccccaggggtgctggtagagactatgctgcaaaattacccaggaagaagtgagtctttaacattgcagccattactatgcatgaaatggtaattaaaagaccatattttcttaactcaaatacgttgatgagaaagatgcaccattgatttaatacctgctgttttggaggatgcggtgggagaaaactctattaagtatgtattaacatatggactgattataagatctcagtttcacaaatcattttatgttggaaaatgtgcttcttgaaactgatctaacaacataatgatagagtgccttatatggattactctgcctagtcctcacaacaactctacctgtgagatagatgctaacatcctccccattgtatgggggagggagttgaggcacagattgaatagcttattcaaagtcacaggtagtccagagctggtcagtgatgggactggaattcaaagtgtggttttcagaagtagcccacaaaatgtagtgagatccaaggctgttgctttctcaggtctcttaccttccccagagccagggaggtggctttcccttaatcagggtaccgaatctcccaagtgcaggggcgtcctgtccactggctctcatgccctgcacagggtacctggcttaggaagtgaatgggaatgaaatctggcttgaagtcccttagcaggccctgaggccaagggattattttttctaatgccacagaggctcagcatgagctgatggagcccagcccagggagagaagccacactgactgggctgaacagtggacacagcctccctaccacgcctggtggttctttcacctttctgagcacagcatgttagagaatcactctattgggtttgtctgatgatacgggaccagggagaaggaattggagagccttgtagctctggggaccttgatgctatgcctttaggacaaaagcccctacttcccatgccagtttgccccaacagcatggcagaaatggaaaaggggagtgtaggctgaacaggacctttggaaaacaccaggttctgatttccagaccctcggtcttcttgtgcaggctttccccctctttgtttttcccttttctcaaattccttgacgtggtggcaagctgaacctcttagagctgcgttccagaacaacctgggtaatggaaagtacaaaaacaacttaaacttgtttccaaagcttgataggttacaccgacttctcagaaagtgtccatttggacccaaaatgtgaaataacattttgaggcacgttggaggggggccagagggttacgcagctgcaggcgtgggccagatgggaaatccagatgctggcctagggagcaaggtcccttctgctgctcatgcaggctgtcaaagcagcagcctccttaggaccctcactgcaagctttaaaatgttactccttagggagaatttcagatgggagggaaggcttaatcaatacatgcaacgtttaactggcattagaatgatgttttgttttgtttcttttaatgggagatgatgggtggtagtagtaagtcagggagggcgttgcagggtgtggtcttcaactttccccatctttatcacatgccaaaagttgctccatttcagcatgcaaatctaaatttaaatagtcttctggcttttaagaaagccccctagctcacctgtgcagtacgactgaactactatgaaaccagcactggtgaacatatatgtgtggaaacacaacaacaacaaaatcagttgttcaaaagacatatttattattccttcagcagagaggcccatctgatgctctggggcgcaggtcccatgaatgttcagggcagtctctgcccaggccagctccttccccgattgtccacagtgatgatctcttacagactgtcctgcctgccctgcacacaatgggagccagtctggaggaaggtttggtggccatcactctggcgggcactggaaagaactctgctggatgccgagggccatttctctctggacttgctggtgttcagtgtggaagtgggagggaaatcaaatgaggggacctttgggaggtcacctaatgtggtaggacctaaactcagctgggtattggaatcatctggagatttttttttcagttagggtgccccctcctgccttatcaccatagatctgcagtgcagcccagacatccatttaaaataagctgcaagtttgggcacggtggctcacacctgtaatcccagcactttgggaggccaagttgggtggatcacctgaggtcaggagttcgagacgagcctggccaacatgacgaaaccctgtctctgctaaaagtacaaagattagctgagcgtggtggtgaatgcctgtagcccagctactcgggacgctgaggcaggagaatcgcttgagcccaggaggtggaggttgcagtgagccgagatcacaccactgcactccagcctgggcgttgagagtgaacctctgtctcaaaataaataaataaataaaataagctccccaggtatttctgaaggttcaggtagcctttctcattagcccgttccccaggattcttctctcagtcctttttgttgacaagctctctctggtttagcaggggacacaaggttcaattattgttccattcttacgatacaattcttggatctggtttggatataaatgtctaggttgccagtttcttgacaacttcaagggccttgaagttgactggtgaggaaaaggcaaagtaaatgcctgagggatggataccaattgctgtccccaggtttagtcagcaacttttgctgttgctcctgggtctactgtgtgcactcctttgagggccagttatcacacaggtctccctttgggtctccatcttggaatccaggcaggagaaattaaccaggaaattaaagacatcttcccttctccactcctgtcatgtttagatcttgggagtaaggagaggaatgggagagcaaacatagcttggctggagaaggaggtggttttgatcttttcttctccccttcctttcataggtagaggtcgtctcctttataccatctgtcttggggagtagtcacattaattatgcgtgt

SEQ ID NO: 590 - DNA, 4045 bp, Homo sapiens
tcatggcttagcctagccttaaaccttaaatgtgctcagaacacttacattagctcatagttgggcaaaattatctaacccaacacctattttgtgataagcgttgaacattgcatgtaatttattgaatattgcacttaaagtaggaaacaaaatggtcgtatgggtacttgaagtacagcttcttctgaatacccattgcttttggagtattgtaaactcaaaaaatcataagttgagccattgtaagttggggactgtgtctgcatgtacagggatgatataaatgcccttggagcttggaagagggagaaatttctgaaggccagaagagactggctttggatgagctatgtaaaaccaaaacccttgtagccttgttgggattcagggagccatgccccttctgctgatcttgcaattgatgacctttgaactgaggcagtagtagagcttgggttaaattaaaggaaagggattctacctcatgtgttcttttgcaagttgagagtgtcaactggtctggggatgacttgagctgcgtgtgctatgttgcactggtgaggtggtcacttgacctcgtaccaatactggcttctgagtggcttccaggtattgaccttggctaatgagattggattcaaagcatttgcaagtgccagtaggtcagtgatcaccattatctactgtgcacctcctaaatgccctgccctttttgcgtaagctgggtctgacagccctaatcggtcctacctcctagatagcactgtggcccatttattcttacctagttcaggccaccatcacttcttgtgtagacaactgcaatagtgtcctacaaatctgctgacattccctcctaaacaccccctctctgtcaaatccattcttctaactgcggctggtagaatctttctaagatggttttctgatcatgttaattcttttcttaaaactcttcatttatttctattgcacttggaagaaaacctaatcttattatatcctatatgtgttgtctgacccagaatttttgtcattctttatttgatactcatgtggctcaactgcaacagcagcaaacagctgggctctacccatgtggatccctctacttggaatgtctctcctcttctccctttccccaccttttgcttagcctccacttactcatccttcttgggcatcacccctaccagatcaggttagctgctcctgttccacagctcatagcttgctgtactttccctttgcattccctaatgaacccccatgtgttatccatgtagttttctgtttagtgtctgtctcctctttccctttcagggacccttgcaaggtccctgagggcagagaccacccccattttgttggctactgctcaagacctagcacagaagcctgcagctcagcaggctctcagggcatgtttgtagaggcagtggctgctttggggtttccagagcttccttgggaggtttcttctgtgtgtcccattgaccagagcaccactgggggtgaagtgagccccagacatctttaggtttccatctttaggtgagctttatgcccaggcacgtagcagaagaaactgtttctactcataaaccaagcaaatttatagtggaaatcagtgggagaaaataaatatgaatccccatgatgtcattttatgggctgctttatagattgtaatcacccatttagagtttgcaggctattaattttgtttgcgcagagcctcaggactcttggggacagaatttacagggctgtggtgtcagacacgtggttctaggtcttaaacccctgaaaggttttggaaagagaatgacaggtagcctatggagcagctggggcttagggctctttcctctagctttcctcctggacatagttttaaaatatttgttcactgttttatcatcttaattttaccctagtcttcaggcctgtcctttccgtaagctaggtgactatgtgggtcttgcattaaacctttggtagagagagctcccctctgagaacctgaagagatgtaaagaggaacagcacaaggtcagagagaactgggtagaatccagctctactccttggcttgtgatctagagccaattttcattgttgttgttacttttttcaaccttcgtttctttctctataagttgagacccatgccctcaacctcaaagggtgattataaagataaagaagaggaaataggaaaagcatttggtactcaaaatgagttatagttcataaaatgactatgacgattgctgttttaaggtaagctgatagagtgggaacacagtggaaactaggagtcagggcacctggtcccaaccctgtcactgatgtgctgggtgattttggacatactagttagcctctctggtcccaaattcttcattggtgaaataaaatgtttggctcaaaagattttcagacatggtgcttctcagtgtggtccatcgaccaccatcccctggagacttgttagaaatgtagattctcaggttcagccccagctctcttggcccagcagtcaaaattttaacaagctctccaggtctctggtgggcatagtgaagtctgggaagcattaccttggttctagcactcatgtccgatattgacttcccaagcagcagtcacctctggagccttcctctttggggtcttggaccgcaatggcctttggcaaggagtctctgctggatctgtgctgcacacggggtgtgggaatctctgggcaaccagaagagcagtagtaacatctttaggtaactgaagtcaatcctgcccactgggcaaatattaattggttgctcagggctgcactgagttcaaatactgagccactcaggggcttcgaacgaccaagatcaggcagttttcaacctgtgatccacttttggtagatttaaggcaaaagcaaatattttttgccattttttcccaaattattttaccattatggcacgtgttgctcctgcctaggagatgcattccccagaaccaagcaaacaagaagaaggtcctccttcagtgggctgtcatcgatcattccccgttccatggccacaggactgactgctgatgaaatctaaaagaccagcttgcagaaggcatggaaatcctggggttaggggcccctctgctatggaggtatgactcacagtgggtcagggaacctgagtgggatcatccctggaactcagaatctctaagacacacttattggctctctataagcaataacagatggcaagataatattattcttctaatcttttgctaaaaacattcagtcatttctcaggggcctccctagtagaggaagacacctgcagggtatctcattctttcttgttctcattttcccttctaccattttccccttagtatatttctggccctatgtgcaggaaatcaggtagctgaggtgtggtttaagggacccattgtggttcttatggcccatcaacacaattccttcgtgttggcctgcagtatccatgtttgttacccttttgggtcaaggcatgaaaacatctgtccacaatgccagtcttacctctgatatcaaagatagtatctgagacgggtgataaacaaatttaatgtgaaaagctgatgatgttttgaagtcagtagaggacggagctgacaatgagcgtcttgcaatgagtctgttctcaatttcattgctgataaagagaaacagtgtagtgtggtggcgaagagcacagaccctgaagcaagaatccatgggctcaaattctgagtctttaagtctgtggcccaagaattcacatttctaactgacttcctgggtatgctgatgctgctggtctgcaggtcacactcagggtggcaaggtcaggcaaggtcagagcacagcatgggagggactgtgctgcctgtagtacacagtggaaggtggaggaagcccaggggtgacatggcttacttatatcatctatgagttttttgtttcctttaggaaatttactgaaacattcttcattgcaaagtataa

SEQ ID NO: 591 - DNA, 4047 bp, Homo sapiens
tggcctctgagggcagtgaaaatcactggatgaatggttagattcatcagtggcttttggccttaagacactgtacacccaatagacacacactcatgccctgcaagtacaagcctaattttcctgtactcacctttactacatgtgatgtactttgatagtttctattctggaatattctattatttcctgctagttccatctcattccatcccactccactccacttcatttcattccattctcatttcatttataaaatgacggtcaggactcatgaaactgatctcatggtccactaataggttgcaacctgtgattttaaaaataccagattgggttatattcaaattccctttaacccccaaatcctgtgagtccaatgtaaattgctactacagtattagggtacaaaattctgtgcacagcaggctcacagataaagtttttgacaaactgaaaaccatgtgttattaattcacttactcattgattcacttcctcatccatcccgttcattacttaccatgtgccaggtactgtgctaggccacattgatataaggtaaataagacacagcccctgttctcaaagagctcttggttacagggacactgattaggtttcctggggttgccaggatcctagcatctgctttccctgagtttccttggaaggaaggtcccatgcatgacacatcctgttcgctgttcttgggtgacgtatgtagccctaaagtcttggcccagtagcagagaatttcacatccttcagtaaataaaaaccaaagtcaaaatgaacatatgctagaaaacagagactggcagtgctgtgaaggccctgtcccctcatggactctgtcgtgagtggcttaaggggaagagaagtgctcctcttaccggcatcaggagccctaattactgttgtatattgattcctttcttccgcagaccgctaatcctgcagagcaacttgcagggcataataattgggattgcccaatgctgggagctaatcagatttcttatgtgtagaccagctttatgctagcgtttaaggaagctcctgattcaagcacagaaatgaactgtttaaccatttccgagccagagatgagccatcacagaccaacgcggagtctgataggttaggggtgaattgcgctggagaggctgaacgtttcttaaagtccactggcaacaggaagtcctcagaagtccaatttgttgttgttcctccctgaacttctggatttctgaggatggttgtgagagtggccgtgtgtcaatttttaaatcatgtggtaatttgtccatgattgtttattttgtcccccagcaagattgtatactccagaaaaggggtagctgacctactaggtgaaatcatgctgtagttctgagttgctgcttcttcatgcatacaatggaaacaagtacacccccaccaggctcatgtggagggctcagtgactaacctggccctcagctatcccctgctactcccataaaagctagcactgggcatgtggcttgtacttccaacaatgagtactcccttttctcccctaaatccagccctggaagcattgccgtgtttttatgcctcttggcattctttattttttgagacagaatctcgctctgttgcccaaactggagtgcagtgtcacgatttcagctcactacaatctccgtctcccaagttcaagcagtcctcctctctcagcctcccaagtagctgggattacaaatgtgcatcaccattcccagttattttttgtatctttagtagagatggggtttcaccatgttggccaggctggtctcgaactcctgacctcaggtgatccgcctgccttggcctcccaaagtgctgggattacgggcatgagccaccgcggccggccatctcctggaattctttgtccacttttctgtccttcctctcttcccttctctcatgctacactcctctttccacttttggtcaatcagccaaaattacaagtacttttccaaaccttggggtattggagtccatggctcctggctgctgtgcatggtttccccttttcctgggaagcttctgtcccactccctgcccctcacctcaccctagcactcttcataccaaacaaaatgacctttctgggtgttctccctggagttccttcgcttgcgcagtcatagcaggctagcgcctagtgggctgtgtgcatctgaattgcaggttgaatccaacaacatcagtgaggtgggaggcaagtggctgggtgcggtgccatgacattctggctcacctgtcatgttggatggcttgtgtgagccccaggaaacccgtgcacccttaggaaagcatgggatagatctcctgagatgatttcagagaaatgacagcagaccattgtgagggaggcagcatgactgggggaatggataaggcttaggtccctgagaggcagatccactccagccttgcggaatgtcatgctcctgcagagggctgcaagaagaggtgaacccattcccaatcactggccaggttagacaaatcattggattctgggacatcagagctgaaatagctttattggatcatctctggcccagctcgcttgctctctctctcaatctcttgatcttttttatttatttatttttttaaatgataaaaacaaagttcagagctggggcataacttgtccaaggtcactgagagctgtaaccatcaacatgtggggcagcagctgcctgggtttcaaagaaaggggacttgctgccattcctcctccccctagttgccactgtcttctcatgggtttccttgtccttccctggtgccgagaagcagggaggagggagcatctgttgccatggaaacaagcctatagtatgagttcgctctccccaactggctgtggtttctctgacaggggctgctactggtcctgctgttgggccctaatggggactcagggaccaccactgtatttgccaggggagaaagctggaggagcagcagacatcccctaacatgagttgtgcaggcttggtaatgtggagtgggcatgcattgtggtgattcttcttgcttttttaaaccaatttctcctctgctggagactcttcacagaatttaagagtctttctcagaaggtgatcagccttggacagactttggtcttcagaccccagagccaaacttttgaactgacagcagctgtggccaaaaatggtgtttgtcagacctgcaggaagaaaatctgcaatgaagagttggagtggtaggaaaagaggaaaaagagggaacttgttttgccttcagacatatttaagtctcctaagtacttcaggagttaaaatggggctttgaaaataaatagacttttctgttcatgtggggctgaagtgttccagggttggaaagggttttattaggtcatttcatctctccctctgtctctgggcctattctaacccctcttacttataaaaatcgcagaagagggtgatttcataagctgccacgacaacttgttccgctaacaattcatgatcttaaaacaatctccatagcagggagaaattcctcctatttcctccaaagctcgtctgtctgcgggccaaggctgctcagaggcagctggggttttaagaagtgagctctggacttggatttaatggtctttgttcaaatactgttattgcatccttgaacaagtcacataactgctccaagcctcagttccttaatctgaagaggttagtgtgaaggggagaaaaagtaacatatgttaatgtgcctaagatggtatctggcacacaggaatgcttgttagatgtgtggtgtggctttgggctgactaggatcaccatggtatgggcaccttttggatcgagatctcagaaattaaccctttggttgttggatcatggggttgggatgggggataggcactgcagcagcaggggcagctgagggggcactcctaagtcaaggccattggctgtttaccagccggtacaaaaggtttcaatatttgag

SEQ ID NO: 592 - DNA, 4024 bp, Homo sapiens
tatattgggttatgcaaaatagtatcaaaattaactttacttgtttatttttcattttttaatatgagtaatagacaaatttaaattagctatatagctctcattattatatttctgtcagacagaactggttcaacccgttgtttgacactgagtgtatgtttcatgtgtaaatatgtctcaacgcttgcattagatgggcagtttgagaacagagacctcagcatcccattcattttctggcccccaaacacctattttcaaaatgccttgtactcagcaggcagttggtaaatgttttctgtaattgtgaatgataacagtgatggtagtgatgattgtggtaatgaagaagatgatgtaataaagctcaaatggtatgttggggccaaattacaaagatttttgtaagaaaacagtgcaaggtggaatggttacatttttaagaccaagcgccctcaaatacaccttaatttttgattaatttacatatataaagacccttgatacacagaacaaaaacatcttccatcatttctgtttagagatagagtgattcttaaagagtcttacaatgaactcccccacaaaatgctcagtgaactcttgctagggaccagttctaggtggtgggagtagagcggtgagcgaatgagataaaaatccatgccctttggactttacacagcatgtgaaaataaacacatttccaagtaaagtgcttacatgtccgatagtataataagcagcctggtggaaaatcaaacaaggcaaaggaaaggaggtgtggttggggcaggcagggggcatgtgaagaaggtgaacaaatctatgtgggcttacttgatcttattgtttcaataattcagctaatatgtttctttattcatttattcactcaacaattgcatatactgaaatcctattatgtcattcaagccatggtgagacaaggaagtgggtttcacctcccaaggagcgcacagcttactctcagaagcaggaaaacgtgccaattacccatcacactcacatcgtttctaaagtagatcctcaattaggcaacacttcagcagctgcggagtcactccgtagtagtctgaggcaacacaagtgcatctcatctgaaatatcctctaatgcaggatatactggagctgttgcctagggagatactgctcaaggaatatgggttccacaagcaaatgctatgaagttctagttattattttgagcccagaatgagttgaggcctaaaaatgttgccattccattaaaatgtgttagtttgaatttaggcacaaatgttatttttgaattataagcatgcgactcgtttatagtaatgtagctttgagaggactttgggttatttgccaggccattctttttccttttcttttcttttcttctcttttcttttcttctctttcttttcttttcttttcttttctttctttctttctttctctctttctttcttttttcttttttttttttttggtagacatgggtctctctatgttgcacaggctggtctcaaactcctgggttcaatcctcccaaagtactggacttacaggcatgtgccaggccattcttgatataagctgtttctcacccatttggtccaaaaatagaggagacaataggccctctgtccagggcaatccaaggtataggactcacatcctgctctatgccatctataccattgctatttgccttctcgaatgggctggcagaaccgagaccttccttgaccagatgaggccattctggagctccaagcaggaagcagaatgaaaacatgtgtttgttttactaaatagctgttgcatgtgttggatgtaagagtcccccttgcttaaagagaaaataacctaagaacttgctcttcgtgcatttcacctttagaactagaaaagctgtctaattagattaacacacaggtgcatgtatgtgtgtgttagagtatagatactgctaaataagcccagtgtttctctgcatttgtctgaattttggaaaatgggatgaggctgattaagtggctttcatctgagagctgtgtacttctgtggttctgtttttctcctttgaatccctatcctatctcatttggcctccttgctgtgatcccatggatgtgttcaagtgtactgctagttccctaccactgcaaaaccctcctagctctgcctggtgaccccataaatccccagtgttccatgcctggtgctctggggagggaagcagatggcagggctgtccattctgccacccagtgaggcaggaggtcaactagggtaacagcagcaggtggggaggtggggtttctggtctgtgcatgcaggggacaacagatcatcaatgatccatgggcagaacagccctcatggaactaacactgctggcagaaggtggcagcagctggaggctgcttcagctcttgatcaagcacagaataatgttgggtgggtggctgagagttgctgcatttatgaattgtcactcagtggcagcactgaggtccccaagctctgtttacaaatggattttttgctcaaatgtttccttaactcagagcaactctctctcctttttttccctctcatcccctggccaactcctgtgcacgctttaggtctcagctttgggccccaaattcaggaaacatgttcctcctctgtgttcccttacccctgcgtactcagcctatcgtactgtaaatgctatgtaatctgtctcccacaatgggctgtgccctcgtaacaacaggggttgtgtcttgttcctcattgcattttcatggcctcaaaatgtatatctagtgctgtcaatatttgtagacttgagtggatctcatctatgtgcatggtctaatttcattaattatagacaaaaaggaagtagcagcttgggtaaccaaacaagcagataatccccaatgtatttctttaaggctttgcagtgctccccagggcaatttgggacaggggacaggttacctattttatatatatatacatatattagagatgaggtctggctctgttgcccaggctggagtatagaggtgcaatcatagctccctgcagcctcgacctcccggactcaagggatcttcacatctcagcatcccaagcagctggaaccacaggcatgcaccaccatacccagctgattttttttttttttttaaaggttttgtagagacaggcccatgctggtcttgaactcctgggctcaagtgatcttcctgccttggccttccaaagttctgggattacaggtgtgagccactgtgcctggcccattgtcatatttattaagtaaatatgaggacttaagtggtatttgaatattgatatttataaaataccctccactgccttcctcttcagcatcatttcatccttactggctctacctactcaaaacaggaatggttgtttatggaagtggatatgtttaatggaaattcatatgtttcactgacccatggttgccatcatgccatatatcataaagcacttttgtataaattaaatataaggataagcaagttattgctcagattagatactgtattcctcatgctcagacctgctgccagtgtcagaggcctgagagtatgccagctggggtgggtcaggccagcgtgggatttaaaagttctctagataagccacatgtgatgattgagctctctctctgctgttcaggcatgtggctggcaggtacatggggggcagggagaaagacactggacttagactggagccagtgtgttttatggcctccttagtttagattccgtgtggctctgtacgttggagagggaatggggctcccctaaccatagtaataataacaataggaccctcctatttaatcccatctctgtgccaaacacttggctcagtgctctcccacattattgcatgccccagcatcctgaatggaaaatactattttcattttacatgtgaggaaactgagtcctcacaggttaagtgac

SEQ ID NO: 593 - DNA, 4062 bp, Homo sapiens
ccctgcactctggacattgagaagcactagtcattctgttttgtagtacagatgtgtttataaagagactccagggaagtcagatgggtaaggattatgcctgtcactcttttttttttttttggcattttttaaattatactttaagttctagggtacatgtgcacaacatgcaggtttgttacatatgtatacatgtgccgtgttggtgtgctgcacccattaactcatcatttacattaggtatatctcctaatgctatccctgccccctccccccgaccccacgacaggccccagtgtgtgatgttccctttcctgtgtccaagtgttctcattgttcaattcccacctatgagtgagaacatgcagtgtttggtttttgtccttgcgatagtttgctgagaatgacggtttccagcttcatccatgtccctacaaaggacatgaactcatcctttttttatggctgcatagtgttccatggtgtatatgtgcacattttcttaatccagtctatcattgatggacgtttgggttggttccaagtccgtgctattgtgattagtgccacaataaacatacatgtgcatgtgtcttaatagcagcataatttataatcctttgggtatatatacagtaatgggatggctgggtcaaatggtatttctagttctagatgcttgaagaattgccacactgtcttccacaatggttgaactagtttacagtcccaccaacagtgtaaaagtgttcctatttctccacatcctctccagcacctgttgtttcctgacttttgaatgatcaccattctaactggtgtgagatggtatctcattgtggttttgatttgcatttctctgatggccagtgatgatgagcattttttcatgtgtctgtgcctgtcactcttgacttctgtgttagttaggattccttgggcttcatgtaacagagagaaaagcagtttttcctacaagtagaagtctagatgtaggggtttctggcactagtgctgctgctacatcatgtcaagatagtgtctgtaggatgtcaggattcccttggcttttcactcatggctgcaagagagatggagagcttcagactttgggtccatttcaaggtagaaagaaaagggggaagggcaatatcaggttaagctgttccctcctgctttttatcagacatcttcccctgcagaatatgtggcgtggccacctatagctgcaagggaggctggaaggtgattattcagctttccatcttcgaggacaggcaaggttggactccaccttgggtgagccaaactgcagtgtcagccaccttccaacaaaccagcctaagcccaaacccaccagtaaccctcccctagtggagggaaacatttagttctcttgggagttgcaggcaggtctttgacttgaggcaccattctgagtcaagctgggtggtggggaggtggggtgaggcaggagtgcctagctctgcttccccatggtgttgctgggggtagatacaaacacagtcacatctgctatgtctggaaaaccaagactggagtctctcagctctccagtgcctgctttccctgtagccaattgcaaggctgacatcccaggaaaggcagcagattagatgagcacaggagcagagaggctgggaaggcggtggaggagggagaaatgtgggtttggcagaattttctaaaatatcactttattgatttggaagagacacaagagaggaaatataagagacaagtgataagaggctcagctgagatgggcatggaagagcctgccttttttttttcctttattgcatacctatggagcttttctaagcattaaaaaaacacttccttaccccctccccatgagattttaataccacagatacactgtatatctgtgtgtgtactctgtatgtatctgtgtttatacataaaggttgttttttcacttttcaatgtctgccttcctggaggagactttgcccccattgagaatacatgcatgagacacatctctagagacgcatctgggcttactgtgggaggagaagagctggtcccactttgtcaaactgtcttgtagacaaagggaattgagaagagtcttacatttcttgagcacctgttaggtatttggcaccaagacaggggctttagatctgacaactcacctgatgcccaatggcagttctgagtggtcagagcaggggcctcatttcacaaatgacatcatcaagatttaggggttcctccctcctttgaagagatccaacctgcccagatgaacaagctagcactattctgatgacagggcatggttgagtgtcagatgggttcaaagctcgtaggatgagcacagaataggctggagtctgtagtggtcctccctggaggagatggggtgtgaactgagctctgcaggacagacagatgcagagatgagaaggggaggcagcacctgctggagaagagcaggagcagaggcttagggtctgtaagggcctctggctgcaggggaggattttcgctgagagctgagagagatggaggcagagccatcccgggcaaagagaaaaagccccaccctggcatgtttattcctcagtctctggttgtgatgtagtaattgagccagggatccaacccagctatacttagcaccatttccagaaggcatgagggcgggagatgggtatataaaaggcaggagtctggggctcctcactcagaggcttctgaaacctgagtggcattttcagtgtatccctgtggaggaaatctccgaaagaaggtagctgagtctgtgaccaaagagaggcttgagtcctgtttccttttcactctcaagagccttcaggctcactcaccccttcccttacagatactttgctggagctcctcctgacatgattgtattagtaaagagaggcgccaataacaaatggcccccaaatctcagtcggattctgcaacaaaggtgtatttcttgcttgtccttcatgttctgtataggttgtactgaaacccctgcttctggagccattttcccccaagattcttcattttaacatgtccttccatttgccatactgcaggaagaaaacatggagaactgcacagctcctaaagtttctgccaaaatgggacatatgccacttctgctgatgtttcattggccagtgtaggacccatggcttagcctaacttcagagggtgcagggtaatgtaatcctgctgcatgcctaggatgtgaagagcaggaaatatttgtcaacagcattaaacatgaccacagtgattataataaatgatttttcaatatccagttgaaatgatttttctgtttcttttctttttttgacacagagtctcactctgtcacccaggctggagtgcagtggtgcaatcttggctcactacaacctccgcctctcgggctcaagcgagtctcctgcctcaacctcccgagtagctgggatttcaggtgtgcagcaccacacccagctaatttttgtattttttagtagagaaggggtttcactatgttgcccatgcaggtctggaactcgacctcaaatgacccgcctgccttagccttggcattgggcctctcaaagtgctgggattacaggcatgagccaccatgcccggcctagtgtttcttcttcctctgtaatgctctgatggtctctgcatcagtacttatattatgcttggtaaatatttgtcttcccatctaaagtcaaaacattagggacaagatcctgttgaatgagggaactacaaatacttattgaggatccactcactgtataccaggcacagtgctaggtacacagagcaaactcccagtcctacaaggtggtggatctaatgacgtgacagatgacttgtctccgagttctggaacatcctgagcatgttctcatcccagcactgactagtccaactacttgttgattctctaagttagaattgggagatgtgggaagcttccagaaagaggtgacctgtgacctagcacaggctctacccacagcggga

SEQ ID NO: 594 - DNA, 4060 bp, Homo sapiens
caaaagtgagagatgatgacaaggccaaggtaggtaggagaatggggatccctcattcatttatcccatcattatttattgagcaccaactgtgtcccaggcattgttcaaggttcaagcacaaagccgtgttcaatgggttcaggtagaaacatgcacagttacatcacaacagagtaaaccatgggaactgcatggtgcagagtagggggtatttgcatggcagttgaagacctgtgtcggacgctgatgcttctataataacccaacttggttcctctccacttttagagccaattaattaggaaaaacactttcttccttccctctctgtcattctatgttggcatttgtcccccttgggttgatgggcagacacaggtatgaaacccataacttcatctctctgggattcagtttctgggcagagtgggcaagggaggccagggtcttctagactcactaagtcagaagcatctcctcctgatctttggtttaatttttcttttgaaggtactcagtccatgatttcagattagggaggcaccacctggcaaagggggagcctgacaatgcagggcagttctaagtaccaggcttgggaccgattctatggagatatggtagatgggactaccctcaactgaataatgtgtgaagagaatttaagaccatgcctgatacatagagggtccagtgaaagttgaaggcaaataaccctggtaaagaaggcaggaaacacaaggaagccattcatttatttattattcattcaatcaacaaatatttcttaaatatttataccaacaaagcatggaacctctagccaaactctctggtttcaaatcctggctgttttacaatatctgtataaccttgagcaagttacttaattattctctgtgcctccatttcttcatttgtaacatgggaataatcaaaaagaataaatgaagattgttatgaagactaacacatgattgttattattatctttttgttcatttatttagctgtgtccttagtctgttgcttgattggtgtggtgttggggatgtggccaacggagacaggaaaggtctccgtctttacccaccttatattacaatagaagagtcagattataaaaaaataataaatcaataaataatactttaaggtagtgatgagtgatgcaggaaacaagagaagatgattgtggagtgagtgattactacgggtgaggtccaatgatagagaggactagtgaagagggaagacagtcagtctacacaaagatcatcctgttgaaaaatatgaaatatgcaagtctttggaatttacccaaaaaaaaaaatagagaaagcatttcttgagtttccaagagaggcaagcaggatgagccaccaaaaataagtacggttaaataaagattgattctgggaccaaataagcttcaagataattatttctcatggtagtgaatcagtatgtctcacaaatgcattcatcttttcatgttttcagtacccaaggtccttgatggatggattaatcctccttttcaccttgcttccttcacctgatccctcacctctcaatgaattgaaattaaggaccgttcatttggaaaaacctattaactccctgcttgtcgatggcttactttctactcagcctggctgggttccacctcttagctcgtgagccctcacgcaactctgctgtctccattagtgtcccttgtgggctggtggccgaggcagttaggcttatgaatattccagttgctcctgtaaatttccagcatccactgttaggcaggacatgaggcactaagggatgtgcatcacttctgggctggggcaggggatgcctgtgtgtggtggtgcagttgctgtcttccctgatggcactgaagagactgtggcttccagggttgcagtgcaagatggcggagcttctgatgcctaggcccatgagtgggcaggtggagcagagcccaggctgcctttgtcttcataggtctctaacttcttgacttctcaatagcctcaatgactggttccttcctgtatttggtaggtgattgaaaacctcttaacacatgaattattcagtcttggctaggccttctcctaaacagttgtctctggttcttaaagttaccttttcctcctctctaaaataacttacttaccttttcctgccacggacactatgacctcttggttttattttcttgattgtatttggcattctctgaaattgtcttatttgtacatttatatgggatttgtgtctcctcgctagaatataactcttatctatttatactccactgtatcctcagtgcctacagcagtatctggttgaaaggggtgcctgataaaaatgtgaatgaaatgaatgccaacagccaggaaggcacctcatccccctcccctctgccaccccctttatcagggctgggctgtgtcagctcattgaggcagtagggagtatggttaggatgatggactgcccgggctcaaacacaacttcccacctgtgtgatcttagataaattcacctctctgtgcctcaatttctttatctatacaatcaggacaatggcaatacctatcacatggattgtttttcagtttaaatgagttaatatacataaagtcctcagaaaattatctgattcatagtaggggccatggaggtattaccattgtcaacagttactggggaagcaaagggcctgtcctctctctggtaaccccccgacccccttcagtctcttgagaacccggcctcaatgctcacctggggtcccctgggatccattcagcaagaaggttcagccacaccaagccctgttccttaagcccaggagacataaatccacaaagcctacaggagagatccctgaggaaagtggctattctggatggggccagaaggttctttctcaaggtcaaagctctcggagacctgatgaggccctgcccctcaagcttctgtcctttccacagccctgcagcattatttccataatgttattaaaaaccaatgtgtgctggccagatgagtgacacttcccagtgatggggctcggctctgctcctccaggcatggagaacttgttcaattatgtgccaccccgtgatgggcccaatcacagtacacacattagcttctgattatacccttgttgagtttctcttgacaggaaggaaatgaatttacctcgtgtcacctctgtagtttgcaagcaggcatggcttctgataatagcacctttcatgttttgtaagaccaaggagaagcattcgtgtggtggccagtccttggtgaccctttgtctcagcctggaggtgagcttgagctgattcttcatgggagtgtttactcctggggcttgtaggaatctggctgggggttgggtggtcagctgtcccataagattgtgggccttggccactgcagcatgcacatccctgaatccacactcttatggtatcgaggccttgggcaaatgactgaatttcccttgaccttcccttccacctgtaaaatggggacaatgatagtagttatctcacagggtaggcgtcagatttaatgagctaatagatgcaaagcccttgcatgtgcctggcatataataaatgctacattgtgtttttatcattaaaattatcttaatattattttgctgttgctgttattattgctgttgttattgcttagattggaacatgtctttgctatttataactgtgtgaccttgaacatatcacttagcccccatgtgccatgacatttgtaaaatggggaaagaggagtctgttccttggtgcagctgcaaggatgtcagtaggttggcacaggaaaggcctttgaagcagcatcagtgcagggcaagtgttgtgggttattattggtgacttgctcccctcaccagaggggtcttttgggtgctgtggagccagaggggtctgtccatggtgggttaggattatgcacttaggtcttgctttccatttgggacagtaagcatctgagagaagagtttgtccctgactatacc

SEQ ID NO: 595 - DNA, 4039 bp, Homo sapiens
atggcctcttcacttttgctttctctcttctttgggttttactttgtgtttccaacagccaatggaaggctgttctatttagggtaaatgactcagacttggtacatctcgaatcgtatgtcagagcacactgttgcccctcaaagctcaggaaaggctgcatactctatctccctcttgatggtttcctcgtatttacaagttaaagaccatagatgtcctgtagtaaaggggttagcttgcctctgtttatcccggtgattctagtgaaactaaaatgcttgtttctatggggcacagtccagatgtgttgttcacttggattgaccaatcctttcaataaagttttgatgcaaccatgtgaatcccaagttttcagcacttagttttgtgaccttgagcaagtcacctaatcattacatgcctcagtttcctcatctgtaaaaggggataataaaaagcatctacttcacagggttgcattgaggattaagtgctttaattaaggttttagtacagtttctgaaatataatgtattctatatatggtagctattattatgttagtatccattattatttgctggaatcttttaacactgtgctgagtgttggtactgtcttcttatcatgtcatagagcatggggtagtataagaatcctaccttaggtcaaaggtcacaaagccctattgttttattcccaatagtcttacagggaagatgcagttgtccttgtcttatggaggaaggaggtgaagcacacccgagcggtaaagaggcccctggtcacacagcccatacaggagtcaaaccctggcctctggctgcaagcctgccatccccaagcgtctctctaaagcttcttgtcaaccagcctcagacaggggcccacagacacgaacctcatctcagcgttggtaggaggcaccttccacttggattctcttcatgtggttaagagagtcctgagttccaatcctaagttcactcgtctctacctccttgcctttgtgcaggttacttaacttttctgaccatcagtcttctctgttgtaacatagggatggtaacacccatttcttatgcatgcagtgatgcttaatgacataatgtaggtggggttcatgcacaaggcctggtatatgatgagtgctggtaaatcttagctcccaatgacactgtatcaggctctgtgctagggtgctttacgaaaatgatctcatgtaatcctcacaacacatcaggatattggtactcttcattttacagatggggaaactgaggctctgtgggattaagggactcacccaaggtcataaagccagattgtgacattgagattcaaatcttggcaaccttactttctggaaacactttcccccttcctcttctttagacccacatgcaggctgcttgcagactctgtgcttggccatgtttcttggtcagcagggcagtcgggcaatgggcattttaatcatgtttatgctggacagggctgtcccttgggcttgaggacaatgttcttgaaccagaagaatatggcagaagtataatgccatttcaccaggacagatgcatcaaattccatcttgggtctggtaattctgccacagatggtggcccattgatatgtgcatgcttggctggggtgagagtctgtgccaatgtcacaggacacagcaaccccaatgagtctgtttacttatttaacagtcaaggtgaccagaagagacactttccaacaggacacaatgaggaggtacccagcaagtcttctagctgattgggggaagaaacccagtgtattacaggaaaatgagagagtgcatttgaatttgtttctaatctgaattttccatataaactctagttagcagtttcaaaactgtggacgcacttcagcctaagggacaaaaacaaaacaaatgacccaaggtaccagctgcaagatgctggaataggagggagggagggaaggccagtgagagggcaagattattaatatgcttttcttactaaattggctttcagaatcaaggggaagaaccaaggtgggttgttaagggagtactgatttagatgtgctgagcagttgaaatgtttttgtttctcaaacatgaaagcacttggctttgcatgactgggttttaaattgctcagcaaagcatcacttggggctaacctgagtctgtgaagttccacaattcaggaatgatggttactgcagcactcttgtgtttcaaggttcgtcatgaagactagcatagattccactgttcaattaaagcaacgtttaccatgatattcctattttccatgatgcagggtcctgggaagcatctctttcaggaagggagtatgtattcaaggtcagtcagtatatgaatgtgtctgagacttggatggctcaaggggatagagctaggtgttatctggcagtcgcaaaagtgagagatgatgacaaggccaaggtaggtaggagaatggggatccctcattcatttatcccatcattatttattgagcaccaactgtgtcccaggcattgttcaaggttcaagcacaaagccgtgttcaatgggttcaggtagaaacatgcacagttacatcacaacagagtaaaccatgggaactgcatggtgcagagtagggggtatttgcatggcagttgaagacctgtgtcggacgctgatgcttctataataacccaacttggttcctctccacttttagagccaattaattaggaaaaacactttcttccttccctctctgtcattctatgttggcatttgtcccccttgggttgatgggcagacacaggtatgaaacccataacttcatctctctgggattcagtttctgggcagagtgggcaagggaggccagggtcttctagactcactaagtcagaagcatctcctcctgatctttggtttaatttttcttttgaaggtactcagtccatgatttcagattagggaggcaccacctggcaaagggggagcctgacaatgcagggcagttctaagtaccaggcttgggaccgattctatggagatatggtagatgggactaccctcaactgaataatgtgtgaagagaatttaagaccatgcctgatacatagagggtccagtgaaagttgaaggcaaataaccctggtaaagaaggcaggaaacacaaggaagccattcatttatttattattcattcaatcaacaaatatttcttaaatatttataccaacaaagcatggaacctctagccaaactctctggtttcaaatcctggctgttttacaatatctgtataaccttgagcaagttacttaattattctctgtgcctccatttcttcatttgtaacatgggaataatcaaaaagaataaatgaagattgttatgaagactaacacatgattgttattattatctttttgttcatttatttagctgtgtccttagtctgttgcttgattggtgtggtgttggggatgtggccaacggagacaggaaaggtctccgtctttacccaccttatattacaatagaagagtcagattataaaaaaataataaatcaataaataatactttaaggtagtgatgagtgatgcaggaaacaagagaagatgattgtggagtgagtgattactacgggtgaggtccaatgatagagaggactagtgaagagggaagacagtcagtctacacaaagatcatcctgttgaaaaatatgaaatatgcaagtctttggaatttacccaaaaaaaaaaatagagaaagcatttcttgagtttccaagagaggcaagcaggatgagccaccaaaaataagtacggttaaataaagattgattctgggaccaaataagcttcaagataattatttctcatggtagtgaatcagtatgtctcacaaatgcattcatcttttcatgttttcagtacccaaggtccttgatggatggattaatcctccttttcaccttgcttccttcacctgatccctcacctctcaatgaattgaaatt

SEQ ID NO: 596 - DNA, 4030 bp, Homo sapiens
gagtttcccacgtggatattgtgtacagggggtcgttttttcactgagtaatgcgtgagttttctatgagatggagctgccagtttcaggaaatgtaatgtcacccttgactctgccttctccttttaccagaaggatggccacagagatctacattagtattagttaggtgctttcatttgcaaagactagaactcctaacacaaataggcttaaataataaagggcatgtattgtcttatctaattgaaaagcacagaattagggctgacttaaggccaaacttgatctgttggctcaacaatatcaccaaggatctggcttctttccatctctccgttctgtcttatgctatctttcatatcctttggtgtctttatcaaaggctggcaccttttaggccctaatatgactgaaggagctcctggggctagatgcttccttcatcatgcccaacaggaaggaaatggcatcgtttccaggcactttcagcaagacctgagagtcactctgattggactggcttaggtcacatgcccatccctgaacccatcactgctgccacggaacagagaacattgataaagttgatttccctgaagccacatggatccccaaatggaattttgcagactgatggaaggaggaagtggacaacggatgctatattagtccgttttcacactgctgataaagacatacctgagactgtgaagaaaaagaggttaaattggacttacagttccacatggctggggaggcctcagaatcacagtgggaggtgaaaggcacttctttacctgacagcagcaagataaaaatgaggaggatgcaaaagtggaaacccctgataaaaccatcagatctcatgagatttattcgctaccacgagaacagtatgggggaaaccaccccgtgattcagattatctcccacggaatccctcccacaatacgtgggaattatgggaatacaattcaagatgagatttgggtggggacacagagccaaaccatatcaaatgctcagaaggcatatgttttggtaaggcatcaaagaaatgtttaccagagcactgaagtttccatagtctctcttttttgggcagtaaaggttctatatagctccaagacataatctttgatgctcagtctatgacaactcaaattctaggcctttccttggataattcagccactgaactaccttttgcttccctctgtagtctcttcttagttagtactctggacaaacttgctttgactttgtccaaagacacccattctttattagtatatgacgaattttgtggacagagaagagtgctatgggcatgatggcatacttaccacacagaatgatctagaactttgtagcaactaatgtcctaggccttttccagagctgctttcttcaaatggggcaacagacgtgatgccgcattttctaaagctcttcccaacctccaaaacagcttcttttctttctgctgaggaagctaaatttactttcagtcctcaaatggtgaaaaaaaggggagcctccccagatgtctcacactgataagaggaagaaatatccaaagccattagccagtggtgacaaacagtgtgtgaattgtaacggacgcagggtggctgaagaaaagactgagtggttggagacaggcaggcaggcctgagtttcaaatccttaccctgtcactttcagcactttgggatgctgaggcaggcagatcacgaggtcaagagatcgagaccatcgtgccatcatggccaacatggtgaaaccctgtctctactaaaaatacaaaaattagctgggtgtggtggcacgcatctgtagtcccagctacttgggaggctgaggcaggagaatcgcttgaacccaggaggcggaggttgcagttagccgagattgcaccactcactgaactccagcctgggtgacagaacaagactccatccccacccctccacccccaccacccccccccccaaaaaaagaggcaggatgccatggggttgaagaaaacaggccctgtagccaggctgcctgagtctgaatcctggctctactgttcaccaactgtgcctgcgttcatgtcccagctcttccattgactaagcctggatcaagaaataatccctgagttctaatctgtcattcaggtaattgcgttcttatgtttccttttgtcatttggccttccaacttagttgggatgatggtggctgtcactttatctctttggcctcaattgtttcatctgtaaaatattgatacaagtaatgtccacattataggttgttgtaaggattaatcctcatttaactcatttacaaattttatgcattatatatgtatatattatatataccttcatatatatggaaaacacttgtaacagcatctagtaagcacgaatgatgtggatagatagacatatcttatagggttgctgtaagccctagagactttgcatatatattgtctggcaatagcagacactgaataaatcttagctattattaataattattatgttgattgaactgtttaataataatgtgattcatctaaatagagctttatagtttctggagttcttgctgccaatatgatccttcttgagccctacaaccactcagtgatggggctcctattcctctgtccagtggctctcagggaagggttggatgcctctccagggtctcctggccaggtggtcattagcaggaccagggtgtgaatcatagtgaggagcttcccagtccagggcttgttccacatcctctcttcccccattctaaaggcctcccagccatttgtcacagcctcatttgaaatgcctgtgcttctcatctgtaatatcctgattgtcccattaatctcctttaagcttcatgaaaaatacaaggggctggatcaggaaatagccaccaagttctaattttgcattcaggggattgtcttccatggacgtgaagagactgatgtttcccatttggcctttgcctttccaactaagtcggggagagctgtcattttctgaattatcaaccagtttacaaggtggcatctatattttgcctctaatgtgtctgtacttttgttgcttctctatcttcatatcatcctctccctagtagatgttctacagtactgcccagagggagtggtaagaaatgtcttttgataaaaccttaaaagcttaaaacttccagtcactttcttttgcatattccttagaccctggccataggccagtgctcactacagaaggagcagtgtttgttttgttaacacacacacacaaacacacacacacacacacacacacacaccctgtactgcaagatcctaaattttagacttagttcactgttttatatggtagccactagacacgagtggttgtttaagtttaaatgaaattacaggttcagtttctctttgcattagccaccttttgagtactcaatagccatgtgtggttagtggctaccatattgggcagcacagatagagaacatttccatcaatcacaaagtcatatgggacaacatttaccataaaggggaaagggaacgggaatgggcacatgagtgtagtgttcagttaagtagcatcacgggacaacagatgtgaagtagtcctcttaactctctgcatgtatttcctctgtgatttccaaaggaccactaaccaggagaaataagaaactgttgttttctgacccaacaccagcatgcaatgaaagtaggatatttttcattctatagagaaccgtcaatgtgtattttgttatctgatttgaaccctgcacgcggacagcacatttcacgtgttttagcccatttgtggctggcacaggtgtggccagaaagccagcataggatcttgtttgtgtttaagagagaagttcagggagactattcaggcacattgtctggcaagtctagcactggtcaaaccctcataaatattcctgtccaatctgaacttgaaatgttcttgttgtggacac

SEQ ID NO: 597 - DNA, 4026 bp, Homo sapiens
ttgcctttgggtctgagaatccccaggagtgggaatccagaagatgtcagctctgtggcctgaactggaattccaactggatcatttcattccactattgattggaagaggaacagtaaagctgtggtgttagctggagtaaactggagttgagaaactcactgtgtatttttcagaaaaaaaaaataataataattcttaacaatctcaaactactctcaatattgtaagtcaccttgacagcacgaggacttgaatggtttgcctggagggctaacgatcttggctctcccaggtgcctgtccgcattgggagacggcgcaagctaagccagctgtgcatctctcctattatatcatggaccaggggaccatagacattttgaaagggaatgtatctgcctctctcacacttcagcctgcttgtgggatggcttggcccagacagcagcaggcactatgtcttttctaaatgttctgcctcttgatataagcaagcggtccgtgaagagatttatcagaggcccttgtgatggatacatgtcttcttataagctgatagtccaggggagactcctaaacaacaaagggaactgaaggcagactggcagcaattctagtgtcctacaaggctgtggcttgtcctgtgagctggacggcggggtctgaggcaggacgtcaggcagggccatgctgagagcatttcacatttattgaaagcctgctgtcctctgggcactgtgttttcctcttgccattccatttatccctcccagtcatgctccgctttatggatggagcagttgaggctcagaggggttacataaagcacccaaagacatatgggcaggaagtgacacaacctggatttgaatgcaaatctttctggctgtttccatattgtctcacagcctatcccagcatcgtgtgtgtgtgtgtgtggggtggggggggtggggggggatagggggtgggggctggtggtatttagggatgccctcttcttaaggatgtgtcctggggctaagtcattgttcttgggggtgcagggaagggacaatggatcggaagggtctcagtttgcctctggcctgtcagtgggccaccctcctctcctctgtgatgcaggggcagtgtggctgccttgccagcctgccctcctccagcctgctgggagcctcgcgtgagacaaccgatctggaagccccttagggaggacacagcgcaggagaggcagctgaggctctaaggacagctgctatcaactgccagcagccactgagggagaccctgggcctggcatggctacaaatgggctcagctccaagggaacagagaattgggccacatttgtctgggctgggtcagaaatggcagttcctgagcccatatcaccagctcccatttgcaaggctgaggaggtgcctgggcttgctgtgtgctgccttgctttcgttcccgctttttaaggcacatatcagcctgggcagctcttgacccacaaggtggactcttctgggccagccacgggcagtggccaccctgtcctgccaggccgcagaaaggccctgggccactcccaactggagccagtgctcctggagagagcagtgacctggaccagcagacctatggatcccctcttgctcctgcactcgcctgctccttgcagtgactcggcagtgggagtgggaggtgtcagagcaattaggcggaaactcctttcgtgcacctctaattttcgagctctctgaatctcattagttcccgggcttttctgctctgccctcctgttctttgcttgcagaaaatccagggggcagccagtcaccctgttgctggcggtgatgatgagaccccaggccagtggcacagaggcctcctgggaggaagtccctgtttgggcgcccagcactgttcagggcctcctctagtcttgttctactttaggccttaccttctcatttctgttgctggagcaaaaggctctgaattcagagttgggaattctcaggcctggtctgagatttgtctgccccaatgatgatgatgatgacgatgacgatcatgataatactacactaatagtagttaagagttaccaattgcctattctgtactaggagcaatttagacctcatcacatgtaattctaacaacatccccgcaagacaagcattatagtcctttcatagatgagaacatctgtgcttagagagattaagtaactttcagactcaaacagctggatggtgactgagctgaggtttgtacccatgtcttgatgactaagcccagctgtgcccaccgggacaccttgacctagtacttctgagagccccagggtcactattcagaggctcccagagctgccagtaccccagatcattgcggctccctcatcctggcagtgaggaggctcaggcctccgtgctagtgccccactccttgattctacccgtccctccctccctgtggcctgcagagattccgactgctgctttgtttcacccagagcacctcttctgggctgagtgctgtggaaagggccaggtaggaaaggagatttaaagtagcttgactcagtttctcccctgagtttccctttggagacccgagaaacacatctgggaagtgaatgggaagatgagaagaagtaagcaaaactgggaagagtgaaggccttggaagtgcagaggatgccggtcgtcccaggtgctccggggagtatttctgtttagagtggcatgtggagggagtgctctcctggtacagcaggcgtccaggcagagtgagactctgctagactcaactctttcttcttctctgaaggaatcagagactgaaacaaggatggcttcatcagtttggccatagcctggaaagactgggaaacccagcagctctctggcccctgggctcacagacgacatagttcttggaagctgtcatccctgcctgtgatgactgacctgcctcttgccaggcttccatccttgcttcaaggcctgctaatcatcagctccactgggagatctttgcaggctgccctggaatcatagctccaggcctttgttctagaacatctgttgcattgtattgtacctattgctttatatatttttcttccttttctccaagacaagaatgtgcactcattcaagcctgggatgggctcttcttatgtgcatattcagttccaagaaatatttaaactatcactagtgtaattcagcatccataatgagtttatactcttgtgtattgaaatcagatgactttcctgtctttgtggttcatattattaatattcttcttatcgctttgctctgcttagttctttttttatacatctttgcctctcacccccattttctgccttggcattcgtttgttctttcagcgaatgtccactgggcacctactgtgtgccaggcactgttctaggtgctggggatacagaaatgaacaggaaaattgattggcttatttatttgaaaaacacagaattagggttgactcagggtgaagcttgatccactggctcaacagtgtcacccccagagctcccatctccgtgggcactcaccctgtgggttaactgggtctttggggcgccatttcctggacatgcctcaagacttccctgaatgagtggttcatctggtaatgaatgaggccacacaggctcccttatacttgtccctggcgtgggagctgccttctaaggtttcataatgagaacatgcttttttaggggagcaggtgtgtggtagactctggactcctacgctgctgtcttctgattattcccagagaactgcacctctccgctctggttgggctgaggctgtttttgtcaccccacaggcctgtgttgtttgttcataaagcagagagacatctgtcatcctcactgagcccgacagatgccacattcaaagacccagcacatgcagcagcagcggtggcagcactgtcattgcggcgctcacacacacataccgacacactcgtttcttcttcc

SEQ ID NO: 598 - DNA, 4047 bp, Homo sapiens
atcggttctcagaactcatttgggaagtcagcggcaagttcacacaccaaggtgaaagcggcactataaaaggatggatggaggtacagtaaagaggaagaggaagaaaagaggaaacaaaacgtggccataaagtgtagcttctgatacatagtgaagggacagaaggtgaatccttgtaaagtggctagcctgtcgggagccacactatcacctgctccaagttacccctcctctgcccccaaccaaagaagattgtgcatgagagttctaccattgattgagagactctctaggatcataacatctggaattcagtcctgctttagccatcgtctatggtagtaagtgatcttgaagaagtcaactaaagcctcctcttcagaaggtccccagacaaagtatctaggttgctgaaggcttgggagtggaggatgcacatgaattgccattgcctgtcttgggttgggttgtggtacttttgaaggagacagtgacaaggtggctttgtttcctagggtggggtgctagagagtgagattgtgatgcttgtcatttggtccaattgctactgctttcagttgagcactggtgaggaaccttagttgattcttctatgtaaatggctcttgcacctcaattttcttggcaattactccccagctgtgcccttcttgctgcataaaacctcaatcaatccttcattaaaatgctacagaaactgaaagcttttcccccttgtttcctaatttttccccgagtggattggatttgttatgactcaaatggaaaaggactagctttgtaagcaggttcagattctagcccggttcctatttatttatagcccaaattatttcaacaactgctgtccagtaaaaactctgtttaatcagaggcaggtaaacgtgccaatttcatctcattgcctaagtagtctcctctgctgtggaggaggaggatgccactctgggtcttgtcccaggtgctgtggggctggggaccaaggcagttctagactggctacccattcaggcctggccactcaggttgtagccacttgtgtcatttggtaggaaaagtgagaagttatgagccagaggtttcaattatggttttgccacttactgattctatgacttataaggttacttagcttcttggggtcagggttcactcatttaaaaatggtgatgttactaactacaaatataaatgagttaatgtaagcctccagtcacagcttggaagacagtgttttctttctctttttttcttttcttttttctttcttttttttgagatggagctttgctctgttacccaagctggagtgcagtggcacgatcttggctcactgcagcctctgcctctggggttcaagagattgtcctgcctcagcctcccaagtagctgagactacaggcacacaccaccatacctggctaatttttgtatttttagtagagacagggttttgctatgttggccaggctggtcttgaactcctgatctcaggtagtccgcccaccttgacctcccaaagtgctgggattacaggtgtgagccactgcgcccggccgcacagtgatttcttaatttatggttcatggagattataaaaattggcattttaattataagtgattgaatgaagtcagacattggagaactgaataaatggacacatttattcaacaaaggttgttgaggatctgctaggtgtcaggcattgtgcaaactggtcgagagaataagatattctctctggcttcatagagtttacatggtcagagagcgaggacaataaacacaaaaacatatcgtcatgcatattgacaagtccattttaaaaagaacagggaactataggagagaagggggcaggagtgggaataaattgtactgggaagcagtcaggggagtttttcttgaggaggcaacatttgagctgagaccagaaaagggagcaggaattaactggacaaagacggggaggagtgtatgtctcactacaaagcaagaaagagctacgcacagtcaaggaaggagaagtgaagccagggagtctgaattggatggccaagccagtgactggcatgaaggaggctggagaggagggcaagagcatgtgggctttgtgtgccagagaaagtattttacatttttgcataggcaccatggaagtgttttaagcaaggaagtaatgtaattctatttactaggactagatgaagttgaattgaataaaaggttactaagggtgcaaatgccatttttatgggaagagcttatgcactcaccctgagggctggcataaggcaggagtggcattgagtgtccttggctgttcctggctttggtccctgctgtgtgctgcagcctcagtggctgcagattctgcccatctaaagccatggactttcccatgaccagggcccattttgcctttgggtctgagaatccccaggagtgggaatccagaagatgtcagctctgtggcctgaactggaattccaactggatcatttcattccactattgattggaagaggaacagtaaagctgtggtgttagctggagtaaactggagttgagaaactcactgtgtatttttcagaaaaaaaaaataataataattcttaacaatctcaaactactctcaatattgtaagtcaccttgacagcacgaggacttgaatggtttgcctggagggctaacgatcttggctctcccaggtgcctgtccgcattgggagacggcgcaagctaagccagctgtgcatctctcctattatatcatggaccaggggaccatagacattttgaaagggaatgtatctgcctctctcacacttcagcctgcttgtgggatggcttggcccagacagcagcaggcactatgtcttttctaaatgttctgcctcttgatataagcaagcggtccgtgaagagatttatcagaggcccttgtgatggatacatgtcttcttataagctgatagtccaggggagactcctaaacaacaaagggaactgaaggcagactggcagcaattctagtgtcctacaaggctgtggcttgtcctgtgagctggacggcggggtctgaggcaggacgtcaggcagggccatgctgagagcatttcacatttattgaaagcctgctgtcctctgggcactgtgttttcctcttgccattccatttatccctcccagtcatgctccgctttatggatggagcagttgaggctcagaggggttacataaagcacccaaagacatatgggcaggaagtgacacaacctggatttgaatgcaaatctttctggctgtttccatattgtctcacagcctatcccagcatcgtgtgtgtgtgtgtgtggggtggggggggtggggggggatagggggtgggggctggtggtatttagggatgccctcttcttaaggatgtgtcctggggctaagtcattgttcttgggggtgcagggaagggacaatggatcggaagggtctcagtttgcctctggcctgtcagtgggccaccctcctctcctctgtgatgcaggggcagtgtggctgccttgccagcctgccctcctccagcctgctgggagcctcgcgtgagacaaccgatctggaagccccttagggaggacacagcgcaggagaggcagctgaggctctaaggacagctgctatcaactgccagcagccactgagggagaccctgggcctggcatggctacaaatgggctcagctccaagggaacagagaattgggccacatttgtctgggctgggtcagaaatggcagttcctgagcccatatcaccagctcccatttgcaaggctgaggaggtgcctgggcttgctgtgtgctgccttgctttcgttcccgctttttaaggcacatatcagcctgggcagctcttgacccacaaggtggactcttctgggccagccacgggcagtggccaccctgtcctgccaggccgcagaaaggccctgggccactcccaactggagccagtgctcctggag

SEQ ID NO: 599 - DNA, 4025 bp, Homo sapiens
tgtgtatcaggtattttgtgcacattttcagtaattctccaaacaaccctgtgaagtagagggcactgtgactctactttttcaaggtcaaggtcacagagttggtcaatgcaaggctgggattggaatgagacttcaaaggccaagtcttttccagtagaccccgctactgcactggcctatgctgagtctctccacatgctccatgttacctgttgtgtgaacttggataggtcatctaccacagaggagcaagaggggaaacttcttcagggtttgcttggtccagtctcaacatgctgtggttctgcagttgagatgcatgttgaaatgcatttcatttgtatgttgactttttttattctaaaggtctttggatgtttaatttcaaacaaagagctagagattggagaggcatcaatctcaaacaggcagcggcaggggtgtttagaatgaacttgacagccctgcaagaaaagatgtgttcttatcatatgtggaagggctttttttttggtaggaaataggtacttggacatgtaaaaatcaggcattccagcatggctgtccccaaggcccccacctggaggcttagactgcagcttctgctgttttcatatctttctccccttttatcctctctgaatgtttccaaacccccaaaggacctgcaactttaaagagaaatattattgatgcagttgaatctatttttagcctgctggggttggtgcacatccaaagcagaagaatttggttttatatctattttatctacatcaacacttctttacctaaaatccattaaaagataacagaaacagagctgacttcagacgacattcaattggttcatattttggggggcaatatgtcatgccccaccttgctgtagctgagacatgcctttaacatttccaaggagccacagaaaaagacatagaaaaccttcgattgcatttagagattagaagaggatttttctcctaaatatggagctgtttccttgactcagcaggtatgtgagatggatatgaaagcaaaagatgttcccttgccatgaagcaagtatttttgagtcatagatcttattgatcagactcattcaattggacatttctcttgtgtgcacacatgttccctctctcctctgtctcctcctgcctcagtaacttgtagagagacttccaaaaagagagcaggtttttagagttgagagttaaaacttctggaatgttgttctagctcctggggttgggcagggaaaggtaatcctcaaatataggtggggcctcagaggaagtttggtgaatctgtcaactagaattttttcttgaaaattctcattgaagtaacctctatcctcaaaggattccaatatacatctagggttgaaaaggaatgaactgatggccttaatcagattgatttaatgagcatagggccagagccacaagagcccagactgggtttagagtagaggttcacacatggctgccagttagaatcacctacaagacatagaaaaaattccagcacctaggtcccccttcagagattcttattcagttggtctgagtgaggtctaggcttccatattttgtaaatcctcccagatgacttcactgtcatttccactctagagctgtgcttcccagactctaatgtacagggaaattacctgggattcttgttaagatgcagattctgaggacctagagaaatggcaagacataccatgttcatggactggaagactcatcctagtaatggtgccagctcacccccagatttctctacagatttaatgtaactccaaccaaaatctaagcaggactgtttgcagatataaacaaaccaatttctaaaatttatgtgaaaaggcaaagcaactagaataggtaaaataattttgaaaaagaagtgtatatttgaagaaatcaccaatcgccctacctgattttaacacttgctataaagctatagtaatcaagacagtgtcatattggcaaagggatagacacatagatcaatggagtagactagagtccaaaaatagacctacaacaaatatggtcaattgctttgatagaggtacaaagacaattcaatggagaaggagtcttttctacaatggtcttggaacaattggacatccaagggcaaatgaaacaaaacaaaacaaaaagctcaacctaaacttcatgtcttatacaaaaattgactcaaagtggatcacagatataagtgtaaaactataaagctttgataaaaacacataggagaaaatctttctgatctgaacttaggtaagttagacatgaccccaaaaagatgattcacaaaagaaaaatggatcacttagacacgtcaaaattagaaactattattctgtgaaagatactattatgagaatgaaaagataagctacataatgggagagaatacttaaaaatcacatatattacagaaggctttatagccaggatatataaagaactctcaaaattcaacaggaagagaacaagctacccaactggaaaatgggcaaaagacttgaatagacacatgatcaaagaggatatttggatggcaaataagctcagaaaaagaacatcagcatctttagccattagggaaatgcaagtgtaagcaatgatgagatgtgaacacacctattataatggctgaaataaaaataccaacaataccaagtagtgatgaggatggggggcaactggaactctcagacattactaatgggaatgcaaaacaatgttgctattcaggaaaacagtttagaagttttcttataaaattaagcatatacttagcatattaccagaaattcaatgtctagatatttaccctagggaaatgaaaacttaagtttacagaaaaaacattcatatacatgtttgtagcatctctattcataattacccaaaactaggaagaatctcagtgggtgaatggctaaaacaactgtgatacatccttaccatgaatacatgcagtagcaaaaaagaatgaactattgataaaagcaacaacttggatgaatctcaacaacattttgctcaattaaaaaagccagcgttaataggttacatattatatcaatttcatttatgttacttccttggataggtaaaactgtagtgacagaggacagattagtggttattagtgggtaggggtgataggtgtgatcataaaggataatgcaagatagtttttggggcagagttgttctgtatcttgattatggtggtggctatacaaattgacacatatactaacattcgtagaactttacaccaaaaataaaaaattaaatttactgtatagtaatttagaaaatgaaacttttgaaaagtgcagattcttattcaagaggtttagcaatggggcctgggactctgcatttcttataagctcctgagtgatgctggggctcttgggaacacaagtggagggggttaggctctacagaggaaacatcgtaacatgcagattcagctcatttcattcctacgctgagagacctttaacggatccatagttcttccaagataaaattcaaatattttatcacttcaaaaaacttaaagtaagctctttcccctgaaatctcccatatccctcagatcataccctacagcagtgtatattctctgctttgtttgtggcctagagtgctctctatccacccattccctggaggatgagtgaccccttagtcactggccagcttgaaaggcaccttcccagggaagccatccccgaccctgccagtccctgacacacccgtgcggaatgagggtgcaccttctaatgcagtatgcatgctattttgctctcatgttctttcacttttcagatgtttctctccctaggaacacaggcttttcaaagacaagatctatgtcttgtaggcccggtgaccagcatcatggcaaatagtgagggttgctgaggagcttacagaatgaagacaaactgactttatagaaatagtgaat

SEQ ID NO: 600 - DNA, 4051 bp, Homo sapiens
gttggaatgagattgctaaattagaaacaaaactggttaatgtcctacacgggagtcaattaataaactttgagattatcttttctcctgaacagaaaacatttgtatttctactaggcaaaatcctacacattaatgtgtaacttcacataatctggctatttagttggtagcaaatatcaagtcaacaaaggtacttactttcctctaggtaattaaatatttcttgggcaggctgttaaacattgctccacagatgaccttgaaaggacatgacacatttccattccattgcttgacccctgctaatagaaccaagtcttctcacccaagctgctcctctcttcctcttccatctctctgctgcatgcagggagcctggtgccttgcttccattttctcattggaaaaatgagggccataatacttgccttctccaccagactaattatgtccagttatgacttggggaaccaggcaagcgcatggaagaagatcacacaatcctggatccggaagaccttggcatccaagggaaaaacaggtgtgggcaaacaattgcaccaacatttggcaatggctgtggcaggcaagagcaaaggactgcggcgcctagagagaggagtgacttggctgagtaaaggaagagaaaaagattgagagaggaacactgaactgggatttccaagacccgtagatctgttggtgaaaagggagaagggcatggtcagcctggtgaactgcagatgttaagatatagggactaaaaagtaaggcactttccatttaatgtgcatatgctgagcttttgttatgtggcaggttctgtgtttagccctggggagtggcagcgatgggaacaatcgtgggcaaaacaggaaacaaattctagtccttttggagtgattccaggaggatgggggtttgggtggatttgagaggggaacaagggaagtggagtggaggcaaaagaggctggagagactggtcttgcactgagtgatgatatggttgatagctcctgaccaaacaattaatctttgttcagaactttccctttggaaagtctgtggctgccttctggggaaggcaaacaaatgtgaactcaagaagtttacaatttagctagggaaacaggatgtgcaaacaggaagaaccaactatgtgaaggtaggtaagataactgttgactccatgctttaaggaaaggagagctctttgtggcttgggtggtcagcaagaattttttaagcagagatactcttgattgggttggataaataaaagagcaaggaggacattgtaggaggggaattgctcccagcagagcctagaagcagagagattttccagggttcccaggagaagagattgaataagtgcagtgggccatgtggtgacacatcttgagtgtccagctggagaactggaagtgcatatcataacaggggtggaaaactcagaggttgatagggaatggtgaggttgcaatgaggggaccggtggggactttgaccagtggagcaagagtctttccagatgaagggagcagctgcctcacagctctggccagctgtggacatttggccagtttgtaatttgtcaaaagaagtcagaaatctgcattgttgtgaaatctccagattttttacatgttgtcaatttaattaaaatattaaaatcagcccaggggtcaagactgctgacccatgcatggggcctggggggaaacttgtggggctccagcttgtggcttctctgttggcggtgcagctgttgaagattcctacacacaggtgccacaggggaagatggcacaggaaaggagtgtggacctggagaatcaagtaaggagcaggcagcaactgaggcagggccatatgcaactgtggccaggggtcacatatcatactgagcagagttcaccttgcccgagaaccacaaacccaggacaaatagaagggaaacaaaataaaggaaagggagccagcgtgtctcgttcagtgttgggtaagtagtatgaatttggtttgttttcctggctgtctttaaagaacgctgggcggtgctagcctgtatttctgatgagaggaaggggatttaacctgtggttcaagtgcacttatttggatagctcagagtcttcatatggtgttgttgtgcaaagagcactggactagaagttgggagacctggattacaggaatgactggtgttagctgagtgccccactgtgtatcaggtattttgtgcacattttcagtaattctccaaacaaccctgtgaagtagagggcactgtgactctactttttcaaggtcaaggtcacagagttggtcaatgcaaggctgggattggaatgagacttcaaaggccaagtcttttccagtagaccccgctactgcactggcctatgctgagtctctccacatgctccatgttacctgttgtgtgaacttggataggtcatctaccacagaggagcaagaggggaaacttcttcagggtttgcttggtccagtctcaacatgctgtggttctgcagttgagatgcatgttgaaatgcatttcatttgtatgttgactttttttattctaaaggtctttggatgtttaatttcaaacaaagagctagagattggagaggcatcaatctcaaacaggcagcggcaggggtgtttagaatgaacttgacagccctgcaagaaaagatgtgttcttatcatatgtggaagggctttttttttggtaggaaataggtacttggacatgtaaaaatcaggcattccagcatggctgtccccaaggcccccacctggaggcttagactgcagcttctgctgttttcatatctttctccccttttatcctctctgaatgtttccaaacccccaaaggacctgcaactttaaagagaaatattattgatgcagttgaatctatttttagcctgctggggttggtgcacatccaaagcagaagaatttggttttatatctattttatctacatcaacacttctttacctaaaatccattaaaagataacagaaacagagctgacttcagacgacattcaattggttcatattttggggggcaatatgtcatgccccaccttgctgtagctgagacatgcctttaacatttccaaggagccacagaaaaagacatagaaaaccttcgattgcatttagagattagaagaggatttttctcctaaatatggagctgtttccttgactcagcaggtatgtgagatggatatgaaagcaaaagatgttcccttgccatgaagcaagtatttttgagtcatagatcttattgatcagactcattcaattggacatttctcttgtgtgcacacatgttccctctctcctctgtctcctcctgcctcagtaacttgtagagagacttccaaaaagagagcaggtttttagagttgagagttaaaacttctggaatgttgttctagctcctggggttgggcagggaaaggtaatcctcaaatataggtggggcctcagaggaagtttggtgaatctgtcaactagaattttttcttgaaaattctcattgaagtaacctctatcctcaaaggattccaatatacatctagggttgaaaaggaatgaactgatggccttaatcagattgatttaatgagcatagggccagagccacaagagcccagactgggtttagagtagaggttcacacatggctgccagttagaatcacctacaagacatagaaaaaattccagcacctaggtcccccttcagagattcttattcagttggtctgagtgaggtctaggcttccatattttgtaaatcctcccagatgacttcactgtcatttccactctagagctgtgcttcccagactctaatgtacagggaaattacctgggattcttgttaagatgcagattctgaggacctagagaaatggcaagacataccatgttcatggactggaagactcatcctagtaatggtgccagctcacccccagatttctctacagatttaatgtaactccaa

SEQ ID NO: 601 - DNA, 4049 bp, Homo sapiens
ataaaatttccaaaatattttgtttaacctgttcacacactttcattcatttttccccctctgagagtaactatttgtaaccccaactaataatgaacactagtgtttatgaaggatttactaaatgccacctacaataccaggtgatttttctacatcacctcattaatcctcatatccctactatgagagtaggtaccgcattcatccccattcagtggagcccataggggaggaaactgacgtgggaggctggctcagttcccttagtgatggcagtctgatggaggtgctgacccaagtggacaccaaatgttttgtattgaaacataatacagtgcagcattatggggcagggatggggagctgctggcccatgagctggatatagtcttgatgtgattttatgtcattaaggaaacaattactaagagtaacacaccctttactcctgtagtcataaatctgtagtctacttttaaaatctactgataagcttccaaaattatgggttcctttaagaaagtttctctttagttctaattttattattgttgtttgtttgattgttttcttttctgcctacatatgtctgattttctcttcacaactgcatcctagatgccttccttagtctcttctgcttctcttctgttactcttgttttctgcttctatatatttatctgctgttttcctttctgtacttttccctcttctgtctgtacccattagtatcccttaaatgcctgtgaaaaggaattcaagtgagttcttattgcttattgggtagaagagggttttatgctttaatttaaaaatggttgaggatttaatagtatttctgtctttaaaagataataacattacattgcttttttactttatttgtattagaaaaatattctgactctccattaggcagttgtccttgatagagtgggaaaaaggctcagaattccgtcaagcaggtgtatcaagaagttgctatttggtctgttgtctttcctggttattcattattcagtttaacacagaaatcattaaacatacactgttttctatggtgccaaacatcaaatgaaacatgcttaggcctgtgaaccaagaacttctagaaaccagacaattaccaagggcgtcaaaatgtctcatcttgttgcttgtaactgaacagtgaaaatgagcgtacatgtaggggccatggaatgaggattttaatttgaatcagaggatggggtgaagagcagtcatttacaatattacacaagtcatcttacaatgaataataattctatcttgaaattccacccttcctgccatgtgattataaatttgtttataattgggtaagtcccaccagtcctgtgagattgcaccatgctttatgtttgcatacagtgctttatgcttgtcaaggtgctctgccttctgctgtcttatttggcatctaaacatcctaaataccctgaaagtaatgagacctggagctaagagctctctttacaatgaggaagctgaggatcagagagcttatgtcatttgccttgactacagcaagttgctagtggctgtagacccaatgcaaaccccacccaaaccagagccccacccaaaccagggcttttctcttgaatgcatatggcaagagagagacatcccactgtccattgtgttgaaggtagaaaatgcagaatgtggcagagtgagctaacccgcttggtggccctcaccctggcaagagacagattttccttcctctccctgaagggttaagacaaagaaaatatctgaaacttttcctagctgagcctttgctccagaactcagacacttttgcgacggaagtggggcattggggaggcagaaaaagccaatacataaaaaagcagcaacctcaccacctcacctgggtccccatgaaaccattccacccagatgagtgagtcagtgggtgttcttttcatggcctgtcggctcggtggcacctgaggctgcagtgacccccagtgctgcttcaggtgaatgagcacacagagcattttcagaactatggcttactctctcagtgtatagcagtttaagtgctagggacttctctgaactcattgaaagaaataaagcccctctgtctttgtatccctagaattggaagctcatgtatttgtgatgctggaaagggcaaatattcattgaaagaaaatagctcacatttactgaggtctcactatgagccaggcacggagtgaagcaactggttggcctcaccttgaactctcacacccagactaggagctaggcactgtgataactgctgttttacacaggagggaactcgggctcagagtggatgaatgacttgctgagggttgcacagctattaagtggtctgcctccatagcctctacttcccaggatctccagcaagggatatctcctgaggcagtggctttcacactcttagaggcctggagctctgtgtacactaactgaaacctagctgctttggttagaggattggggtcaggaggagactgtatcctcatggcccagcaagagttccgcaaaacccttgggattctcagtagagcagatcaggatgctaatgccagccttctctggaagtctgtctctttgaagttgaggtcatttccaccacaccccagagggacccatctagtcgacgcctgcctgcctggccaccacttccctactggaaaatcatcatttcccatgttctagttggggaaggacccagcagctctttctctttggcccatctctcttccttttatgagccagctaaaaggaatcccccagaggtcatctttgtccttggcgtgggaaagagagaggccttgtcagcaggtgggggaggtaggaaatgctgttctcctgtgggctgaaggtcagtgaaaggtgagctggggctcctgaggccagcaggttctggcacagaagcagcccgggaggaagctgccctggaatgtgctgtggacagacctgcgtagatcccttctttcccacgtccaggctgtcccagcatctctgaccaggccaaggtcacctaggcgcaggctcttctccttacctcacagacaaaaagaacttagcactgtaatctaagtgttcccactcctcatttgaaaagggaagcatttcatttttatgtatgtatgtatgtatgtatgtatgtatgtatgtatttatttattttgagagggaatcttgctctgtcacccaggctggagtgcagtggcacgatctcggctcactacaacctctgcctcttgggttcaagtgattctcccacctcagcctcctgagtagctgggattacaggcatgcgccacgactcctggctaatttttgtatttttagtagagatggggtttcaccatgttgaccaagctggtcttgaatacctgacctcaggtgatccacccaccttggcctcccaaagtgctgggattacaggcatgagccactgtgcccggcctcattttttttttttaatgaattaaaaaaaaaaaaacttatgtggcagttgataaaataattattttgaaattagccacttatcttctagaaaaaaaaatgtttgttgctcttctgatattggtaggagtttcttcctcttccaaggtgactttttggataacaccctgaggggactacccttcatcctttatctccatcgcagccattccaggccttctgtgactcctgggataaaataaacattagtgggcactgttccattacagggttcccttttggtgtgttccattgttatctccccctctcccccaggacctattctcccgggaaatgataaacctgggggctttagtggtggagaaggtctacagagcccaacctcaacttaaaatttccccagcctcttttggaagccaactaggtacctgattttcctgagtgggacacggcagccccctgggtggtcatagcaccacagtatactgttttacttacctgtatctcttggccatgccagcagcaagagcctcttggacctagaatgaccaa

SEQ ID NO: 602 - DNA, 4060 bp, Homo sapiens
gaaagcacattgtcatatttttattcaataatcaataattcaataatcttattgagtatctggagagaccaggctctctgttgggtaattgttgatcaaaatggaatgagatataaatcatgtataaacacattgagtatgactgtgtagaagacaagtggcaaacattattcttctcttgtccccatgttacaggtgagaaaaccaaggctcagagaatctttaatagcttaggtgagatcacacatccaataagcatctgaactgagatttaaatctgggatctcatgactcgatgacccaggctgttttcatgttaccatggtgcttctcattcaagaatgagtgaaggaatgaatgggcataggaaagaatgaatgaatgggaagatctcaaacatacgtggctccagaaagagagcaaaccagaggcttgccatagaaagtgagttgtaagtcagcttgggcaggtagcaaatccctgaagccataaccatttgtccagtcgagcattcactatggtggtgagatggggcagtttcattgcctcccctttggggaccaccttgctacccctagtgtcatacctcagtgctctccagttatttccctctgtggcaagagtggctttattttcttctcttttgggtattacccaggacaaacagtggatgtgacgatggatggtaaaggtacgtcatcattccctctttgatgtgctttcatcataatgggcctatttggaaggtttccataagtacaggaacaatgcctctccactgggcttcgtcagccaccaatgatccgagcaccagggaaaaagtctggagtgatgctggctggtttccatggcaaccacggcttgcctcaaccctgcacacatgctgccctctttccaagtaggaatgtgtttatttattattggtccaacctgggagtgcctgtgcagctgcataggtgttgtccctacctctgccattgaggtcatgttctcaactgggagatgaaatcacagctgggtgatggaggcacggtatttgctccaccaggaaaagctctcatttaggcttcagatcttgtattgtccatcagcgtgatgccagtgatctccgcgggggttagagaggctgatctagaaccattagagtcagacaccatctagggtcctgcggtgaatcgcaaactgccccagagagctgatggtgacgcacaaatctttcataaacatacagcatgctgctgtcccttggagatgcccatgagctggctgagcacgcacaagcctgagaaactttaaacctgggcagtccaacaccggtggtcagtgagcatctgaaatatgaattgctgtgtgctgtaaagctgggagtagtagtgcacacctgtagtcccaactactttggaggtgaggcaggagaatcgcttgaggccaggagttcaaggactgtgcagtgagctatgatcatgccagtgcactccagagagaccctgtctctaaaaaagcaacaatgctgtaagtggaaatttagtacaaaaaaagactgtaaaaaaaccttattataatgtttatattgattacttattgataatattttgtatagattaaactccattattaaaattaatttcacttttttctttttacttttaaaaaatatgctttctagatggataatggtgatggctgagcgaccatgtgaatgtacttaataccactgagctgtatacttaaaaattacttaaatggtaaattttatcttatgtatattttatcatactaaaaagaaagcaaaaaaaaaaaaaaatctcgaggttaagcaaccatctctccaggcctcttcttcagcagtctggcccacatttctagaagcccccagcacacctgcacatttatttcacaggtcaagaaccagtcacaggtcggtcctaagccaattgttggcataagaatgagagcaccagggcttgctcagactaatcgaggtctgcccaggagtggggccagcatcagttttggtgaggtacctgcacccctgaacaaaatcagggttctctgaatgagggagggggatggaaatgactgttaggaggcaatcaacattataatcttaaagaaaaatgtacaagaaaattaatgtatgggagttacaagtgagagcaatctgaaaacttctttcctccacttggaatatatatatatatatatatatatatatatatatacacacacacacacacacacacacacacacacacacgtatatatatgtatatgtgtatatatgtatatatatgtatgtgtgtgtgtgtgtgtatatatatatatatatatttttttttttttttttttttgagacggagctttgctcttgtctcccaggctggaatgcaatggtgtgatctcggcttactgcaacctccaccttctgggttcaagtgattctcctgcctcaggctcctgagtagctgggattacaggcacccaccaccacaccgagctaatttttgtatttttagtagagacagggttttaccatgttggccaagctgttctcaaactcctgacctcaggtgatccacccgccttggcctcccaaagtgctgggattacaggtatgagccaccatgcccggccccacttggaatattatttgtctttaaatttgcatagagttgtaaataaaataagtgtcaaagaaatgtgccttctagaaaatttagaatgacctgtgtggtttgtcttatgtttcttctggacagcgatgctgataggggctcttctcctccaattacaaactgtcatcttggacaagctgcttcactgtgtctcacttgcttcatctgtaaaatgggaataatgataacacctgtttcatagacttgttagttaatacatgtaaagtgcttagaatgtgtctagcacatagcaggagttgaacaaggatcacctctcattaggggctgcagggggactggtggctgctgctgaagccttcagaacctcccttcacatgctcaccacagctcctccagcaggcagaaggcttactcggtggtgcagagaaattaccccaaaggaagcttttcatcagaggtggctgatgagtgcctgatggatgccttttcctccctagatggtcccaagatgactcttcctagatgaagggcctcctcctgagccttgttgtagctcagtggaaaataaataaagagggaacaaaaagtccacgaagaagaaacagtttgttgggtggcgcctctcagggccagtatgatttaattgacgtcaagcctgttatgagtactcatgtggctaggataagtggcattggaagccgggttgcccagcatccttgctctcagagccccacttgatgaccttcttaggggttagtgcctatcaggaggctgttttgagagtatctgtggggaagaagggctcagatttaaaactgattctaagtcaacaattcaaaaatataaacaagggaatttgtggttgctctcacaattaatttggaccagcagcccactggagacattgctgggaaccccaaggaatgtagggatttaaaaaaaaagtcattgaaacttagaccacaatcactgggtcccaacaggctctagtgttaattcaaattgctatctattgggtagagaaagagaatttcagtgccagaagctaccatagagataccttgtagttccaccttatactgccgagaaggaaaccgaggcctggagggagcccatgatgtgttcatgtttacaccgcaagttagtgttaaatattccattttttggaaggaattttacttacatgcatattttccattatgtttataaatttccccctattttaaattatccccattccctactaattgtatctttcattttttctttataaaccttataattctctaatatactatatatactttatttattttacttatcatctatcttcccctgtctccactaaaatccaaactaactccataaaagcagggctttttgtctgggtcactcctgtatggttgacacttatttcctggaac

SEQ ID NO: 603 - DNA, 4057 bp, Homo sapiens
agccaggcccatgctctaggaaagccctagcttgctttcttgggtctgctctgggtcaggagtttccctgagaaggatattgcattcggagtgatttctcattgtgattctggaagctgttttgtttgggccacctgtcctggcatgaagctagggctcagtcaagagtcatttggctcatagatggaaggagtagggacatcctgaggcctgcgaggctcaaagaccaggcagggacactggaaaacagtcattatctctgagtctcacagcaaaaactcagtgaagaggtgactgtagatggagggaggtggtgagaatttcacttctcagaatccttcttggggagaactcaatgttatgtctgggatcaatatcacacacacttttgtgggaaggagtgagagaatgaacgtggtgcttgagtaatcaaaggtgctggccacacagccttcaagaaagacaggttctgttcaccgagggatctgccgtgagctgtgtgctgaagggtctggttatgaaaccatggctgatgtcaattgatggcaaaatggaaagaggggacatttaaagttggagttttggaggaggagagagaaactggtgaggtcagtggctgcttggaggaaggcagagagggagacaattcagtctggtgtgacccaggagggacagtgtctagtggggacttggaggtgacttgctgttggctgagctgtgtaacagcacctctatctctcctcctgcctcttgactgaagtctccattgctctttcatgcttgaagaggagtggattctgcattggaaacttaagagaggttgaattctgagtctgggtattcatggggacaaaatggaggtagtgtattctatatgtatggtggtgatagtgaatggggagcagcagacagtttagctgcacaaatgtgacacttgttccttccatgtggccattatagacagttctaattttcttcatcagcattgcaagagttactgaacactaattctgggccaagtgtatttgtttcagctctggagaaaacaaggaaggatcctgattctattgcaccatatgcggaagttattgaaggaatgcatggaggataagtgctatgagtacaaacacggtgtgcacttgtggagtgtggggaggggctgtaggggaaagtagggctgatcagaaaagctttcatagggaggaaagtctttgaactaaaactcccatttcaagatgagctgctttatggcgggaagatataaaaaataaaaacatatccaggcttaaacacaagaaaatgaccactaggtgggctggaatttgtgaagaatacttaataagacagaatgcatttgcagtgagcttttaagtgtgagttaggatcttgagagttaaaggagaagaaagccttcaaagtgaggagcaggaaaaacagagaaggagcctggcgctctgggaaatggggggtgcagaccccaaagtctggggaagtgtcctggagacagcctggtggggctttaaaggccatgctaaagaattttggggccaggcgtggtggcttacacctgtaatcccagcactttgggaggctcaggtgggtggatcacgaggtccggagatcgagaccatcctggctaacacagtgaaaccccatctctactaaaaatacaaaaaattagccagtgtggtggcgggtgcctgtagtcccagctactcgagaggctgaggcaggataatggcacggacccaggaggcggaacttgcagtgagcggctctgctgagatcgccccactgcattccagcctgggtgacagagcaagactccgtctcaaaaaaaaaaaaatgaatttttgaagtttgtagaacaaggagattttgaggcagggggtgttgtacagagagagctgggggacaagtggagactgaatgggtgaggctagagcttggaggctataggacaagttagggcagtaagctactgctttagtgatggcatgggagcagattcctgatgtggtcctggtggggcacggtctgcactgacaccaagcagaagatgcaggtagcccatgtgggtgatatcatggaaatggaactcattgggcccagcacacccagcggccaccttgagactctcctggcaatcacactgttgaacgcctcttgtgatccaggcactgtgctaaccttatatgttatgatcagtttgaaggggaaggacaatgtcgtatttcttccgtatctccttattgctgttgtgttgtaggggttcattacaagaaaacaggccaatcttatcagtgaattcatctctgttttacagttgagaaaatcaagatatagcaagggcaattatttgtctaaaaacattcagctttgagtgacagagccaggctagtacctgccagctccctgtctcccagtctggtgctccttttgtgtcattacttcccagtcgaagataatgccttttcttttctaagccactgacagctgtcactttggctgtgacattttgacattaccatcttttagccaatttggtcctgaggatgcttggcctgcttgttaaacatttgcatgtagaagcatggtccactcaggcctctttgcctgagcctgcccaaggtgccagctgctctctgaaggtctccttggagaaaatcctgcccaggctgttggggccatgcagagcaagtgggacctgctgcacagaaagcaggcatctcagagctccaggcggtatcctgagaataggcctgccctttaggagcaggcaggtccctgcactgaacaaagaagagatttcacaattaagtaatggcgggcaagagaaagcagcactgcctgttcagaacccaaagctgtgtttgtcttgagccgtccaaatgtttatccctgcaacaatgggaccaaagcaagaccagacagctggctattcagtttcccgtttcaatttttaatttgttttccttgatgcacgctcaggagcttggcctcctcatctgggcctctatctcacctgtctaattgtcacaggtgtgaatctcgaagctgggacatcatgagtaaggtccagctggggaagaatttgccaatacaacctcagaatatctgtaggatctcccagacgagcacatccgttattcactaagtgtttactgctcatctgtacctggcactgttcaaggcactgggcataaagcagtgagcaacagagatccaggtgtgaattatttatattgataaactagatataaggatgcagagctcaatttaagaaatgacaaatgataattgccattcaccagtgctttttatagtcaacgcctggagcctgattatccacatgataaaaattccttgaccccccggctccagatctcagaatagcctgtctttgcctcctctctcaccctggcactcaggctcaactggccaaaaacagcaggactggacagagccttctcttggagcacgtggctgagggattctacattaaagtgaacaccaggctgtcaagagtactgcttccttttatttttttcttaactaaacaaatgtttattttctgattataaaagtaatatatgtttgctttttttaaaaaaattgaaatgtgctggaagacgtgctgataaattccactgtgggatttggagtcggctcatgcggagggaaatttggatatagcagtcaatgtcgtcaggatttctcttaactgtttgggtgtcattgaggactttgttcactgcatctcatgttacctgctttatgcacagactcatgggataagtagtgttttgcaccagagattgttgtggttttcctggtgaacatccagtgagcatgctaaatcgagaaagggatcatgtctctcagtggtggctgctcagagccaagtcggtggcttatggaaaatacagagtggctcaggtttgcgctctgtgtctttgcacccctgctctggcttgtcttcatcatctctcctctcattttccctttgccctacttttcttactcctatttggaatttacatgtatgcagttatgt

SEQ ID NO: 604 - DNA, 4037 bp, Homo sapiens
gtcatggaaactggcctggtttacccagacgtcagtgatgcctgggaaagctcttgcttttccagtgcccactgagcagagatttaatttactcaatcggtacgtgtctgttaagcacattgctgtatgccaaacactttgggcataaaaggtatataggccttgccttcaaggattgtccaggctaactggggcaatgcaacatgcatggaccaaaagacagctaagtacctgtcccatgtggaattgggggagcagatgtgggccctggagacaggacagggagagctttggggagatctagccaggaaggagaacttcactgcacctctgggatttgatcagggaggatgaagatggttggggagcaatggggagagcatcccaggagtgggaacagccagcacggaggtgtggcagtcaggaggaccaagtcatagccgagaagtcaggtggaagagcaggtcagtgacgagtggggagggcagccggcagcctcagctccaggccttgaagatcaggccttgaggagtttgacttctatgcttagggcattgtggacttggcaggatttttgagattccagaagatatgagcgaagagtgaaaacaaagcaggacagaacaaaaaacagaatttcttcatttattatttcagtgcactgtgaaatgctcaccgtgtgctaggtgctgttcaggctttgaggatgtggagtgggcaaatcaggcagactctgccctgactgctagagaataagcacacgtgtgtgatgaaggtggtagtggtgggaagcaaagaacagcagcgaaggggatgaccgtgttcccttccgtgtggggcactgggctgtgacttacattgctctcgggttactcatctttttactccaaattgcttggagtcctctgttgactctgaagggaatattcaaccataaacaattcatcctatctgctatctgtggttgaattctttcttcccagttgccccttgggtggtggcttggggccacggtaacacttgtagtatttcccgggaggttgttatagttctgtgcatttcctgcagtagtggtagtgaaggcattagatgccaggaactcaggcggttggtatggccctgagctctgaaaatgcttgccttcccctttcccctattgtgtgggccagcagcttgcagagctcctccagccctgagagaccatgcctccatccctcagaccctacctttcctggccccaaggctgcctctggctagtgtgacagacacaccctgggcccctgaagtctgaaagccacatttttcgaggggaacctggccactatgagtgtggaatattggggccttaaatttcctgcctgtagaatgaggcatttgggctaggggagtggttcctagactttttgtgggataatcaatgaatttttataaaacagaatatcacaaggccaccagctttttattttgacaagcaaaaacataaaaaaagaaactgtcaaatgccagctctgccaccattgtcatttcattaaaaggacatgttaatacccaacaaaggagtaacgatataatgtcaaagaaaaggacagttcttcctgggagaggcccttcatcagttgtcttccactgacacacacagtgcgctgtactgaggcttttcattccgtaccacatcaggggcagcactgccctgtggccatgcaggacccatgggaacagagcacctgtgagctacctgcaggagcctttgctgaggagagtgaggctccttgggggctggatcctcctcctggtctacaggatggcaatgggctccctccggtaaaagttaacttggcacgaagatttctgcattcttttatgaacatgagggtttgggatttcctgtgtgtttggttatccatatcccagtctgccctgatgagaaacaaatgtaatttttgccttcctgctgggcccctgccacagttttcttgtctgggcaggtcttgagctgagcttctggggcaggatgggctgccctgcagactggcagctgagtctccgagtctctgatggacagcaggctgtcttggaccctgccagggtcatcctggctgaggactctactaatccaattcaaagtctctatggctctgatagtggactctggactgtcacttatattttccaattttattaagctaattgaaagagaaggagattgttattttacaaatacggcacattggccaggatgtatgtattagccctgaaagtttggaggttgccttactaattttaggcagcatatgtggccatttgagaacatatctaatgtctaatgagcattgtattcccaggttggatccccgtcccctagcccatttctccaactctctgtccgtacatagtggattataactgaatttagatgtctgtactacaggattttgttacttagaagccataggttgtgagatggttgtttcagtagtagtagtaaacagaattttatatggagattccatctctgttcttgcacattggacctatcccaagacagtgtggaatagagagaaaaaatatggccttcagagttagaatggactagattgaaatttcagctctgccacttacaagatgggtaatcttggaaaattacccaatctctctgagcctcatgacattcctaccttgcagccaggcgtggtggctcacgcctgtaatcccagcactttgggaggctgaggcgggcagatcacttgaggtcaggagttccagaccagcctatccaacatgttgaaaccccatcttactaggaaaaaaaaaattactggagcatggtggtgggtgcctgtaatcccagctacctgggaggctgaggaggagaatcgtttgaacctgggaggcggaggctgcagtgagctgagattgcatcactgcactccatcctgggcgacagagtgagactctgtctcaaaagaaaaagaaaaaagaaaaaaagaaaaaacattcctatcttgcaggcttcttgtgaagattaagttggtgtaaaatcaccaaggacagaacacagtagatgtaagaggggatcagtgatctcctgagcaccagttgacccccttggtcctcagggaatgggagagcagctttgaacctggctctgagaagagctgaaaaggaatctgtcctgcagcatttcccgggggagggaaatgatgcttgattgacttgcccagggttacagagctgagacagtgcgtgcaaagtaagggacttaacaatccaggcctccgggtcagacagtttagagctggacagaccttggggagtgtttacatggctccctgcatttgagacaaagaaacctgaggcacaagatggtaaggacttgttaaaggtcacctggcctttttctaccatgaagacttccaaagagtagttgttcacacccagcgcaggggtgcttctaagagtgagaatctggacagggcacccagaaagcaatggctaaaaatgcctcaatggtggagcactgtaggtccagccgagacacccagtaaactcacagggctttctgacagctcggggtaatcggttaggtcccagcttctttataagttcctgttgcctgaatctgtggacagtgtgtcccttccctaaaggtacagcccacagttagcaaacacagtaactgctaggtgaattaatcagtgcaaatgtcttaagccctgctggtgcagagtctccggggtgcagagcaggagaagtgatggcagccagggagaggttggactatgcaacttcccaggggcagaagtgaactctgccactcctgacaccagctctaggaaagacctgggtcccctgttgccctatttctctggtccttgagtctcagagtaaccacctcctccatccattccctttgcagaactcttgccatgaaaaccccagctggtggtgcccatgctatgcttgatttgcttgagctgctttgggtaatctgcctaataccctaatatgcaggattattggtacctgggagaatgccc

SEQ ID NO: 605 - DNA, 4044 bp, Homo sapiens
aattttggaaaaaaaccttacttgagaaagaaggttctcacagctgccgagtctctctcgacgtccagggttggaggggtcccaggccatggagagaagattgatgggtctagcggagccaagtagagagttgaggctttgcagggccaggcgcttgccatccttaactcccattagggatcgagaaggaaaaggagaaggagttctctgaatccaatggaaaaagaagtcctgtctcctttccctgggctgttgaattgtttttatttcacattagcaactgctctggactctcttgtgtttggctgctgtgttggagacctagatccaaactagggtgtgtgggaacccagggacatagaggctgaagttttggaacccagccagttcttccaaggggtgaggtcagaggcagagtccagggagcagggcagctctgggagcctggttcctcaggctgggctgtgctcggagcggtagatcctgactgccgctgtatgcctggtaacctggccatctttctgcctcccaaagtctgtctgtcttgctagcccttggtttcctgaatggggatcatcttaagtgtggggaaaggctgtctgacgacctaattgggacagctcttttgacccgaagccaagccccatccaagttcagcaaatggaagaagcgggaacatgttcagttggtgaggtctataggcacagactggattaggtcctaaatcatggtggaaattttcctggcacgggacaaatccttttgtaaacaagaacattcatctttcttttgactgacatgcctggtagggcatgtgcctctcagaagctccatgtcatctgatctcatttgggatttagtgtttttatttgaaaatgtagctgccctgaggaacagcagttaggagccaacccccagtttaagcttcaagtcatggaaactggcctggtttacccagacgtcagtgatgcctgggaaagctcttgcttttccagtgcccactgagcagagatttaatttactcaatcggtacgtgtctgttaagcacattgctgtatgccaaacactttgggcataaaaggtatataggccttgccttcaaggattgtccaggctaactggggcaatgcaacatgcatggaccaaaagacagctaagtacctgtcccatgtggaattgggggagcagatgtgggccctggagacaggacagggagagctttggggagatctagccaggaaggagaacttcactgcacctctgggatttgatcagggaggatgaagatggttggggagcaatggggagagcatcccaggagtgggaacagccagcacggaggtgtggcagtcaggaggaccaagtcatagccgagaagtcaggtggaagagcaggtcagtgacgagtggggagggcagccggcagcctcagctccaggccttgaagatcaggccttgaggagtttgacttctatgcttagggcattgtggacttggcaggatttttgagattccagaagatatgagcgaagagtgaaaacaaagcaggacagaacaaaaaacagaatttcttcatttattatttcagtgcactgtgaaatgctcaccgtgtgctaggtgctgttcaggctttgaggatgtggagtgggcaaatcaggcagactctgccctgactgctagagaataagcacacgtgtgtgatgaaggtggtagtggtgggaagcaaagaacagcagcgaaggggatgaccgtgttcccttccgtgtggggcactgggctgtgacttacattgctctcgggttactcatctttttactccaaattgcttggagtcctctgttgactctgaagggaatattcaaccataaacaattcatcctatctgctatctgtggttgaattctttcttcccagttgccccttgggtggtggcttggggccacggtaacacttgtagtatttcccgggaggttgttatagttctgtgcatttcctgcagtagtggtagtgaaggcattagatgccaggaactcaggcggttggtatggccctgagctctgaaaatgcttgccttcccctttcccctattgtgtgggccagcagcttgcagagctcctccagccctgagagaccatgcctccatccctcagaccctacctttcctggccccaaggctgcctctggctagtgtgacagacacaccctgggcccctgaagtctgaaagccacatttttcgaggggaacctggccactatgagtgtggaatattggggccttaaatttcctgcctgtagaatgaggcatttgggctaggggagtggttcctagactttttgtgggataatcaatgaatttttataaaacagaatatcacaaggccaccagctttttattttgacaagcaaaaacataaaaaaagaaactgtcaaatgccagctctgccaccattgtcatttcattaaaaggacatgttaatacccaacaaaggagtaacgatataatgtcaaagaaaaggacagttcttcctgggagaggcccttcatcagttgtcttccactgacacacacagtgcgctgtactgaggcttttcattccgtaccacatcaggggcagcactgccctgtggccatgcaggacccatgggaacagagcacctgtgagctacctgcaggagcctttgctgaggagagtgaggctccttgggggctggatcctcctcctggtctacaggatggcaatgggctccctccggtaaaagttaacttggcacgaagatttctgcattcttttatgaacatgagggtttgggatttcctgtgtgtttggttatccatatcccagtctgccctgatgagaaacaaatgtaatttttgccttcctgctgggcccctgccacagttttcttgtctgggcaggtcttgagctgagcttctggggcaggatgggctgccctgcagactggcagctgagtctccgagtctctgatggacagcaggctgtcttggaccctgccagggtcatcctggctgaggactctactaatccaattcaaagtctctatggctctgatagtggactctggactgtcacttatattttccaattttattaagctaattgaaagagaaggagattgttattttacaaatacggcacattggccaggatgtatgtattagccctgaaagtttggaggttgccttactaattttaggcagcatatgtggccatttgagaacatatctaatgtctaatgagcattgtattcccaggttggatccccgtcccctagcccatttctccaactctctgtccgtacatagtggattataactgaatttagatgtctgtactacaggattttgttacttagaagccataggttgtgagatggttgtttcagtagtagtagtaaacagaattttatatggagattccatctctgttcttgcacattggacctatcccaagacagtgtggaatagagagaaaaaatatggccttcagagttagaatggactagattgaaatttcagctctgccacttacaagatgggtaatcttggaaaattacccaatctctctgagcctcatgacattcctaccttgcagccaggcgtggtggctcacgcctgtaatcccagcactttgggaggctgaggcgggcagatcacttgaggtcaggagttccagaccagcctatccaacatgttgaaaccccatcttactaggaaaaaaaaaattactggagcatggtggtgggtgcctgtaatcccagctacctgggaggctgaggaggagaatcgtttgaacctgggaggcggaggctgcagtgagctgagattgcatcactgcactccatcctgggcgacagagtgagactctgtctcaaaagaaaaagaaaaaagaaaaaaagaaaaaacattcctatcttgcaggcttcttgtgaagattaagttggtgtaaaatcaccaaggacagaacacagtagatgtaagaggggatcagtgatctcctgagcaccagttgacccccttggtcctc

SEQ ID NO: 606 - DNA, 4045 bp, Homo sapiens
cctcatgtgaccttcatgccagtccccctggtgccaccccacctcagtgcagtagctgagcagtaacagagggacagccagtttccctctgtccaggggagattgtgggtcttcaggtgagagtgtggcggcactaacaacagcctagtcacaattcattagtaaacttggcattcaggttactgacatttttgcaaactgcactttctaacaattaccctctggttaaaatctgtatttgtagaaggaggccagtctgaaaaggaatgaggggaagaacgacttcccctggagaagtctgaatgaggtggccctctcttctaaaagaaaggtgtgtgccttttgagatttcaattattgagccacttccatcgggagctcttcaattatttatactgggtgtgttgcaagtagattcaccaatttagaaagttgggggaaagaggggacatggtaggagggaggcccccgtggatgcaagtgtgtgggcaagtccttttggcttcctcttggctctttttctggatccaacttcatcgtagggctggaccagccactttgtcaagggtatcctcctcactgaggtctggagatggggacagggtgtggatgcccctgggtgtagggaaccgacacttccagacactcggtgagctctgtctgggtggaaaacctcatcagaagccagattgaatcacaccagtttctaagacattcctcaaccatgttaggcaaaagagtcccccactgacaagctggggtagaaggaaacctgatataattttggaaaaaaaccttacttgagaaagaaggttctcacagctgccgagtctctctcgacgtccagggttggaggggtcccaggccatggagagaagattgatgggtctagcggagccaagtagagagttgaggctttgcagggccaggcgcttgccatccttaactcccattagggatcgagaaggaaaaggagaaggagttctctgaatccaatggaaaaagaagtcctgtctcctttccctgggctgttgaattgtttttatttcacattagcaactgctctggactctcttgtgtttggctgctgtgttggagacctagatccaaactagggtgtgtgggaacccagggacatagaggctgaagttttggaacccagccagttcttccaaggggtgaggtcagaggcagagtccagggagcagggcagctctgggagcctggttcctcaggctgggctgtgctcggagcggtagatcctgactgccgctgtatgcctggtaacctggccatctttctgcctcccaaagtctgtctgtcttgctagcccttggtttcctgaatggggatcatcttaagtgtggggaaaggctgtctgacgacctaattgggacagctcttttgacccgaagccaagccccatccaagttcagcaaatggaagaagcgggaacatgttcagttggtgaggtctataggcacagactggattaggtcctaaatcatggtggaaattttcctggcacgggacaaatccttttgtaaacaagaacattcatctttcttttgactgacatgcctggtagggcatgtgcctctcagaagctccatgtcatctgatctcatttgggatttagtgtttttatttgaaaatgtagctgccctgaggaacagcagttaggagccaacccccagtttaagcttcaagtcatggaaactggcctggtttacccagacgtcagtgatgcctgggaaagctcttgcttttccagtgcccactgagcagagatttaatttactcaatcggtacgtgtctgttaagcacattgctgtatgccaaacactttgggcataaaaggtatataggccttgccttcaaggattgtccaggctaactggggcaatgcaacatgcatggaccaaaagacagctaagtacctgtcccatgtggaattgggggagcagatgtgggccctggagacaggacagggagagctttggggagatctagccaggaaggagaacttcactgcacctctgggatttgatcagggaggatgaagatggttggggagcaatggggagagcatcccaggagtgggaacagccagcacggaggtgtggcagtcaggaggaccaagtcatagccgagaagtcaggtggaagagcaggtcagtgacgagtggggagggcagccggcagcctcagctccaggccttgaagatcaggccttgaggagtttgacttctatgcttagggcattgtggacttggcaggatttttgagattccagaagatatgagcgaagagtgaaaacaaagcaggacagaacaaaaaacagaatttcttcatttattatttcagtgcactgtgaaatgctcaccgtgtgctaggtgctgttcaggctttgaggatgtggagtgggcaaatcaggcagactctgccctgactgctagagaataagcacacgtgtgtgatgaaggtggtagtggtgggaagcaaagaacagcagcgaaggggatgaccgtgttcccttccgtgtggggcactgggctgtgacttacattgctctcgggttactcatctttttactccaaattgcttggagtcctctgttgactctgaagggaatattcaaccataaacaattcatcctatctgctatctgtggttgaattctttcttcccagttgccccttgggtggtggcttggggccacggtaacacttgtagtatttcccgggaggttgttatagttctgtgcatttcctgcagtagtggtagtgaaggcattagatgccaggaactcaggcggttggtatggccctgagctctgaaaatgcttgccttcccctttcccctattgtgtgggccagcagcttgcagagctcctccagccctgagagaccatgcctccatccctcagaccctacctttcctggccccaaggctgcctctggctagtgtgacagacacaccctgggcccctgaagtctgaaagccacatttttcgaggggaacctggccactatgagtgtggaatattggggccttaaatttcctgcctgtagaatgaggcatttgggctaggggagtggttcctagactttttgtgggataatcaatgaatttttataaaacagaatatcacaaggccaccagctttttattttgacaagcaaaaacataaaaaaagaaactgtcaaatgccagctctgccaccattgtcatttcattaaaaggacatgttaatacccaacaaaggagtaacgatataatgtcaaagaaaaggacagttcttcctgggagaggcccttcatcagttgtcttccactgacacacacagtgcgctgtactgaggcttttcattccgtaccacatcaggggcagcactgccctgtggccatgcaggacccatgggaacagagcacctgtgagctacctgcaggagcctttgctgaggagagtgaggctccttgggggctggatcctcctcctggtctacaggatggcaatgggctccctccggtaaaagttaacttggcacgaagatttctgcattcttttatgaacatgagggtttgggatttcctgtgtgtttggttatccatatcccagtctgccctgatgagaaacaaatgtaatttttgccttcctgctgggcccctgccacagttttcttgtctgggcaggtcttgagctgagcttctggggcaggatgggctgccctgcagactggcagctgagtctccgagtctctgatggacagcaggctgtcttggaccctgccagggtcatcctggctgaggactctactaatccaattcaaagtctctatggctctgatagtggactctggactgtcacttatattttccaattttattaagctaattgaaagagaaggagattgttattttacaaatacggcacattggccaggatgtatgtattagccctgaaagtttggaggttgccttactaattttaggcagcatatgtggccatttgagaacatatctaatgtctaatgagcattgtat

SEQ ID NO: 607 - DNA, 4046 bp, Homo sapiens
tttcggagtcttgctctgttgcccaggctggagtgcagtgatgcgatctcggctcactgcaacctccacctcctggattcaagcgattctcctgcatcagcctcatgagtagctgggattacaggcatgcaccactacgcctggctaatttttgtatttttagtagagacggggtttcaccatgttagtctggctggtctcgatctcctgacctcgtaatctgcccgccttggcctcccaaagtgctgggattacaggcatgagcactgcacccggcctgttagtagtattttgttacatcaaattaagatacattttcaacagaaataggaccatttctcttgcccataaattctttttgatgatttgaagatttaaaaagtaatacaagaaaatatactattgataaaaatttcaaataatacagaagtacacggagggagaagaaaaaggggccctttctgaacctcccttctcacatctgaaagaaccctggaattggacagacctgaattcaaatttagatgtcgctgctgatcagttttatgatgttgcgagtcttgattgtctcatatgtaaagtgactatgtcaacaatagccttgtaagattgtggtgaggaaaaagtgaatgtgtgcagaggcctggccggtggcaggcactgtgacaattatcgtctttgttggtaggttgattgcctgttctctgtgtcatgtgtacccagcagactccagttgatatcaccctagaaaacaatttcctcattctgataaatgttggcccttttctgcaagattgctttaaatttggagccgatggaatcacaaggctgtgacctctccatgcaggagacagtgtttctagcagcttgaggggctgcagctgccccaccgagcttcaacgggtgtcctggtgcaaggttgtcctactttttgagtagcaaggtcttttcacccctttatgagaatgggcacactctggatatctatttctgagaactctgacactggagagaaaacaatcagttgagagaaatcccagcttggatgggcattcactgaacatccccttggaacatcagcctgctcaaaattttaggcatgacaccgtaaaccctgctatttatattgcaccagattctgcaaatatctttagtaacactaagccctcggttgttttaactgcgtctctaattataacctttttaatatttacagtggtgtcatgccatcctgattaaagtgccgtggtgagagatgctgttggcacctagtagcagcattgctgatgagaaggtgtcactaaagctgaccttccatcacttcttaagtgagccatcatttaggatggacacagaggtaccaatgagcccctgttcttgatcccaggatccaaaacctctcaggtgaggcatctccttgtgtgttcttcaggagccagcatgctgtgtgattcctagggagccagaggaagccatgctcttgtgatggcatatttatttcattggcctcatgtcatttggtctacctgatcagcagctgctgtgagtgtgcctgaaagagtggcaggctctgcaagagctccgtcagcaagtagaaatgctaaattatctcatgtgtttatcaaaggtttattgagcaccttttgtggcagaaacatgggctataataataatgaccattgattgaatttctggtgggagatgggtactggtggagaccagtttgagctcatgatgtttattaggaatccacctctgagaagggagaggcagaggccagagtgacaagagggacaagtcgagagctgatgcagcttccacaaaacctcggccaacccagcagacaactctggagtggatttatccaacagagatgatccctttgggcccaaattgctgtgcttctgtaccccacctcactctgtcaccagatgcaggctgtcccaggaagggtgaccttggctgaagctgtagctgaggctgagcctgaaggaaccgacagctgggggctgtttgcaaagccgtctccctgaagctgggcctcaagtccttcttcgaggtgaggttgggggcagcacatctccatggcatgcagagcttgatgaggagcttgagtttgacctgaccctgaagggcaagtggggctttggtaggcagagaggagcaggaagaacttgccagctaagcaaaacagtgtgaacaaaggtatggaggtagaaagagaggactttgtaaggaagtgccaatatggaaaacattgcagtgtggacgcctgggcagagaggctgtcaccttgagaaatggccaggggccacctctagggtgaccttctctggtgttactttctagctatcttctgaagcctgtctttcctgcccactctaaggaagtcaggtcaacttagggatgtgtcttcccaagtgacccccattggcctttgttggttgtcctccaagttattgccttgggcaactgggcagattatctgcatcttcttgcacagagtatggattttcaaggctcagctcatccttgactaagattgaggtgacttctagggcggctgaccggggccttgagaatctccctgggccctttcattcatttctcttcatgggctcttttggggtgggtgccaaggatctgggtacagcttccctaactcccaagcttggagaggccactctagctcttggactggcatctgggccagaagctaccagctaggcaacccatatttgctgggcatctaatagcccctcagatggtgaaaggctggtctttggcctggatggcttatctgtttcctcagacagctccagactgaagggacttcataggcagtgactctgtttagtttcactggtggtccaagggcctccttagctaggccctgggggaatcaggggctgtaagagtgggacaccgaacagaagtttcatctcatggaggcaggatttagaaagtgtagatctctttgaagagaggtttcagggagagaggtttcagggattagggtccagccagctccctcccgatgccagccttacctgctaagtgccttctaagctttcccactcaccctgtctgtgtttccagcctcttgtgtttatctctctctccagcccacactgccttttggccgaaaagggccataccttgagtccctgttgcatgaagttggatttcctttcatgtgtcctcagaggccctggcttgggtgttgtcatggcattttgtgatttgatggaggaggagagatagagcggccccatcgcctgtttgcgctagcctctctcagcttgaccgatgactgtgatgacatctgtggacagtaagcaggtccctggtgggattgagtttcctgagctattccatatcagcattcgagaagccagtacactggctgctaattgtgctagcttgtacctggggctgggtttgggtttcaggtccctcccttcctccctttctcccaatgcttggtcttattaggaaacattgcatcgctaaaataacaattactctacagatagagtaatagaagtgttcaaaggtagggttaattagaaactttcattaaaggaccttggaccttgttgcaattggtcattcattgatatttttctgatcaacaaatcaaccatagtttcttttgaataattgcaagattttttttatttttcatatgtgtgtgtgtgtgtgtgtgtgtgtgtgtgtctgtgtatgtgcgtgtgagagagagagagagagaatatggacgatgcagaggtggatggaggattattttctgttaaaatccccagcgtggctcagctcacctgtggggcctgcctcagctctgcatgccagctttgggctgccagatagtcttggagcttgccttatagaaagtggggatcctagccccatttttttcctgtggcttccctgggtttttctgaacatgaacaaaccttgctttccatctctaaacgctgctgggtggtccttgccgttgggattctggaattctggccctgtctggggtgagccttgggcatcta

SEQ ID NO: 608 - DNA, 4035 bp, Homo sapiens
gagctttattaggtggaaccagagctctcttaatctagggctaattttttcccactacagagacgctgctattctcagtactctaccaggtgctctgtgagcttgaggtttccactctggctggtgggaaggtgaaccgttcccagccctgtataaactctgggaaatgttctgtctgctcctttagggtgtttctctcccccaccttggatagctttcacacatgcctgtgtccaccaatacttagctaaagactcaagggggtccctctgctgacctcaagtattcactgggcagttctttttgctgccctggcctgtgaattccagcctccttggccttgctggaatccagccttcatctcctcaactcagggagacatctgggccctgctggggtcctccttctttctgctgtgacttggacgctctctccagacaggaagttgaggcaactgtagggctcacttcgtttctcctctctcagggattgctgtcttcccctgactgagctccagtgtctgaaaatcattgtcttgtctgaatttttagttgtttcaggtgggaggagagatctagtccatgctacttctttggagaatctttgaatggtgagataagattatttatttatttatttatttatttatatttatttattttttacctctagcattctggaacttcttgtgcttgttagaatttctcagtgggtgtcagaagatggatgctgtaatctgtattctaatgatgtcgtggcttatctctggaaatactcttgattggattttaaaactgagtgcttaggagcccttagagaggcaaatgctggtcacaggggccaagctagactctatgcaaacaggtcaggctggaatccccagttatcaagggactgaagttaacctgaaacgtttcctttaccatgacttaacctaaggtgcatgataatgagtgttaactgggtaccaggcttgcctttacaccaggttctgtccttatagcaaccccgtcagctaggtacccccatccctgttttccagatgagattaaggaactttcccaaatttagggtctgaattcacatctgctcacccttaaatgagatgccgcattgggcagcatctttcttatcatcttgattagggaggatccaagagctggaacttgaatatgaatcagtaaaacaaaaacaaagaatcagacacaagataaaggatccctctttgtccctgaattgagataagaaaacatcatcagaagcagatggaggctaagtactgattcccagaaaaggcctcatttttagaagggtatttagagattattcagtccccaacttacagctgtggttggcagaagccaagtggccaacagctcttgaggtggtgtcatactcatgggcagacagaaacttccctgacaggattttcccttaaacctccatcgcatgaaaggactttttttgcgcatttataaagtgtataattactatcccagtagctagatgcaaccttgtcaattataaataaatcatcacctcgcctcctcatcaccacccaaatgtctttcacactccaatttaattaactcacttactttattctctaataaactttcacaaaagttaaccccccattcccagctccatctagcaaagaatgctggctggatgtcagccatgttttgggcccccacctgaatctccgcctcaaatgtaactcaaatgtgatcatctcccccatctggggtctcacatgaggacatgaggtatgggacatgaccaggaggcatggccagtcttactgtctggattgccctgggggtcatggcaggcgaaaagatcagagaatgagaaattccttcctccttccagaggccaggtgggagggcgggggaaagggcagggtcttgttgaattttgttaaaaagcactttgctctcttggaatgctatctcatgtctaaagcagccaagatcattaagtaaatataggatctgtgcttttattttcactgctattagcaaagtttgcaggaggaaagagacattgaatggggagtttcatcaaagccaggggtgttccacaggaaaatacttgttaggcctagtttcctgtggtgaaagtcttatacatttcaaatatgttttgtgactctccacaaactttttgtttcctgcaggtttgtaattgagatatatgccctggggagaaaaaacatccaggcatccaggtccttagaaatataggtgccctgataggactgtagctggcagacttgcccataaaacaggtgaggcaggtgcttgaacatgtgattcacatgttgcatagactgcctactcctgggcaggggcacacttggcctgtatttgaatacacctagacttcaaactcagtttgtgaatcacctcctttggaagctgtccttgcaccctaggctggaagcgagctttcgtcctctgaacttcaattgccctgtattcatacctctgtagttcgggctctgctcactttctacctgggatttgagttggtacatgccttctcacctactcgcctggactggactctcctttgaagacagggtcgaggttgaagtcatctttgtgacccctgcagggcattgcacatagcagatgtgacctctcgctggtggtcagatcaacttcaggggcacagggttcctctttttatctgcccgatggcctttgtctagtgtattgctcaggatgacaataagaggaagattctccccctgtttaattccgggatgtcactggtcaggctcctcttgtatctcaggggtccagggctgagggctgtggcttcagctgaggctctaggctaagccagtagggcttgtgtcttgtattattctgttctcatgctgctagtaaagacatacctgagactgggtagtttccaaaggaaagaggtttaatggactcacagttccacatggctggggaagcctcacaatcatggcagaaggtaaatgaggagcaaagtcacatcttacatggcagcaggtaagaaggcatgtgcaggggaactccccttaataaaaccatcagatctcatgagacctattcactataatgagaacagtatgggaaaaacatgcccccatcattctgttacccctgactgggtccctcctacaacacatgggaattattacaattcaagaggagatttgagtggggacacagagccaaaccatttcaggtctactactttggtaacctcctggaatgagtctcatggggcccttctatcccctgtactcatgatagtatgactctttgggtgggtctgaggctggacatgactggtggtgaaacccaaactcttattagagaaagtatatcctcttactagtgagataccttaaagttttgaaaaggaggctttttatgataataaaattatgcttttatgggagaaaacttggcaaatacagaaaaattataaagagaaagcaatgtctgtaattctgcaatgcagaaatcacatttgggtgtattttattattatataatgaaatgttattctgaaaacttagattggttaatatatataaatgttaatatgtatattggttaatatacataatatatgtaaagctttaaaatatacttagtttaaaaaataaatctgggtacagcggctcacgcctgtactcccagcactttgggaggccgaggcaggtggatcacctcagggcaggagttcgagaccaacctggccaacatggcaaaaccccatctctactaaaaatgcaaaagttagccaggcatggtagcgggcacctgtaatcccagctactcgggagactgaattaggagaatcacttgaacctgggagacaaaggttgaagtgagccaagatcgtgccactgcactgtgtctcaaataaataaataaatgaataataaagccaggcatggtggaggaccacttgagcccaggagttggaggctgcagtgggctgtgattgcaccactgcactctagcctgggtgacagagtga

SEQ ID NO: 609 - DNA, 4027 bp, Homo sapiens
tattttgtctctatgtaagcacatgcatttctccagaaagaaagttgatatcttcagattctcaagttggtctgtgccaccaaaagattcaacataatcaataaccagtaatccaaccagcttatcttaaacatgggaagtctcagggctcagagaaacacccatagcgacagtgtctatactcttggtctagggtcctactggatgttgtccttcaactgtcctggaagatccagcctgttaggagagtcccctgtctgttccctgcctctccagaatcaactgtgtcccatcttcttggtcagctttccctgatctcaagcacacagacctgcttccacagtgcacttctgcagcctggggaaaccacaccatggatgtggatcctggtctagatgcgccacatagtgctcgatgcaggcagagctggcactggaaagagggcccagtctcctccatgcagcctccctccttcagcaaacatttgccttgcacctgccatatgccagacgttttgctaactgccggggatatggcactgatcaagatagatgatgtccctgctgtcacggaggtagaagtggaaacagaaaacaaacaagagaacaaatgcagcaacaaggtcatttctgattatgataagtgtggagataatagagtagggggctggcagacagtgatgcgggtagagtctgggggctacttttgatgggaaaggtttctctccggaggtcctgtgcaagctgacatgagaaggatgagaaggagccagctttccaaggtctccagagaaagtatgccacatggggacaaaagccagtgcaaagtccctggggtgggaatgagcagaggaagaagaatccatgcctatgtggccaaagacgaatcctgcctcacagtctttgactcttttgacttcccctgtcgtgcctcctgcagactcttcttgcttccctgggagaatgggtggcaaagagtgccttccttagccatgcttccttgtcagcacagtgcctggcaggtggctggaagctacagctgaatttttgcagtgtctttgagatgccaggaggatggcagatcatttctgttcaattcatcagccacacaaaagccctgagatcaaagagcatgggcttaatttattttgtttattttgcagaggaaatagtgcttccttggactgaaagctctgaggactaagagctgaatggaaagggggcgtttggattaaatgaatgggctggccagctctgacccaatttccacccagtgcagcagtgatgggggagggaattgccttctggctctctgctctggcccaggggctggtcatttctcaggtctgggccttctgtgtgagtcaggtttgatggaagtgtccttgaaggtgattcatggggaagagaggaggggaaccgggagtagtggcctcaagccctgcctgagttcatccttggatccctcagcctttcttgacactagctcatcaccttagcaatgaggacaggtgcagattcaggtgaagctcacctacatttcataggagcctatcaaatgtgagtggactcggagaaggaaatcactgagcctcacatggcaaaggagcactcaaagtagggaattctgaggaagcctagaatgggctgggcagggagggcagggtacagtcccactcatcatcgtgaccaggctggacctgtgattgcagtgaatgagacttggccaggagaggcttgggtctaggagtcctgggttcgagttccattaattatttgaccctgagctggtgactttttctattttagaagcctcagcctcttcacatttttgagtaggagtaagggtagctgcctgtgcttgggcttggtgtgagagcccggttctgaagattggaaagtattgccaagcacatggtaggtactcagtaaatatctgtttacttaaatgaaagaatgcatgaataactgaaagagatcaaagctgatatattcttctagaactttatgactacagggaatgaagattaatatggcaaggatagggaggaagttaaagccaactgccacaaggtacctgtggtggagggtccagggttctagtggcttggcccactctttcaggtgccctcatctcagaaagatcaatggtgcagacagactgcagtttatctagttcacattggatggatgccttggatccacagccctaggatacttgggcccatttttggatttcttgctcttctagattgttttagacagcagtccatatgaagaccttaagagagaatatagcccaagagtgatggaaggctgcaaccatgacattttgagtatgctccactaattaaaaattaaattgttaatccccaagtaaagaaggaaaatgtgagggcatctgaagaagagagcatgttcgtgtatcgtgatcgctgatcaactctaggtttaacagacagaactttatgaatgaggaatgaggagtcatctaacttagggtagagtgaaagggggtcaggtggctaaaacacaaaactggtgaaaactgctaaagatagccacagacatttgtaaaattataggcagagaattagaagatgaacgagatgggagagtatcactgcttgggaaatgtgacactgttagcaaacagagaaacaaactagaaagtgagcatttctgttttttttctctctcttgtttctacctaggattactgtctttagaatgaaaaagagaaaatctcttgcacagagctagagaggcactttgaaatgcatttctaggaccagaggggctctatggctgggtcctgaaatacactgtagatgtggttgcagaagtggggagtcttttgatggactattttttcattatgggttcaatttttttgcctttttgaatgcctggtagtttttgattggataccagacattgtgaattttaccttgttggttgctggatatcttagtactcctataaaacattcttgagcttattttctgggacatgatcaagttgtatggaaacagtttgatcttttttgggtcttgcctttgagctttattaggtggaaccagagctctcttaatctagggctaattttttcccactacagagacgctgctattctcagtactctaccaggtgctctgtgagcttgaggtttccactctggctggtgggaaggtgaaccgttcccagccctgtataaactctgggaaatgttctgtctgctcctttagggtgtttctctcccccaccttggatagctttcacacatgcctgtgtccaccaatacttagctaaagactcaagggggtccctctgctgacctcaagtattcactgggcagttctttttgctgccctggcctgtgaattccagcctccttggccttgctggaatccagccttcatctcctcaactcagggagacatctgggccctgctggggtcctccttctttctgctgtgacttggacgctctctccagacaggaagttgaggcaactgtagggctcacttcgtttctcctctctcagggattgctgtcttcccctgactgagctccagtgtctgaaaatcattgtcttgtctgaatttttagttgtttcaggtgggaggagagatctagtccatgctacttctttggagaatctttgaatggtgagataagattatttatttatttatttatttatttatatttatttattttttacctctagcattctggaacttcttgtgcttgttagaatttctcagtgggtgtcagaagatggatgctgtaatctgtattctaatgatgtcgtggcttatctctggaaatactcttgattggattttaaaactgagtgcttaggagcccttagagaggcaaatgctggtcacaggggccaagctagactctatgcaaacaggtcaggctggaatccccagttatcaagggactgaagttaacctgaaacgtttcctttaccatgacttaacctaaggtgcatgataatgagtgttaactgggta

SEQ ID NO: 610 - DNA, 4046 bp, Homo sapiens
gtgtggccttggaaactctctgtgccttggtcctcagggaggaggacctgcccatacccctggccttggtgcctgccctatctttagaatggttggaaggaacaagggagctcatagatagggctatttgttaaaagaagccagcacagtgaggagggaaggtgccctcctgcatgggtggggccattctggggcacagtgccctggctgcattatccctgggtggaggatgcctgcttgtggctgatggaattcagacagtgtgtttctttgatgctacaagactggctttcctgctgccccactttgtataatcgggtctttttggcagggaggacttagtagctagcgtgagctcccaagtaggaactctaggaatattcactcgggctgccgtttgatctgagcaagagcatgatttgatgggaggctgctctgggccttacatttgtttccctcatttagaaaaaggcagtaaacagtttttaactacattgcgattgtgaggcttttcctatataactttttttcctggaatggaaccagacaggatggaggcactgcactcgcaggcaacatgggttttcccagcccctccatcttcttgaccttcctagggatttgttaattcagctcagattggcctttccaggaagctaccaggctctcagaatgcccgtgctggagggaggctgatcccaccagggaccccagaggaaacccagagttcatgccaaaatatctagtagaaggagtttatatggggaactagttataaaggtgtccaaggagataaaaagccaagcaaaaaatggagaggcagcccagagaatagcaatggcaggaagctgctagcatcctagggctagagggggaagggaggagctggttttctagaactcaggatccagcagcacctggcggatgctggaactacagaaggcctgctgggctgggcaggatcacagaggaaaggactctggggagggcaggatacccagaggtgatagatataatgatggacatgttctctatctggagatgccaccaaatgcagaaggagggagaaatgtcctggtttctgcctgcccccaccctgcagacttctgcctgcattcctgctgaatagaacaaacttccctagaagaaagagcgagggagcctggggagtgtagtccacagtctacagacgaggggtaaagactgggtctcagagcaagcaggccaatgactagcagggcggcccaagagcctttaagtgagaggctgtcatcctggggctgtgaatgaacttcggaggggtccttgcccttctaggaagtgcaggcatattttgtctctatgtaagcacatgcatttctccagaaagaaagttgatatcttcagattctcaagttggtctgtgccaccaaaagattcaacataatcaataaccagtaatccaaccagcttatcttaaacatgggaagtctcagggctcagagaaacacccatagcgacagtgtctatactcttggtctagggtcctactggatgttgtccttcaactgtcctggaagatccagcctgttaggagagtcccctgtctgttccctgcctctccagaatcaactgtgtcccatcttcttggtcagctttccctgatctcaagcacacagacctgcttccacagtgcacttctgcagcctggggaaaccacaccatggatgtggatcctggtctagatgcgccacatagtgctcgatgcaggcagagctggcactggaaagagggcccagtctcctccatgcagcctccctccttcagcaaacatttgccttgcacctgccatatgccagacgttttgctaactgccggggatatggcactgatcaagatagatgatgtccctgctgtcacggaggtagaagtggaaacagaaaacaaacaagagaacaaatgcagcaacaaggtcatttctgattatgataagtgtggagataatagagtagggggctggcagacagtgatgcgggtagagtctgggggctacttttgatgggaaaggtttctctccggaggtcctgtgcaagctgacatgagaaggatgagaaggagccagctttccaaggtctccagagaaagtatgccacatggggacaaaagccagtgcaaagtccctggggtgggaatgagcagaggaagaagaatccatgcctatgtggccaaagacgaatcctgcctcacagtctttgactcttttgacttcccctgtcgtgcctcctgcagactcttcttgcttccctgggagaatgggtggcaaagagtgccttccttagccatgcttccttgtcagcacagtgcctggcaggtggctggaagctacagctgaatttttgcagtgtctttgagatgccaggaggatggcagatcatttctgttcaattcatcagccacacaaaagccctgagatcaaagagcatgggcttaatttattttgtttattttgcagaggaaatagtgcttccttggactgaaagctctgaggactaagagctgaatggaaagggggcgtttggattaaatgaatgggctggccagctctgacccaatttccacccagtgcagcagtgatgggggagggaattgccttctggctctctgctctggcccaggggctggtcatttctcaggtctgggccttctgtgtgagtcaggtttgatggaagtgtccttgaaggtgattcatggggaagagaggaggggaaccgggagtagtggcctcaagccctgcctgagttcatccttggatccctcagcctttcttgacactagctcatcaccttagcaatgaggacaggtgcagattcaggtgaagctcacctacatttcataggagcctatcaaatgtgagtggactcggagaaggaaatcactgagcctcacatggcaaaggagcactcaaagtagggaattctgaggaagcctagaatgggctgggcagggagggcagggtacagtcccactcatcatcgtgaccaggctggacctgtgattgcagtgaatgagacttggccaggagaggcttgggtctaggagtcctgggttcgagttccattaattatttgaccctgagctggtgactttttctattttagaagcctcagcctcttcacatttttgagtaggagtaagggtagctgcctgtgcttgggcttggtgtgagagcccggttctgaagattggaaagtattgccaagcacatggtaggtactcagtaaatatctgtttacttaaatgaaagaatgcatgaataactgaaagagatcaaagctgatatattcttctagaactttatgactacagggaatgaagattaatatggcaaggatagggaggaagttaaagccaactgccacaaggtacctgtggtggagggtccagggttctagtggcttggcccactctttcaggtgccctcatctcagaaagatcaatggtgcagacagactgcagtttatctagttcacattggatggatgccttggatccacagccctaggatacttgggcccatttttggatttcttgctcttctagattgttttagacagcagtccatatgaagaccttaagagagaatatagcccaagagtgatggaaggctgcaaccatgacattttgagtatgctccactaattaaaaattaaattgttaatccccaagtaaagaaggaaaatgtgagggcatctgaagaagagagcatgttcgtgtatcgtgatcgctgatcaactctaggtttaacagacagaactttatgaatgaggaatgaggagtcatctaacttagggtagagtgaaagggggtcaggtggctaaaacacaaaactggtgaaaactgctaaagatagccacagacatttgtaaaattataggcagagaattagaagatgaacgagatgggagagtatcactgcttgggaaatgtgacactgttagcaaacagagaaacaaactagaaagtgagcatttctgttttttttctctctcttgtttctacctaggatt

SEQ ID NO: 611 - DNA, 4040 bp, Homo sapiens
gtgtatagtgtgtacatgcgttgtgtataatgtgtgtatagtatgtgtgtgctgcgtgtatatttgttgggtgtgtgtatatgtgtggtatgtacgtggatggtgtgtggacaatgcgtgtatgtgtgttatgtgtgtatgtgtgatatgtgtatataatgtgtatgtgtgtatagtgtgtgtggtgtgtgtgtgtagtgtgtgatgtgtctatatgtgttgggtgtgtattatgtatgtatatgtatagtgtgtgtggtgtgtgtgtgtgacctgtggtatttggtatggagtgtgtgcagtgtatggtgtgtgtgtagtgtgtgctgtgtgtatgtgtatggtgtgtggtgtatggtgtgaagtgtgtgtgtagcatgtattgtgttacgtgtgtggtgcatggtgtgtgtgtagtgtgagttgcattgtgtgtggtgcttggtgtgtgtatgtgtgatgtgtgttatgtggtgtgtgtggtaagtagtgtgtgttgtgttacatgtgttgtgttgtgtgtgtagtgtgagttgtgtgtggtgtgcactgtgtagtgtgtgttgtgttacatgtgtggtgtgtattgtgtgttgtatgtgcgttgtgtgtgtagtgtgagttgtgttatgtgtgtaatgtgtgttgtgtagtgtgtgttgcatgtgtggtgtgtattgtgtgttgtgtgtggtgtgtgtgtagtgtgagttgttatgtgtgtggtgtgtagtgtgagttatgtaacatgtctggtgtgtattgtgtgttgtatatgtgttgtgtgtgtagtatgagttgtgttatgtatgtggtgtgcagtgtgtagtgtgtgttgtgttacatgtgtgttgtgtggtgtgtgtatggtgtgcgtctatccattggatgagccgggctgcctctctgagggcaggaggccctcttgcctgcttcattccccaccccggttttctcctcactgcctcagctggcatagttgtgcttgatttagctcaaggaacaaagtaagagaatccaagtttttggacaaaacaaatgcctagaaattgtgcttctaaagaagtagtttttgatggctcttgtagagaaaccctggttgcttgaaatgaggtgagagtttcccaagttagaccccagtaagatggcggagcctgcacacaggctttaaaaatgattaaattactcgttcagtatgatcaggattatggtcaagtgccttctttctgctcttctgtctgacttgcagctaaaaataaaagtcaggaattagattcttctttttcttctccactgaagagcaccctttgtggtcgctggcgctggttaggaggagatcccctgcccagagccctcatgtggggacaggatcttccggcagcactgggtgttcaaggtagggtgccgggcctttggtttacatttctggatgaagctcttctgctgccctaccctccctctgtctgaggccacccggagtcttccctttgcggcacacagtaagcagctttagtgacacgtttccgggcctcacctcctcagtttgctgagtctccattacatctgtggcaccgtttaagcagcccataatcatttgtggggtaaattaatacagtacatgtctcaggccctcccccaggattggcatagggaactgagaattccacctgtttccctttcctggatccttgcagttggtgaccagtggagaagatggccctggggtttcctcctcagccccaaattcctacatccctccaaaagaacctcagagagcaaaggcagccggacgcatccgaccctggcctccttctcaccactgctgacagaaggagcagaatcttggcagcattgttaggtcttcatctgctattagctgattaaaaagttaaaaaaaaaaatctgtatccctgggtagcccagcctgttccttgctgcagttgaagactgaccgaggagctatcagcggcttcccggccactgtggtgccatttttggcctcaaacccattgtgaattgctatcttttcccccagccatcagccggaagatccattaacaaattaaaattccctctagagtcagaatggctttggtttctgggttctaaatgaccttgattttaattaccatgccatacaggtttggaagaagacaccatcactgaatccctggctccttgctgaggcagcagagagctggggtattcagtttggccacacttctgggcttgtgggtgatacctctgaagtccttattggtttctaaaggtctttgtgccactcccagtttctcagtcagctgccagtgagttcacacacctctgagaactcttccaggacccccagtaagcttgctctaggccccaaggagtcccctctggcaaccgttatattcagggacccttctcaagacaaatttcttgaggagacacagttctggcgctgccctctaaacgctgtgttttccttaggtggccaggcaaactgtccagagtggtgtctgctcttcacctcatcttgaaggtggacgtcttgaccagaaatcctccttctccaataaactggaaggagaggcttctaatttctgtaatgtggggacttggatggcgtgtggatctctaactgcatcctaagttgtctaatattgataaaccaaggagtagcggggttcctattgtggcctttgaaggtattgggtggagagaacacaggatgggcaggcgggtcctacaacagtcagcaaagtacatggctagagcaaaagaaaccttatgcaagtgcagatttgggactcaaaccattcaaccttaaggtgcttggggcgaagtggtcggggagggtggtggggattgtgaagtgtgtgacttgtctgcagaatttactgttctctgctttcattataagcctcttttctcacacagaagagtaagatgaagcatgcagagaccaggttgggttaagactctgtactaatcacaagtagtgcaagaaacatttgctggacacctactgagtgctgggaactgggtactcaacacatctctgtgaggaagggactattatcatttctattttcttgatgaggaaagggaggcactgtattagtttgctaggcctgctgtgacaaagtactacaggccaggtggcttacacaacagaaattaattttcttacagttctagaggccagaagtctgagatcaaggtgttggcagggctggttccttctctgggttgtgaaggaaggatcggttccaggactctctcattgccttgtggaagactgccttcttctccctgtgtatgtatcatctccctcctgtatatgtctgtgtcctaatttcctcttcttctaaggacaccagtcatattgcattaggacccaccctaatgacctcattttaattttatcacatctttgaataccctgtctctgaatacatcccattctgaggtactgggcattaggacttcaatgtgaatttttggtggggaacataaatcagcccttaataggcacagaggggctaagtaacttgtgtgtagacacagagctataggagaagatggcaggcattctgactccagaatcccctggttctgacagaatcccctgacagttctgacagttcgagaccagcccggcccacatggtgaaaccctgtctctaccaaaaatacaaaaattagccaggcatggttgtgcacatctgtagtcccagctacttgggaggctgaggcacaagaatcactggaacccgggaggcggagtctgcaataagccaagatcgcaccactgcactccagcctgggcgacagagtgagactctgtgtcaaaaaatttaaaaataaataaaaataaaaataaaaacaaggaaacaatatgattgtactattcaaaggataatacttaatttgcaaacttcatattaattcctagtgtactaccagaatgagatctggtaacaggataaaagtttaaatcagatgatcaatgccatattttttccttccatgaatacatctccaggaatgtgtaca

SEQ ID NO: 612 - DNA, 4047 bp, Homo sapiens
gtcctttctctgacaccctattgcttttctttccttacattctctcagggagtcatatacaatgacagagaagtccagggctctgtgttgtttggctgtccagtctttgggagagagagaaaaaaaaaagaatgtggaacctccagacagggcacaccctaccgcgccccatgtgagtttcctgaggtgctgtaacaaaggaccatcgcctgggtggctcacacaaccgacagttaccttctcaccctgctagaggctgtaagtctgaggtcaaggtgccagcaggattggtttcctccgaggcctctctccttggctcttgtagatggccgccttgttttccctgtatcttcacatggtcttttttctgtccatgtcctaatctcctgttcttataaagacatcagtcctgttggatgaaggcccaccctaatgacctcatttaaccataatcacctgttcaaagaccctgtcaccaagtacagccacattctgaggtcctggggattaggatatgaacatgtggatttgcagggaaccaattcagtccgtaacactctctctcacatcatgccgtgtgtgatttacatgtctttgctgtgtgtctggctcttgtagactttgcgttttcacccctgtcttcctgttggaagtcttggtgaatgatcaagggagaatgtaggccccagaatggaaggagtgtctcagggacattagagagagggaagcagagagactgcccacccacccttcatcattgtgactgctctaaggaccggccctgggtgaggcggaggaggagcgcacctgttcagaacgcagcgaggctgagcggggagctagctggcagtccttctagggagtgtagctgattaaaataattatattaactggccctcaaagagacttatttatagccatggtgacacgttattaaggatctaatttggatcaggactctgggaatcttatttttaggcccagaagagagccctgcaggcaggtgaccaggaggtctcagatggctgtgtattcactctgtcgagtcagggattctcaaggtgggaggcaattggaaaggtcgcactggcccacccttcccccgatgtctgtccccctgctccagtgtcccactgagagaccatccacctcttcttaaatgcctcctgtgccagggagcctgtttccatccacggaggcccctcctatcttgtgaaagtcaggctctactgaaaagcaagagagagatttctctctaaatcttctgtctggtggttctggtctccccctggggatggacagaatacatctgaccactgggccactctcttcaggcccttgaagacagggctaaagctcttcttggcctccactgctccaggctggggcccccagttcatcagcccccctcaggagataattgcaagagccttcactgctccgtttctcagaggatgtgagtgttcagttctgcggtccagcaactcctccaatgcctgcctcctggggatagctgtaattctgggttgagatgaaagttggccagttgaagtcaactggcctttggttgagggcctatggtgaaaacagacttcatctaaaaagaactcagtcagcaggcacctgcactttggaatcagggaggagaaagatggagactaggaactgacagaagggttttcctcgtgtgaagggcagcaccaggccatgaggtgacccagggcaggccacagccgtggagggttagggtacagcaccctggtgggtggccccgctgggaagtgcacatttgggttttggtttgccaaactcaccctgcccaatcctagtacgagcccaccatgaatgtcagacagcatagagtaagtgcacctggagcccatcctgagcccttgagctaatgtcttcactcctctgatctctgggttccacctgcctcctttgttgtttgaagggtggaacggactgatgcctatgaataaacacaagctccagcgctctccacagatgtcacagatgaaagactaaaagctgcttctgcacgcacagatatttatattgtagtgccaaacaacaacagaataaaaagaaataatttttagatgtgggaaaatcagactctagaagatgttttataggagctatcatggtaggatggggctaattttccaaatgcctattttcctctgcttccttttaaagttctctctctttttatttttttattaaagcaaggaaataaacagtatgtgtgtgtggtgtgtgtatgtgtatgtgtgatgtgtgtttagtatgtatgctctctgtgtgtgtgtgatgtgtgtgtgacgtgcatagtgtgcctaggtgtgctatgtgtatgtgtctgtgtctgtgatgtttgtatagtgtgtgtgtagtatgtgtgtgtggtgtgtgtatgtgtatatgtgatgtgtgtttagtatgtacgctctctgtgtgtgtgtgatgtgtgtgtgacatgtgcatagtgtgcctaggtgtgctatgtgtatgtgtctgtgtctatgtgatgtatgtatagtgtgtgtgtagtgtgtgtgtgtgtggtgtatttgtgtggtgtgtatgtgggcagtgaatatataatatatgtgtgatatgtgtggtatgtagtgtgtgcagaatgcgtggtgtgtgggtatttatgtggtgtgtgtgtgtggtatgtgtatggtgcatgtgtgtatgtggtacatgtatgtgaatatgtgtcatgtgtgtggtgtgtggtgtatgtgtgtgtggtgtgtgtatgtggcattatgtgtgtgtgatgtgtagtgtgtggtgtatgtatggtgtatgtggtgtgtatatatatatggtgtgtgtatagtgtgtgtataccacttgtatgtttatgtgtgtgtatatatgtgtgatgtgtgtatagtgtgtacatgcgttgtgtataatgtgtgtatagtatgtgtgtgctgcgtgtatatttgttgggtgtgtgtatatgtgtggtatgtacgtggatggtgtgtggacaatgcgtgtatgtgtgttatgtgtgtatgtgtgatatgtgtatataatgtgtatgtgtgtatagtgtgtgtggtgtgtgtgtgtagtgtgtgatgtgtctatatgtgttgggtgtgtattatgtatgtatatgtatagtgtgtgtggtgtgtgtgtgtgacctgtggtatttggtatggagtgtgtgcagtgtatggtgtgtgtgtagtgtgtgctgtgtgtatgtgtatggtgtgtggtgtatggtgtgaagtgtgtgtgtagcatgtattgtgttacgtgtgtggtgcatggtgtgtgtgtagtgtgagttgcattgtgtgtggtgcttggtgtgtgtatgtgtgatgtgtgttatgtggtgtgtgtggtaagtagtgtgtgttgtgttacatgtgttgtgttgtgtgtgtagtgtgagttgtgtgtggtgtgcactgtgtagtgtgtgttgtgttacatgtgtggtgtgtattgtgtgttgtatgtgcgttgtgtgtgtagtgtgagttgtgttatgtgtgtaatgtgtgttgtgtagtgtgtgttgcatgtgtggtgtgtattgtgtgttgtgtgtggtgtgtgtgtagtgtgagttgttatgtgtgtggtgtgtagtgtgagttatgtaacatgtctggtgtgtattgtgtgttgtatatgtgttgtgtgtgtagtatgagttgtgttatgtatgtggtgtgcagtgtgtagtgtgtgttgtgttacatgtgtgttgtgtggtgtgtgtatggtgtgcgtctatccattggatgagccgggctgcctctctgagggcaggaggccctcttgcctgcttcattccccaccccggttttctcctcactgcctcagctggcatagttgtgcttgatttagctcaaggaacaaagtaagagaatccaagtttttggacaaaacaaatgcctagaaattgtgcttctaaagaagtagtttttgatggctcttgtagagaaaccctggttgcttgaaatgaggtgagagtttcccaagttagacccc

SEQ ID NO: 613 - DNA, 4046 bp, Homo sapiens
agagtccggagggaggcgcatccagcttctgtcttggctgcaggccaggtctgcccatgagacggttctcctccttaacctattcaatccaataatcgatgagcaggtattttctgagatctgaagtgtcaagtactgaagacatcaccaggcttggctccgtgggacacacaaggaattataaagcaggaccccctcatccccctcaggagctaacagtccaattgagggaagcaagagagacagacgcacgtgaaaggttaaacaacttgtcctagcctgaaagacaagacccgtgggaaacaattcaggaaatgtcaccaggcagcatcttcttagtgctgcaaagatctggaggaacgaatgaccagccggggcacaggggcgagggcttaggcttctggggtccggttacaaactgtgacaccttggccacctgggtttacctgtgtgagtcctggtctctatatccctcagatgggcacagtaagacctgcctcagagacatggggaggatttaatgagacaatgtgtatagcacattgcctgacgaaggggaaaaacctcactgtgatagttaatttattgtcattggctgcaggggccagagagtctttggggaggctctgctggtaaaggctgagcctagccttgtattgctcatcttttggataaggtaaggatggaacctttgtgaagaggaagactggacacctcctgccccctcccactgtggtttgagtggattttatcccgcatctgttgtttgcctggcattggatggccctccacaccagagagctaatgcctgccttcatcactagtgtctctgtctctttgtttcatcagcttctttatgtgaaaagagagaaatgatctctgtctctttccaaatcccagcaaggctgaataatatctgtggatattcttttctatttcttaataccctcgcattgcttatgaaaatcctatgggcacattgtaaattatctgcaaaaaacagcagagtgcaaagaagcagaaataaaacctcccataatcacaacagaaacatctactactgttcatgattcgttttattttcccccaaatatattactgtgcatttttctttataatgccgagatcctagaatatgtgcgatttagtgttctgcttttcttcttaacattacgttatcagcatttccaagtgacactgggactctataaacatattttaaatgactatatcttatatggatgctcactccttttccttatatttgctctttactttttcctcttttttgctattataaatagcattgtactgaaatccttctgcagggttatgtacattacctcattggtttatttatttaacagactttgagtatctacaatgtgcaatacaatgtgcttttagttctgagaggaaaccatctgaaatagcaaaaagagacataaatgaaatacctcacatgtagagttttgtgatactcttttttatagtaagtatacctggcttggagtaacactgtgggccggttaattgttctgggcctgaatttctgcatctttagtcactagatggtttctaagctgcctcttgtctccagcactctgtggtcctgactgcaaatgtaagaatcaccgtagcattcatctatccttgtgactcactagggctgtttgtgtttggagcattcctggtgcacagatgatgtgttgatggacttggacacagtctgttctcttcccctctcagtcatgagcagagcgttcatctgctcagtgcttctttttaataagtagttcaggggttgactgcagctcagctctgttgggaattaacacagacataatagacttttataaaagtgtgagcagagcaactaagccagtacagactctttgccacatcctgacatgctaagagagaggtcccctttaaaacgcaagcagggtaaatattagaaaaatggcaagaattcatagagcataaagctcataataaactcagagaatgcattgtcctgagaagtggtaaaggaaggaagtggaatagacttcaacaaaatggcatagaattaacggcagagggtatcatgtacctgcagggtatttgaaccgggtgattttgtgtggcagtgcccgggatccacagaccctaatgacacccaaatttgtgaggcattcttctcagtttataaagaacatgactgagaccacctagcacatttaaccgggtctgaaggaccagctaatttcctaaaaatagcagtttcttgctgggcatatgtcttaggctttgctggctctaagaacttaatattaacaattcacacagaaggaatcgtgttcagggcattgaccaatactcagctcacctttgaatggccagaggacacagctctaaagaaaggtgtgcaacaaggagtgtggttgagtgggcatgttatcttcctaggtcacaagtaacaaagtgccactccccaactccatattcataacagacatccataatctatcaggatgttctttctagccaagccaagatgcaacttcaggatcttttttaacacagtgctccaggcagccactaccacacagatggggttcatttgctcctggaataaaaccttgtcatccctagacatagaggcagtctttcccctgtgagccacagcatatgagaaaatgtcaccatctagaaggttccttggtaagcacagacatatggtggcctgataaattgcctttctctacccttgggatctttgtccaaggaactaggtgccatcttgagtcagactggcaagtgtgggaaaatagaattcttattcctatcagccaacagaatcttcagtgtttcgtgttatgataaggagttacactgcagacatttctcagagggtctgttcctgtgttttatcatgttttccatggcaacccctgtgggatccacgaagttggtattatctccatggcacagatgatggaggcccaaggaagacaaatgaccggcaggaggcaagtcatgcagctaagagcttttcctggaatccaggtgtcctgccttcagatgccagttctcttgctggttttcgtttttgtttttctaaaaatgttttcacctgtcaagtatgtgctactatgaattctgggagggtagggtcgtgtcttatttatttctgtgtttttgactgcttttcctctccaatctcaagtgctgtgactaacacataggaagtactcaagaaaatatttatggcatataagtcagtagaaaatccattcattcattcattcatggaagaaacaaggaggtgccccgacctcttttgcatgctggcctttccaagtctgcactgggattgtgccctgagctttcatcataagagcagggttctggctgtgaggcttacctgggcacatgcacctgagcagcagacgatgacattatcagtccactggagacattttcttcctcataaaaaggctagtcattaaatccttatttgcagcctgtgacagcaggagccaaaagcctctgacccgctcaggacctggggttagagctgcatggaccctgaagagagggatccctgtgctaaggccttcggacagtggccctgaccgagcagcagagggaagagggcttagggagcgggaagcaccaatgctgggcttgcaaagggcagagcagcaggagagaggctggcataggagggaggagggctcacaggagtgggaggtggattggatttagggccatcaggaggggtgggaggccaaacagctcagctccccagtccctttctggggccatctttgttttctgatttataatgtgtcccctttgcggatggccttttgacatgtgctaattataaattgtcctttggtgcattccgagagttctaataattagaatttctaattccagtcctctgagctgctcccagcagcctcatcctgtgagaggagcttgactcatttgctctcctgctcaaagtcgctggaggaggccagcaccgtgcggcctggaggaagtatccaggt

SEQ ID NO: 614 - DNA, 4066 bp, Homo sapiens
cagttgtggatagccctctggtctttattcttcttacctgtaaaatggggataataatgataatactacctcacttacaagattaacgtatgagatttatatcaaaagcctagtacctggcacctgttagtttctttctttttttttttttttttgagacagagtctctctctgttgcccaggctacagtgcagtggtgcgatctcggctcactgcaagctctgcctccagggttcacgccattctcctgtctcagcctcccaagtagctgggactacaggggcctgccaccatgcccagctaatttttctatatttttagtagagatgggctttcactgtgttcaccaggatggtctcgatctcctgaccttgtgatccgcccgtctcggcctcccaaagtgctgggattataggcgtgagccatcgtgcctggccaggcacctgttagtttctaaacaattgttaatatcattcattactttatttctaaaacagcatgattgaattgagcatttccttggacttggaaaggtatgattttggaggagggtgaacctgtgtaggctgttgcagggagttccttgacattatcaactgaccagtccatcaacaaatttatttgttcatttatttattaattcaaggatgttgggtccatttttcagttagactctggaaagataagtgattggtcctatcccttaagggaaatatgctttcattggagaaataacatgtacacgctgtgtgtatgtgtgtgtgtgcacgcgtgtgtatgtgcatacacatgtgtatcttttttttttttttgagatggagtctcactctgttgcccaggctggagtgcagtggcatgatctcagctcactggaacctcccccttccaggttcgagattctcctgccttagcctcccaagtagctgggattacaggcgcccgccactacctccggctattttttttttttttttgtatttttagtagagacaggatttcaccatgttggccaggctggtctcgaactcctgacctcaggtgatctgcccacctccgcctcccaaagtgctgggattacaggtgtgagccaccgtgcccggctgcacgtgtgtgtctttatgtgttcaccctatggggagagaaaaggttcatgaaagttgagattactgtgggtagggttgtcagggagggctttgccgggagggggaagctgcgctaggcaagctgtggctccagagtcttggaggcgcctgtaacagtccctgcggtttcaaaagaattcagagaggggagccatagcctggtctccaaatgtgcagcaccttctgggcaagcttagacttaaaggatatcattgtagataatgatttgcttatttcttgctctaggatatggggactgtttctttttttctgggatgctttaataggatagtaaaagtaaacgtgtccctgtctgatggcccttggctcagctggaagaagatcagctctgctgcaatttaggaagagataactggggtccatcacgtggctggttcagaccagggttttatgactgggatttgcctgctggagccctgggtcactgtgccagactcaaccacaggtcacaatctggaactggatccttgctgccagatgggaggcgggcagggccagccctatgctgtcattggcctgtagccagctcaggtctggtggcaagtgaaggacacatcctgatgtctgagtgccctgcaatttattggcttgtggtttaggggtgtgggggacaaacaccaatgccacagttgacatatatgggcgtcgtatttggtggggtcaagagtccggagggaggcgcatccagcttctgtcttggctgcaggccaggtctgcccatgagacggttctcctccttaacctattcaatccaataatcgatgagcaggtattttctgagatctgaagtgtcaagtactgaagacatcaccaggcttggctccgtgggacacacaaggaattataaagcaggaccccctcatccccctcaggagctaacagtccaattgagggaagcaagagagacagacgcacgtgaaaggttaaacaacttgtcctagcctgaaagacaagacccgtgggaaacaattcaggaaatgtcaccaggcagcatcttcttagtgctgcaaagatctggaggaacgaatgaccagccggggcacaggggcgagggcttaggcttctggggtccggttacaaactgtgacaccttggccacctgggtttacctgtgtgagtcctggtctctatatccctcagatgggcacagtaagacctgcctcagagacatggggaggatttaatgagacaatgtgtatagcacattgcctgacgaaggggaaaaacctcactgtgatagttaatttattgtcattggctgcaggggccagagagtctttggggaggctctgctggtaaaggctgagcctagccttgtattgctcatcttttggataaggtaaggatggaacctttgtgaagaggaagactggacacctcctgccccctcccactgtggtttgagtggattttatcccgcatctgttgtttgcctggcattggatggccctccacaccagagagctaatgcctgccttcatcactagtgtctctgtctctttgtttcatcagcttctttatgtgaaaagagagaaatgatctctgtctctttccaaatcccagcaaggctgaataatatctgtggatattcttttctatttcttaataccctcgcattgcttatgaaaatcctatgggcacattgtaaattatctgcaaaaaacagcagagtgcaaagaagcagaaataaaacctcccataatcacaacagaaacatctactactgttcatgattcgttttattttcccccaaatatattactgtgcatttttctttataatgccgagatcctagaatatgtgcgatttagtgttctgcttttcttcttaacattacgttatcagcatttccaagtgacactgggactctataaacatattttaaatgactatatcttatatggatgctcactccttttccttatatttgctctttactttttcctcttttttgctattataaatagcattgtactgaaatccttctgcagggttatgtacattacctcattggtttatttatttaacagactttgagtatctacaatgtgcaatacaatgtgcttttagttctgagaggaaaccatctgaaatagcaaaaagagacataaatgaaatacctcacatgtagagttttgtgatactcttttttatagtaagtatacctggcttggagtaacactgtgggccggttaattgttctgggcctgaatttctgcatctttagtcactagatggtttctaagctgcctcttgtctccagcactctgtggtcctgactgcaaatgtaagaatcaccgtagcattcatctatccttgtgactcactagggctgtttgtgtttggagcattcctggtgcacagatgatgtgttgatggacttggacacagtctgttctcttcccctctcagtcatgagcagagcgttcatctgctcagtgcttctttttaataagtagttcaggggttgactgcagctcagctctgttgggaattaacacagacataatagacttttataaaagtgtgagcagagcaactaagccagtacagactctttgccacatcctgacatgctaagagagaggtcccctttaaaacgcaagcagggtaaatattagaaaaatggcaagaattcatagagcataaagctcataataaactcagagaatgcattgtcctgagaagtggtaaaggaaggaagtggaatagacttcaacaaaatggcatagaattaacggcagagggtatcatgtacctgcagggtatttgaaccgggtgattttgtgtggcagtgcccgggatccacagaccctaatgacacccaaatttgtgaggcattcttctcagtttataaagaacatgactgagaccacctagcacatttaaccgggtctgaagga

SEQ ID NO: 615 - DNA, 4028 bp, Homo sapiens
gacagagcagaggttctcaaagtggagttttcatatcagcagtaagagcctcacttgggaagttgttggcgatgcagattcttaggcttgctttcagccccactgacttagcgactctttgggtggggcccagcatgtcttgtttggaccatttgtccaggtgatgctgatgataggcaagattgagaaccatggagatacacaggcaggggcacacagtttgaatcctggttctgctcctgctgcttctgtggcctgggacaagtgactgatggcccagagccttgatttccccatctgacaaatgagagtgataacacctctctcctggcattagtatgaggattaaaataggagacaactgatgtaaagtgcttagcactgtgcagagcacaaggagttactgcatatctagcctcagttgtgatttttaccattaattggattatgatgggggacggcaacttctataaggaggtggcacagaaatgtctgatttctccttccttctttcagtagctctgtgaccttgggcacatcattttccttgcctataagatgtagataacgacacccacgtaacgggataagtgaatggaggtgcctgcagtgctttgcactttgtaaaacaccaactgaataggagaagtttctagagagctctttactgaggctgcttctactttgtcctttctggaaaatacttcccctctgcccaaatagtaaatgagagaggagaaaaaagccagaaatcccacggtgccagacttgcaggcacaaagagcctttgcaccgtaggtgactttgtttcctgagtgccatttttggcccctcccaccctggtcctcctagatcctggcctcagcttacttcccctgtggttccatgttgattccttattaaaatgtcacctgcaagtcatgaaaactcagtgtggtttcctgaaagaggaggggcagtgattgtccagagtgttcttttgtcacgatgagaattgcttgggcgacagtgtcaagacagcaaataaattgcctcctccccttcaatgtctcagtgctgtttttgcagcatgaatggttccagtgtggagataatccttgctcatcttttcaccaggttcttgaatgtggaaaatgggcaaacagttctccctcaccacacactcctgttatttccagtgtcccgtggccatacacccatcagcagagaggcctggagtggcaagcaggggtggctggaagtctgctctcttctcatgagagtactgagggcccagtgaggtgtctgtagagcaagatagagccaggtgatcggggaagagagccctccaccccagttttcccaggaggcgacaggccccatctctggggggagtggcgcatgcctttctcctcgtcacctgccccgatgagccccacatggatgaagtgagagcctgtgtcaccaccccggctcctcaggaggctggtgatgaatagggatggcaggaaaaaggagctgggctctgctgtgacatgtctctatttttccagaaaactgccggatgtccttcccttgtaaaagttgaagagaacagaggagaggagaagggtcggagcagagagatttctgatatgctgttagtggcgctgccaattaaaaagaaattaaaacagaaatctccgtgggctgctggagtgaaaaagtctcctctcctggcccctctaaacccttgaacaaattaattggttggatgttgactgggtaccagtgaaattcttagatattaggtcttgttctatggtaggcacagaagaacaaggggtgtgtgtgtgtgtgtgtgtgtgtgtgtgtgtgtgtgtgtgtgtgtgtgtatgtgagagagagagagagaagagaggaaggatgggggagagaagaagggaaggagggagaaagggaaggaggaaaggagggaaggagagcaagagagagacttgggggcatcggggtgggttggagcagttcagggattgaaatcatgctgcatgacatttgggcattttggggtagctgagacaaaaactgctggaatttcattttgaagataagaaaaggactaggaaagagagcttctttaggccagaggagaacagattgaggctgtgaaggactcttggctcccagctcttcttgttctctgtggactttcaagcttctgcagggagacagtgaactgggaggaatatgtagtgactgtgaaggttacatgtggctggaaggggcaggcaaaaggtcccaaatggccctgtggtgctttagttggcagagagatggacaagttgatcctgcccttatgccgtctcatgcatttgtccaaaagctttgtttctgctgcgtggtcagagacagaaggaggaggctgcctccccttcctgggacctggatgttttggttcatctgggttcctttctgattttgtgatgccctaagcctcctgtccccacagcccttctttcctttttgtagattctcttgcaaacttacaaagtgtctgtaacctttggccctgggacccagcatgagcagcttactggagtcaggacagatgcacgtgggtgctgagcagagccctgtggagcctcggcctctggcctccttggccagctgctgccctgtcccagggacagtgtggcttcccagggagcacttcactccaatctctgagccataaaaaattaaactacagggctatcaaatatttaatctgcctgaataatgaacatgggcagattcttatgaattctttgctttgattaaataaaattgaaggatgggaactgtctgcttggcacgttagctgaaggcaatgcagggtaggcactttgtgccagggatctggccctgagtctggaagaaccatttggttcatgtttcctcacccactgtctatacttcagttgtggatagccctctggtctttattcttcttacctgtaaaatggggataataatgataatactacctcacttacaagattaacgtatgagatttatatcaaaagcctagtacctggcacctgttagtttctttctttttttttttttttttgagacagagtctctctctgttgcccaggctacagtgcagtggtgcgatctcggctcactgcaagctctgcctccagggttcacgccattctcctgtctcagcctcccaagtagctgggactacaggggcctgccaccatgcccagctaatttttctatatttttagtagagatgggctttcactgtgttcaccaggatggtctcgatctcctgaccttgtgatccgcccgtctcggcctcccaaagtgctgggattataggcgtgagccatcgtgcctggccaggcacctgttagtttctaaacaattgttaatatcattcattactttatttctaaaacagcatgattgaattgagcatttccttggacttggaaaggtatgattttggaggagggtgaacctgtgtaggctgttgcagggagttccttgacattatcaactgaccagtccatcaacaaatttatttgttcatttatttattaattcaaggatgttgggtccatttttcagttagactctggaaagataagtgattggtcctatcccttaagggaaatatgctttcattggagaaataacatgtacacgctgtgtgtatgtgtgtgtgtgcacgcgtgtgtatgtgcatacacatgtgtatcttttttttttttttgagatggagtctcactctgttgcccaggctggagtgcagtggcatgatctcagctcactggaacctcccccttccaggttcgagattctcctgccttagcctcccaagtagctgggattacaggcgcccgccactacctccggctattttttttttttttttgtatttttagtagagacaggatttcaccatgttggccaggctggtctcgaactcctgacctcaggtgatctgcccacctccgcctcccaaagtgctgggattacaggtgtgagccaccgtgcccggctgcacgtgtgtg

SEQ ID NO: 616 - DNA, 4104 bp, Homo sapiens
cagaggaggttcagaagaaggagagagtgagtcttagagtaaattggcttagaacatcccttagttgatgtttaatgcagatgatgcttaagtgtttctggatggtgtgtgatttcttggagcgattttgtgcatcaggaagtgaacttcctgcagccacattttgcacatcttgttccattacttgtctaacaggatgctcacattagcttgtgggtgacaagaggcaggctagacagagcagaggttctcaaagtggagttttcatatcagcagtaagagcctcacttgggaagttgttggcgatgcagattcttaggcttgctttcagccccactgacttagcgactctttgggtggggcccagcatgtcttgtttggaccatttgtccaggtgatgctgatgataggcaagattgagaaccatggagatacacaggcaggggcacacagtttgaatcctggttctgctcctgctgcttctgtggcctgggacaagtgactgatggcccagagccttgatttccccatctgacaaatgagagtgataacacctctctcctggcattagtatgaggattaaaataggagacaactgatgtaaagtgcttagcactgtgcagagcacaaggagttactgcatatctagcctcagttgtgatttttaccattaattggattatgatgggggacggcaacttctataaggaggtggcacagaaatgtctgatttctccttccttctttcagtagctctgtgaccttgggcacatcattttccttgcctataagatgtagataacgacacccacgtaacgggataagtgaatggaggtgcctgcagtgctttgcactttgtaaaacaccaactgaataggagaagtttctagagagctctttactgaggctgcttctactttgtcctttctggaaaatacttcccctctgcccaaatagtaaatgagagaggagaaaaaagccagaaatcccacggtgccagacttgcaggcacaaagagcctttgcaccgtaggtgactttgtttcctgagtgccatttttggcccctcccaccctggtcctcctagatcctggcctcagcttacttcccctgtggttccatgttgattccttattaaaatgtcacctgcaagtcatgaaaactcagtgtggtttcctgaaagaggaggggcagtgattgtccagagtgttcttttgtcacgatgagaattgcttgggcgacagtgtcaagacagcaaataaattgcctcctccccttcaatgtctcagtgctgtttttgcagcatgaatggttccagtgtggagataatccttgctcatcttttcaccaggttcttgaatgtggaaaatgggcaaacagttctccctcaccacacactcctgttatttccagtgtcccgtggccatacacccatcagcagagaggcctggagtggcaagcaggggtggctggaagtctgctctcttctcatgagagtactgagggcccagtgaggtgtctgtagagcaagatagagccaggtgatcggggaagagagccctccaccccagttttcccaggaggcgacaggccccatctctggggggagtggcgcatgcctttctcctcgtcacctgccccgatgagccccacatggatgaagtgagagcctgtgtcaccaccccggctcctcaggaggctggtgatgaatagggatggcaggaaaaaggagctgggctctgctgtgacatgtctctatttttccagaaaactgccggatgtccttcccttgtaaaagttgaagagaacagaggagaggagaagggtcggagcagagagatttctgatatgctgttagtggcgctgccaattaaaaagaaattaaaacagaaatctccgtgggctgctggagtgaaaaagtctcctctcctggcccctctaaacccttgaacaaattaattggttggatgttgactgggtaccagtgaaattcttagatattaggtcttgttctatggtaggcacagaagaacaaggggtgtgtgtgtgtgtgtgtgtgtgtgtgtgtgtgtgtgtgtgtgtgtgtgtatgtgagagagagagagagaagagaggaaggatgggggagagaagaagggaaggagggagaaagggaaggaggaaaggagggaaggagagcaagagagagacttgggggcatcggggtgggttggagcagttcagggattgaaatcatgctgcatgacatttgggcattttggggtagctgagacaaaaactgctggaatttcattttgaagataagaaaaggactaggaaagagagcttctttaggccagaggagaacagattgaggctgtgaaggactcttggctcccagctcttcttgttctctgtggactttcaagcttctgcagggagacagtgaactgggaggaatatgtagtgactgtgaaggttacatgtggctggaaggggcaggcaaaaggtcccaaatggccctgtggtgctttagttggcagagagatggacaagttgatcctgcccttatgccgtctcatgcatttgtccaaaagctttgtttctgctgcgtggtcagagacagaaggaggaggctgcctccccttcctgggacctggatgttttggttcatctgggttcctttctgattttgtgatgccctaagcctcctgtccccacagcccttctttcctttttgtagattctcttgcaaacttacaaagtgtctgtaacctttggccctgggacccagcatgagcagcttactggagtcaggacagatgcacgtgggtgctgagcagagccctgtggagcctcggcctctggcctccttggccagctgctgccctgtcccagggacagtgtggcttcccagggagcacttcactccaatctctgagccataaaaaattaaactacagggctatcaaatatttaatctgcctgaataatgaacatgggcagattcttatgaattctttgctttgattaaataaaattgaaggatgggaactgtctgcttggcacgttagctgaaggcaatgcagggtaggcactttgtgccagggatctggccctgagtctggaagaaccatttggttcatgtttcctcacccactgtctatacttcagttgtggatagccctctggtctttattcttcttacctgtaaaatggggataataatgataatactacctcacttacaagattaacgtatgagatttatatcaaaagcctagtacctggcacctgttagtttctttctttttttttttttttttgagacagagtctctctctgttgcccaggctacagtgcagtggtgcgatctcggctcactgcaagctctgcctccagggttcacgccattctcctgtctcagcctcccaagtagctgggactacaggggcctgccaccatgcccagctaatttttctatatttttagtagagatgggctttcactgtgttcaccaggatggtctcgatctcctgaccttgtgatccgcccgtctcggcctcccaaagtgctgggattataggcgtgagccatcgtgcctggccaggcacctgttagtttctaaacaattgttaatatcattcattactttatttctaaaacagcatgattgaattgagcatttccttggacttggaaaggtatgattttggaggagggtgaacctgtgtaggctgttgcagggagttccttgacattatcaactgaccagtccatcaacaaatttatttgttcatttatttattaattcaaggatgttgggtccatttttcagttagactctggaaagataagtgattggtcctatcccttaagggaaatatgctttcattggagaaataacatgtacacgctgtgtgtatgtgtgtgtgtgcacgcgtgtgtatgtgcatacacatgtgtatcttttttttttttttgagatggagtctcactctgttgcccaggctggagtgcagtggcatgatctcagctcactggaacctcccccttccaggttcgagattctcctgccttagcctcccaagtagctgggattacaggcgcccgccactacctccgg

SEQ ID NO: 617 - DNA, 4048 bp, Homo sapiens
ggtgtcagaatcacgattgtcagtgggagtgtcaggaagaaacttcgtgactttttctctcttcccaggcgcccccagctgttaggtttcatggcaacccaatgtggtagaaggcagtttcttttccattcttgctgttagatttttatgttgtgtgaccttggggctgccttagggcctctctgtccttcatgggtctcacctggcagaggagggggatacacagggtgatttccatagggacttacagctctaaaatgctcgagtgtatgatctaatcatgatgacacacagtcagccacagtgaaatccctgacacatctcaaatttgaactgcatctttatgagtggaaaaactgtttcctgccccacaggacattttgatttaactaggacacacctgaccctggtctgctcacagacagagagaatttgttctgtggcccaaggcctctgcctgcccctgctcccaccccaccatgggtagcagtggccacgtggtacttgaggacagcatcctggaacttgcccaggagtccgctgcatgctggctttctctcttctgcagagacgaggggcccagatcgggtcagcctctgctcagctctgcagtcttgccagggggaggaggaatcaggctggggggcagggatagagggccgtgtgcatcagggaaggaggccctgagatgacaagctccatgagtcactcaactggccgctccagccagagagcatcaaggaggggtttatgacactgcctcatgcagcagtgatcagccatgaggtggcatccatccattgtcaggggacagtccatcctcctcaggcacatgcacagaggattgggtgcagaggagttcaccctcaacacctctgggtgttgggaggcaggagagcagtggggctggaggcacagctctgccaagcattcctgaaccaaagcaagccatcaatgagtgctcacaccgtgcaggcactgtgagcctgtgtccacatgatctcatcttgtcctcagggccatgccaagaggaggcactattcttcttcttctcagtttatggatgatgataatggaggcatagagaggttaagcaacttgtttgatgtcacccaacaatgctgaaatggggcaggatttggccctggccctccagagcctatgggcttaattgttgccttggtgggtcttagccttgagcctgcattagaacaacctggagggcttggccccactccagagtttctgatttcggtcaggtctgcgataggtctgagaatgtgtgtttttaataagtttccatttgaggtaaagcccagggaccacactagtctgtgctgtactgactcatcatcccgtctcagtttccaacctccaaaaccagagggttgagctttctaccagttctctccagttgaccagttaacgcagaaattccagccttctaatcacccataattatgtttagttttggacaacttaatatatgagagagcaatagtacttcagtaaactcctctactgctactgggtttctgtcacttgtctcctcttatttttgacaatttgatgttttgtgttgtgaggcttcctttgtgcctaaaagtcattgacttttagatactcactttggattatctccatcaatgtgaaacctcctgtgttgccttatttaatgtcttttgccttgaatttcacttgcttggataccattgcctttaacttggcatcactccttagcttgctttttacagtttggtagagatggtgtctcactatattgccctggctggtttcaaactcctggcctcaagtgatcctgccacctcggcctcccaaagcagtgggattacaggtgtgagcctcacttgatttttgcctggcatattctggtttattcttttacttttaaccttattttgtcacttggtttagggtatatttcttataaacagtgtataattttatatatttatttattatatattattgcatatagttaatactatatataatgtgtaccacacattttgattgtaataactaatatgttttggcctttctgttttttaaaaaatgctttttgcagtcttttttgtctatctgtaatagatatttaaattttttattttatacttttctttattaaattggaatgtctacccatgctgcctctcaagtatttaaaactattgttcaaccatattttgccaatggttaatgtatagagtgaaatagcctcttactccttgccacgtaagataaataatttttcttcttttcattcccccattccataatattacactcatgcttttatggtataatctgatatttaaaacttctacttattattattatatttttcacattttatcttctcttccaataaattttagttttcattttcattttgatttgtaatcacagttgtaacaattatttaaacctaatagatcttagggttcattgccagatctttattaccatggacatctcctgttgttgaattccttgttttgattaatgtcttaattacaaatatgaaaaatttaacacctgtttaatcttcttgaacaacgtattctgctttatcgcactttgcactttgtttcttttaatatgaatgacaacttggccctgctgttgggttttgcagaggagacatcagatatcagcttgatttttctctttttttttcatagataatctgatatcttctgtttggatgctgataattcttcaccatgaaattaaaatatatgtatgtatgtgtatatatatatgtgtgtgtgtgtgtgtgtgtatgtgtgtgtgtgtatatatatatatatatatacatgcctactgagcattttgactttcagacttgggtctgtcttctgtgttaagaaacttttttttgttttcgtcttttcagttaggtttattctgaattggctgcctgtcctctatatctgtcatctttttgtataatctgtcttagacctcacagtatttctgcttctgtatttttttcctcttcattttgagagtgctttctaaatgtgcccttcataacacatcttgtttcagaaataagttctcttgacttttactgcagacatagaatagatggtttctccaagttcaattatcacaatatcacacgagttgtttactgagcacagactgtcctctgtgcactgtgctaagcactttgtgtgcattacctcagaacaactccaaggggcatgtgctttgtttgtcctcattatatagattggggaaacgcatgtccagagggttgagccctactcagcctcatctgggtactgactgggggccaggactcaggtccagccagtttcacagcagagcctgtgctcttggccatgatgataatggcactttcccacccagtccttttttttttcaaatttatttattttgagtgctgcattctctaccttttatagttaagaatgttttcaaggtctggtgggaggttttcgtgttttgcatccatgaatgcagtcagtgtttgcctgtaaatagggagggtcaattctcttgggctcctctgctgtgcacctcattgcccatagaatgctactctcggatcttgcactagagcactggatgatgaagtgaagccttgcagagacctgtgagtctgggtgagtgagctggaaccatgaatagttccagaaggggaacttaatcctgtgatatttcttctctgtgtttggtaaagccactgcaccttgtgccaactgtttgcatctggcttgctgtttaacctggccaacatgccaggtacaaactgtgcttggacttgtcctccttcctggagctgccacctgctgtgtcagggacaagcccctgccctggccagttttcttctggatgtatctgccatgtgattcccagggcttctcagagctgctgctgctgctgaacactgctgtgatccatagtgaccagggagtcccggtgcctgatacttggctcacctccctgttcagccctactgatgtaggcagctctgatgtgaggttcttcaagg

SEQ ID NO: 618 - DNA, 4028 bp, Homo sapiens
gaaggcttgcttcaaattctaatccagactccctgaggtaggaggtaaaagtttcttcttttctgccttcagggctgtcatgggaaagtttgcaaggatctgggctagtctggcacccctctcggttgctcggttccccatcactgccttcccactccatggcttctcctctgcagggtgtagactatgatgaaggttacacttgaagagcagtgaaacagaactgggttccaatcctgccagctgcacagacaccatatctggagggtgatggggcaagggacatgctcactctccctttccagaagagataaagccatatgggcaacctgctatcactgtgaaaagtgagtggaataaattgtatagtgagtgaagtgtaagctcatggcggcagtgtaagaaacacattcttgccaggcaggcagataaccaagaaaggacaattgggaacacgtcagctgatggagatgctacccaattgtatccctatgtggagagaccctccagcaccatatcccagccacctgcgccctgccccccattggaccccctcttcactgtttgccaagctgaacattggacatgtcacatgttccctccctcagtgcctgacttactaaacagaaaatgcccagtgaaaacttaggtaagatgtcgcacagtgtttggcacttgataccttgttgctaatatggtggggaccccttccagcactgaaaaatcccgcagcacttgtggcagctcaaacagagaatgtaccagtcactggctcccctgagtttcttcagaaattgtttaaggagtgctggatccatgagggcagaggcttgtcccagtcactacactgtctctacctgctggaacaggtgcttagtatgtacgcctgctctgtgctgggcccatgactgcacaaggacagctgacttcagaggattgctcaggatcactgagaaattcatttggcaaaatattgtgaatttaatggcctcttcaatttgaaataaagccacccggctttttgaaatagagcttcctttgggagcttagaactaaattcttggcttcatagaatgccctagctgggtggacggagaatcccaacatatagatgtatctagaatgtcagaagtgaagtgatctgtctctccaaatcattggtgctagggagaaagaggtgagcatgctgtctttttaaaggattcaactaactctcagagctttggaagaaagaaaaaaaatccaaaatgtgtactaggtcagtttttatttggaagatggattttattgttatatttttaaactaggaagtctcttaccactcccattctccttccctggcctagaggggtgggagttcagatccctgcaacattttaacccaaaaagctcttacctgtttacctttctttgatagagttgccaagtggtcttggttttgttttgtttttcttttagaagagaggatctagctatgttgcctaggcttgtctcaaactcctgggctcaagcggtcctccagcttcagcctctcaagcagctaggattacaggcatgtgccgccacactcagctcaccgagcggtcttgaacaaaaaacccaaattggtccaagtatggattatacactaatgatatttatcaccatcactatcgttgtcattatcagttttattatagtgacttccagttcggtatctattgtgggtgcttggagcttttgcacatgtaatcttatttaatcctcacaccaacctaggaggaaggtattattattattgcccttttccaggtgggaaaattgaggctcggagagttgtaagtggcttgcctgatgacaaagggtgggtgagtggtagaggcaaatttgaactcagtgaagaaagagttcaggctttgctgtcagatggactgaagttcttctcttggtgtccatgggggtgccagagatgtgggggttcttctttctccttccaaatcagacgcaactgaaagtctgaggactcagcttcaatctgagctctgatttctctagagtatccaggatggaaaaggggatggtaagatgaagtttgcagggagggcttcctggaggagagggctctgaaacatgagagcattcgggcaaataggaagggcaggtattttggtggatccagaggcaggtggattcagaggtgggtggctcaagagtacgggcctccgtctcctcgtcttcctaagcatatttaactgtgaatgaagcaagacaagaggtgtatttctccatgtaagggaaatgctatgaagaaaaggcatttctggtgtcagaatcacgattgtcagtgggagtgtcaggaagaaacttcgtgactttttctctcttcccaggcgcccccagctgttaggtttcatggcaacccaatgtggtagaaggcagtttcttttccattcttgctgttagatttttatgttgtgtgaccttggggctgccttagggcctctctgtccttcatgggtctcacctggcagaggagggggatacacagggtgatttccatagggacttacagctctaaaatgctcgagtgtatgatctaatcatgatgacacacagtcagccacagtgaaatccctgacacatctcaaatttgaactgcatctttatgagtggaaaaactgtttcctgccccacaggacattttgatttaactaggacacacctgaccctggtctgctcacagacagagagaatttgttctgtggcccaaggcctctgcctgcccctgctcccaccccaccatgggtagcagtggccacgtggtacttgaggacagcatcctggaacttgcccaggagtccgctgcatgctggctttctctcttctgcagagacgaggggcccagatcgggtcagcctctgctcagctctgcagtcttgccagggggaggaggaatcaggctggggggcagggatagagggccgtgtgcatcagggaaggaggccctgagatgacaagctccatgagtcactcaactggccgctccagccagagagcatcaaggaggggtttatgacactgcctcatgcagcagtgatcagccatgaggtggcatccatccattgtcaggggacagtccatcctcctcaggcacatgcacagaggattgggtgcagaggagttcaccctcaacacctctgggtgttgggaggcaggagagcagtggggctggaggcacagctctgccaagcattcctgaaccaaagcaagccatcaatgagtgctcacaccgtgcaggcactgtgagcctgtgtccacatgatctcatcttgtcctcagggccatgccaagaggaggcactattcttcttcttctcagtttatggatgatgataatggaggcatagagaggttaagcaacttgtttgatgtcacccaacaatgctgaaatggggcaggatttggccctggccctccagagcctatgggcttaattgttgccttggtgggtcttagccttgagcctgcattagaacaacctggagggcttggccccactccagagtttctgatttcggtcaggtctgcgataggtctgagaatgtgtgtttttaataagtttccatttgaggtaaagcccagggaccacactagtctgtgctgtactgactcatcatcccgtctcagtttccaacctccaaaaccagagggttgagctttctaccagttctctccagttgaccagttaacgcagaaattccagccttctaatcacccataattatgtttagttttggacaacttaatatatgagagagcaatagtacttcagtaaactcctctactgctactgggtttctgtcacttgtctcctcttatttttgacaatttgatgttttgtgttgtgaggcttcctttgtgcctaaaagtcattgacttttagatactcactttggattatctccatcaatgtgaaacctcctgtgttgccttatttaatgtcttttgccttgaatttcacttgcttggataccattgcctttaacttgg

SEQ ID NO: 619 - DNA, 4034 bp, Homo sapiens
ttgaatcatggacctgcccatcagggtcatctgaggagtctcactgttggtggtttcagatcttccagaagaaactctaattagctctacacaagagccagaggggttagtcaccaaagagtgattcaccccatcactctttggtgaatttaaccaaatttaaatggtgatagggaattccttttacaattccctaagaggaaatgagagaaagagttggtctttcccaagcagcatggttttcagggacttgcttctcctggtgccttctctagtcagttgccaaatcctcgtggctcaactcttctccactgctgctgtctcttttctagttcaggcttccattgctgcttgcttggactcttgcagtactcttccagctggtctcgtgactctgtcatttctgattagtcatacatcttactacccacttaaactttctaaatgttagctaattacttcactttcctccacaaatactctttcatggctcctcattaaccaaaggaaaacaaaaagtccaaacttctcttcttggtgctcaaagatctccatcattcctccctgtgttcctgggctgcaacccacataactagtcacccctatctcctgccttatgtgggagttcattttatcttttctgctttcttgtctgtgtatcctgaaattccactcattcttcatggcctggggctaaagccaggaagcttctgtttttgatgttctaagttagaagtaacatctctctcctctaactaatgagcttccccccaaccaaagcttctaccccatttcctctctaatggcactaatcttttgtatcttctgttagggtttttggaatactagtgacatctcctagagccttgtaaagctcttatttgccttcaagtgccccccattgccagggcatggagccttgcacagggcaaatattcagcaatgttggatgaataaatgaagagtgaccaagggttgccagtggtagtcagtctttattttcaccccgcactgctatttgccctgtactcacttggactggttcctgctggtgagaaacttgctacccaggtaccacttattttaagcacatttatgcatttccaggcacgtagcaagggggcagcaggttagtgattcatgagtaggtggaaaaggtgattgccttgagagctgctgactcagccgccagccgttaaccctggtgctcctctgggccctgaatcagtgagtggatggcatgaatgaacagatggccaaggaatctcaggagacccgagtctcctggatttggactttccagcattagaggtgcacagcccagagcctcacagggaatgctagaagctgcagtataatcatggcacattttcctggagaaccagttcttcttgaaggtttgggaatgaatattattttgtattcaatcacatttgtcatgaggaggaataaaatatgcatacatattttaaaagataaaatgcaacaatttaaagaagcttcctggctggacatggtgactcatgcctgtaatacctagtgatttgggaggctgaggcaggagaattgcttgagcccaggagttcattgcatcatagtgcaatgagctatgattgcactactgcagtccagcatgggcaacagagtgagaccctgtctctaaaaatataacaaaaataaaaagataaaatttaaaatatatataaagaaactgtctgcttgtggaaggcttgcttcaaattctaatccagactccctgaggtaggaggtaaaagtttcttcttttctgccttcagggctgtcatgggaaagtttgcaaggatctgggctagtctggcacccctctcggttgctcggttccccatcactgccttcccactccatggcttctcctctgcagggtgtagactatgatgaaggttacacttgaagagcagtgaaacagaactgggttccaatcctgccagctgcacagacaccatatctggagggtgatggggcaagggacatgctcactctccctttccagaagagataaagccatatgggcaacctgctatcactgtgaaaagtgagtggaataaattgtatagtgagtgaagtgtaagctcatggcggcagtgtaagaaacacattcttgccaggcaggcagataaccaagaaaggacaattgggaacacgtcagctgatggagatgctacccaattgtatccctatgtggagagaccctccagcaccatatcccagccacctgcgccctgccccccattggaccccctcttcactgtttgccaagctgaacattggacatgtcacatgttccctccctcagtgcctgacttactaaacagaaaatgcccagtgaaaacttaggtaagatgtcgcacagtgtttggcacttgataccttgttgctaatatggtggggaccccttccagcactgaaaaatcccgcagcacttgtggcagctcaaacagagaatgtaccagtcactggctcccctgagtttcttcagaaattgtttaaggagtgctggatccatgagggcagaggcttgtcccagtcactacactgtctctacctgctggaacaggtgcttagtatgtacgcctgctctgtgctgggcccatgactgcacaaggacagctgacttcagaggattgctcaggatcactgagaaattcatttggcaaaatattgtgaatttaatggcctcttcaatttgaaataaagccacccggctttttgaaatagagcttcctttgggagcttagaactaaattcttggcttcatagaatgccctagctgggtggacggagaatcccaacatatagatgtatctagaatgtcagaagtgaagtgatctgtctctccaaatcattggtgctagggagaaagaggtgagcatgctgtctttttaaaggattcaactaactctcagagctttggaagaaagaaaaaaaatccaaaatgtgtactaggtcagtttttatttggaagatggattttattgttatatttttaaactaggaagtctcttaccactcccattctccttccctggcctagaggggtgggagttcagatccctgcaacattttaacccaaaaagctcttacctgtttacctttctttgatagagttgccaagtggtcttggttttgttttgtttttcttttagaagagaggatctagctatgttgcctaggcttgtctcaaactcctgggctcaagcggtcctccagcttcagcctctcaagcagctaggattacaggcatgtgccgccacactcagctcaccgagcggtcttgaacaaaaaacccaaattggtccaagtatggattatacactaatgatatttatcaccatcactatcgttgtcattatcagttttattatagtgacttccagttcggtatctattgtgggtgcttggagcttttgcacatgtaatcttatttaatcctcacaccaacctaggaggaaggtattattattattgcccttttccaggtgggaaaattgaggctcggagagttgtaagtggcttgcctgatgacaaagggtgggtgagtggtagaggcaaatttgaactcagtgaagaaagagttcaggctttgctgtcagatggactgaagttcttctcttggtgtccatgggggtgccagagatgtgggggttcttctttctccttccaaatcagacgcaactgaaagtctgaggactcagcttcaatctgagctctgatttctctagagtatccaggatggaaaaggggatggtaagatgaagtttgcagggagggcttcctggaggagagggctctgaaacatgagagcattcgggcaaataggaagggcaggtattttggtggatccagaggcaggtggattcagaggtgggtggctcaagagtacgggcctccgtctcctcgtcttcctaagcatatttaactgtgaatgaagcaagacaagaggtgtatttctccatgtaagggaaatgctatgaagaaaaggcatttctggtgtcaga

SEQ ID NO: 620 - DNA, 4053 bp, Homo sapiens
gtggagttgtgtgctgttctcttacctctggtccctgcttggaggaagaggctgaacttgtaccacctgggcaagccagtttgctgtgaccacacatggattaggtgccagatgaccacctggggaatgtgccagtcaggcagccaggatgcaaagtgattcgcttcccccttgccagtattttctagggcgtggtgtttgcccgcatcttctggtgaggcctggctatctctgaggggcagaccagcacacctgtgggtgcagcagctcacaggagtctgttgggcggcactgccaggccctcgggaccctgagtaaggtctgacgcatcagggcaggcagaggggaggccacatttcgcctgccactgatgttagcggggaggccccagacccaggtgccaggcgggcaaattgatttttcagcctgcgaaacttctaaagataggcacgggtggtgctctgtgctggcactgggagtgacaggccatctgtgagtcacagtcccgcccgctggaggagtgcaggtcctgggcaggcagcactgcggtgagaggggcccagatgcaggaggggagggctaatgcaatgagcttgagtcagccctgcttgccaggccaggatcctcctcccaggccggcaccaaggagagtgttctactgcctggctccaggaaaactgctgctgcctgtaatttatgcagtttctatggctgagtggagcagacatggcctgaatggatcattggagtggtttgtgcttccctcgccctgtggcctcacatatttaacaaaattggttgcttggtttatttcttgaatcatcacttgaaatctctcagcttcattctgaattcctcatccctcttctccccttgtttcctattttctttgaattatttggctggctctttttgatatttgtgacattatcttacatttatgcagcactttacagtttgcaaagctctttcacatacattatccaggcaacacatatttactaagctccaaggccttggaataagtgctaggctcccgggaggcagcagtgcattcgatagctacggtggctgctctcagggagacagtgataagctactgctaacttgtaggaagacaatagcgtgagatgatgctgagggtttctttgtgatggatgggaaaagcctctccgaggagaagacatttgaactcagaggaagccagccaggaggaaatttgggggaagagcgttccacgtagtagcaccagctagtgcaaaggcctggtggcaaggattagcttgcttgtttctgaaacagcaaaaacgccactctgagtggagtttagggcatgaggtggtgatggtgggggtgggggaaatgctgggtagggggaggctggcaggggccgtttttcagggctttgttggccatggtgaggagcttggatttccttctcagtattaggtgacatattggaggaatttaggcagccacgcgtgtgatctggttaacactggtgaagttcactcttgtaacagtaaggccagggagtaagggcaggagtggaagcagaagggcccctcaggccactgcacttgtcctggtgggagttaatagtggaacggtggcttggacttaaggctcaagtcggatataccgtctcagtccttactatctggaagtccaagatcatggtgttgacagggttggtttcatcacaggcctctctgcctagcttgtaggtggctgtcttctccccatgtcttcacactgtcttctcagtgtaagtctgtgccctaatctccttttcttataagggctccagttatattggatgagggcccaccctaatgacctcattttaacttaattacttctttaaagaccctgtctccaaatacagtagatgcccttatctttaggggttacattccaagaccccagtggatgcctggaactgcagatggatagtaccgatacctgtatatactgtgttttctcctacacaggcatatctgcaataaagtttaatttataaattaggtacagtgacagatgagcaacagtaatgaataataaaattgtgcaattataacaatatactgtaataaaagtcatgtgactgtgctctgtctcattacagagcacaaaaattcctcattgtactgtactgtgggtaactgaaaaaatgaaaagtgaaactatggataaggggggactgtggagtcctaattagggaaaaggagtcaggctggtgggaccaggggaaagcaagagataaagcagataagctataaatctgcctttcttcacgtccagagaatttaaacaaaagagaaaccagataagttacaggtctgcctttctttgtggcccagggcatatggcccaggatatatgacccaagacatttggccttcatgcccggataacatacataactcccgggcttcctgctcaccatcaaacacctcaatttatcaaacatccaggctgacagaggaatgcaagttaagctccctgctgccttggcattatcaatcagcccaagttccattctctaaaatctgcagcaagcttttgtcttctggaagttagcttctctcaggctaacttgcccattgtctctcaggcaacatatttccccactttctctaataaatctgcctttcttgacctatgattttcttggtaaattcttttacccctgtgccatcagcctgcattcgcccatgacagggacgactgtatagtcacatcctgaggtcagctgacagtacgcagatgagctatttaccagataagatgattaaataacagtcattaaaaagaataaccaatctttattgagcacttactagatgccaggcattccccaagcatcctgcttgctttatttctgcatcacagaaattctatgaactaggcattgccatgattttctctcccttagagataaagaggctgtggcttgggaagttttaataacttgctgtgttcacacagccaggcactgggagatctgggacttgcaaacgtgctcttttctgactccagagtccattttcttaactactatgaaatgcttcctttaagaacttgtcccagaagagaatggatgtttcaagttctgaattatacttgatttctttggcattgcagaaagtagacagatttcctgtatggtcctgtattaaacttgtatgtgaggggtttttgactgtctgcatcagtggttctcaaaatggggtccctgggtcaacagcatcagcatcacctgggaatttgttagaaatgcacattcttgggtcccagcccagagctgctgaatcagaaactgaggctggggcccaggacgctggtttaacaagccttcctggtgattctcatgctctatgaattttgagactgctgatctgcagcagccccaacatactcacaggtgtttgcatgtggaaattcaaggctcgatgtccttgaggaaccagacttccaggtttcaggtcggatgaggagtggagcagcactgctcactccatgtgttgttaatcggcgttatctccatgtgttggagatatgttatttccatgtgtttccacatggaaagtcatctccatgtgttgttaattggcgttatgccaaaaaggtgttcagtggtcaatatgtttcagaaacataggtttctccttttttatttttctaaagaagcagggcctttcttgttgctcaggctggagtgcagtggcgctgtcatagctcgctgcagccttgaattcctgggctcaagtgatcctcctgcctcaggctcccaagtagctgggactacaggcgtgtgcccccatgcccagctaattttttcttttttttttttgtagagacagggtcttgccagagaaacataggtttcttggttacagacctttcatatgttaattattattcttttgctgtttttgaagataacaatctttgtgcttcccaggcttatttgatcctgagatcctttgtttgaggagaagagaacaggactatgtttgagaaacctgcactccatagaggcttccagga

SEQ ID NO: 621 - DNA, 4043 bp, Homo sapiens
gcaggtgcccaccccacaccagccgctcacacaggcacccccgttttagcctcttacacttgcacagggggcccttcacctgctttgcagcaccggagccggagcccagacacatgatgaggcatgagaagtggaaagttctgcaggtgctctgcccaccgtgcaaaggaggaggcagaggtccagctgcctctcagcatatagaggctcagaggcctttgcagcatgcagagcttttggaacgtatcttactttctcattcttaaattcattcgggtaaccactgtttactgtgcacctaccatgggtcaggcgctgtcctctgcaccgggcatactgcagaaaacgaagcagatgcaggccctgccctcattgggttaggtctagtagtggagacagaccacagacaggacaaatagggaaacaggagaagccaggtggccataagtgcacaagcacaaatgaaacagggaatgggaaaaaatagtgctatggagggtgcatggagagaaagctctttgttaaggggagtttggagcagatttcaggaaagggccatgttgcaggcagaaggaagagcaagtgtggccaagacccaggaaggatgggaggagggtggctgtggcggggcggagtaggggggtgggctgtgggtactctacatgatggggatttcttaaacatctgtcagacccaagagactgtgatcctctgaagcccctggatatgtcaaattcatctcagtggccttatgcacccttcgcatgcacctggtataggccagtgctcagaaaacatttgctcctggagaagttgctggttcagttctgtgtggagctgctctgtgttccaagatctgcgctggctgcagggataacagggatggaagagaaccagcccttctcttgaggagctccctgctagtgagggtcaatcaagtgcctggaagttgtgtgtgggcatgcagagtgcatgatatgccaggtgccgggaagcctcccagcccaggggctggagggaggggcactgcttagtgggcagctctttggaggagctgatgcttgaacagagtcttcaggaaggagaggagttagccctgggtggggaggcagagaaggaaagagacactgaaagccgaggggtgaaccacaaatatttgggaaatggcaccagcaaggtgtacagcaggggtttccaaagagttcctgattccctcctcaaagtgatgggagccacacttcctggcttatcagttggtccttgccctctggctggtgctgtgtgtctgagaggcagcctaggaagacctctctggggagaagcagagaaagatagcgacctctgaacgtgctccccagaattcagtcaccccatcctacctatgagaggggacaaactggcagtctacaggtgtgtttggtttagcccatgtggcttcattgttttttaattttttttttcatcaattgcctatatttacaaaggagattttggataaaaatctggattgctagctgtttttgaaaaaataaaagattgaaaatgtacctttgtgtgcctgtgtcccctcatggtgatgattggtttgggcagagccattgcacgctctcctttcccccccatcccccggtgctgaatgcagcacccctcactcaccgtaacaggctggctcctgtagacacatgaccttggatccttttttggattaaggaagcaaacatgtaggattgtgcttctgcaaattctcagagatggcttttgagcccttaagctcttctggggcattctcatttctcaactagagctagcgggtgagagccctctctctgttttcatctgctgcaggacagctggacttcactgtatctcataaagaaaaggaggtggggtgggcagggccctaggctgtattactggaaaaaaaacaaaaaaaaacaaaacaggcagtagctcctggtttctgtaaaaatggtgtctagacgtgagtgaagaggcagaaggtcagaggggatttggaaatctcaaaggctgagcacagagcgcccacaggtgcaaggagaaagtacagggccagggccagagatttcctttctcttgttcctcagcttattcttaccctattccacccaccctgccactgccaggtgctcagcgagtctttattgaaagagagattattaatatggtgaaatgtctgagatggttctctctccgcatacccagtaatacagggtccctttggcttgtgggagtcacatgtggccattttcagtagttgggaagcctgggggccagctgggagttgtcactgcgttgggaatctgcctcctgggcctttttattaaggcgtggagttgtgtgctgttctcttacctctggtccctgcttggaggaagaggctgaacttgtaccacctgggcaagccagtttgctgtgaccacacatggattaggtgccagatgaccacctggggaatgtgccagtcaggcagccaggatgcaaagtgattcgcttcccccttgccagtattttctagggcgtggtgtttgcccgcatcttctggtgaggcctggctatctctgaggggcagaccagcacacctgtgggtgcagcagctcacaggagtctgttgggcggcactgccaggccctcgggaccctgagtaaggtctgacgcatcagggcaggcagaggggaggccacatttcgcctgccactgatgttagcggggaggccccagacccaggtgccaggcgggcaaattgatttttcagcctgcgaaacttctaaagataggcacgggtggtgctctgtgctggcactgggagtgacaggccatctgtgagtcacagtcccgcccgctggaggagtgcaggtcctgggcaggcagcactgcggtgagaggggcccagatgcaggaggggagggctaatgcaatgagcttgagtcagccctgcttgccaggccaggatcctcctcccaggccggcaccaaggagagtgttctactgcctggctccaggaaaactgctgctgcctgtaatttatgcagtttctatggctgagtggagcagacatggcctgaatggatcattggagtggtttgtgcttccctcgccctgtggcctcacatatttaacaaaattggttgcttggtttatttcttgaatcatcacttgaaatctctcagcttcattctgaattcctcatccctcttctccccttgtttcctattttctttgaattatttggctggctctttttgatatttgtgacattatcttacatttatgcagcactttacagtttgcaaagctctttcacatacattatccaggcaacacatatttactaagctccaaggccttggaataagtgctaggctcccgggaggcagcagtgcattcgatagctacggtggctgctctcagggagacagtgataagctactgctaacttgtaggaagacaatagcgtgagatgatgctgagggtttctttgtgatggatgggaaaagcctctccgaggagaagacatttgaactcagaggaagccagccaggaggaaatttgggggaagagcgttccacgtagtagcaccagctagtgcaaaggcctggtggcaaggattagcttgcttgtttctgaaacagcaaaaacgccactctgagtggagtttagggcatgaggtggtgatggtgggggtgggggaaatgctgggtagggggaggctggcaggggccgtttttcagggctttgttggccatggtgaggagcttggatttccttctcagtattaggtgacatattggaggaatttaggcagccacgcgtgtgatctggttaacactggtgaagttcactcttgtaacagtaaggccagggagtaagggcaggagtggaagcagaagggcccctcaggccactgcacttgtcctggtgggagttaatagtggaacggtggcttggacttaaggctcaagtcggatataccgtctcagtccttactatctggaagtccaagatcatggtgttgacagggttgg

SEQ ID NO: 622 - DNA, 4050 bp, Homo sapiens
ataataaactaacttcagataatgagaactggttttagaatatgaaacaggctaaggggatagtgatgtgagtgcaatggggaacctgttttatgtagttggccagggagggtctttctaaggaagtggccaatgagtggaacaagatcaacttgcctggaaaaggaaactatgggggatctttgagggaacagtacttcaggtgtgtggaacagcagctgtgaagcctctggggagggaacgaggctggctgctggagagtttccttggctaccctgattaacggcccctcttcctgcctcccttccctattttattattttctctggggcatttgtcaccatcttatatttgtcttaacacaccttatatttctcttatcagtttggcttatcgcctgtttcctcaactacaatgtctgttgcatggaggcagtactttacctgtgtttttcagttctacaccctaggaatgtgcctgggaaatagtggtgcttgatacctccttgttgaatggggaaatgaacaaatgcatggactcagcaagcaaggcagacggtgggaggagatgtgaccaggaagatgggcaggagtcggagggggagaggctgagaacacgggcccttcagtgtctgtgtccttgtctcactgctgctgggaggggctggcagaaactggccttcttgccccatgagccccaactcagcagaaccacccagcaggtcttagcatccccagcctggctgctcccagtggatgcaatgctcattaaccatggagctggtaataacacgcccatgtcctgcactgcactggtgcctcaaatctatgtgttcagccttggtgtaaaatcactaggagccagggacagagggattccagggaccccacgcccagggggcctgagaggctcatccttcgtgtcagcttgtgttttccaggggtggttttgcctgcccggttactgctgtggaattgcctctggcccatttatggtggaggcctgggttccggtgacactgctttctttctgtacaccttgaatgaggtcaggcagctcttcatagagggaggaactcttcctggagtgccaagggtagggtctgcctagtcccagtctctccagcctgagtttgcatcagggagaaaaagcaccagcacctttttcaccaatgcgcccttccccacattcacacacgcatgttcacatgcatgcacatgtatgcaggccggcttcccctcaccttttgttttttttttttttgtaaaaaacacacatccctatgtccacaaacaccctcaccctcacttcctccctcatccacagacacctgttccccagtgatgcacatttgctcacacacctgcagctgctcacacatgcctgcatgagaggccctctccacccttcagtctcccgtacaccggcaggtgcccaccccacaccagccgctcacacaggcacccccgttttagcctcttacacttgcacagggggcccttcacctgctttgcagcaccggagccggagcccagacacatgatgaggcatgagaagtggaaagttctgcaggtgctctgcccaccgtgcaaaggaggaggcagaggtccagctgcctctcagcatatagaggctcagaggcctttgcagcatgcagagcttttggaacgtatcttactttctcattcttaaattcattcgggtaaccactgtttactgtgcacctaccatgggtcaggcgctgtcctctgcaccgggcatactgcagaaaacgaagcagatgcaggccctgccctcattgggttaggtctagtagtggagacagaccacagacaggacaaatagggaaacaggagaagccaggtggccataagtgcacaagcacaaatgaaacagggaatgggaaaaaatagtgctatggagggtgcatggagagaaagctctttgttaaggggagtttggagcagatttcaggaaagggccatgttgcaggcagaaggaagagcaagtgtggccaagacccaggaaggatgggaggagggtggctgtggcggggcggagtaggggggtgggctgtgggtactctacatgatggggatttcttaaacatctgtcagacccaagagactgtgatcctctgaagcccctggatatgtcaaattcatctcagtggccttatgcacccttcgcatgcacctggtataggccagtgctcagaaaacatttgctcctggagaagttgctggttcagttctgtgtggagctgctctgtgttccaagatctgcgctggctgcagggataacagggatggaagagaaccagcccttctcttgaggagctccctgctagtgagggtcaatcaagtgcctggaagttgtgtgtgggcatgcagagtgcatgatatgccaggtgccgggaagcctcccagcccaggggctggagggaggggcactgcttagtgggcagctctttggaggagctgatgcttgaacagagtcttcaggaaggagaggagttagccctgggtggggaggcagagaaggaaagagacactgaaagccgaggggtgaaccacaaatatttgggaaatggcaccagcaaggtgtacagcaggggtttccaaagagttcctgattccctcctcaaagtgatgggagccacacttcctggcttatcagttggtccttgccctctggctggtgctgtgtgtctgagaggcagcctaggaagacctctctggggagaagcagagaaagatagcgacctctgaacgtgctccccagaattcagtcaccccatcctacctatgagaggggacaaactggcagtctacaggtgtgtttggtttagcccatgtggcttcattgttttttaattttttttttcatcaattgcctatatttacaaaggagattttggataaaaatctggattgctagctgtttttgaaaaaataaaagattgaaaatgtacctttgtgtgcctgtgtcccctcatggtgatgattggtttgggcagagccattgcacgctctcctttcccccccatcccccggtgctgaatgcagcacccctcactcaccgtaacaggctggctcctgtagacacatgaccttggatccttttttggattaaggaagcaaacatgtaggattgtgcttctgcaaattctcagagatggcttttgagcccttaagctcttctggggcattctcatttctcaactagagctagcgggtgagagccctctctctgttttcatctgctgcaggacagctggacttcactgtatctcataaagaaaaggaggtggggtgggcagggccctaggctgtattactggaaaaaaaacaaaaaaaaacaaaacaggcagtagctcctggtttctgtaaaaatggtgtctagacgtgagtgaagaggcagaaggtcagaggggatttggaaatctcaaaggctgagcacagagcgcccacaggtgcaaggagaaagtacagggccagggccagagatttcctttctcttgttcctcagcttattcttaccctattccacccaccctgccactgccaggtgctcagcgagtctttattgaaagagagattattaatatggtgaaatgtctgagatggttctctctccgcatacccagtaatacagggtccctttggcttgtgggagtcacatgtggccattttcagtagttgggaagcctgggggccagctgggagttgtcactgcgttgggaatctgcctcctgggcctttttattaaggcgtggagttgtgtgctgttctcttacctctggtccctgcttggaggaagaggctgaacttgtaccacctgggcaagccagtttgctgtgaccacacatggattaggtgccagatgaccacctggggaatgtgccagtcaggcagccaggatgcaaagtgattcgcttcccccttgccagtattttctagggcgtggtgtttgcccgcatcttctggtgaggcctggctatctctgaggggcagaccagcacacctgtgggtgcagcagctcacagga

SEQ ID NO: 623 - DNA, 4040 bp, Homo sapiens
atctcacatactcctgctgctttcctttgtgagtggagacctcgctttctttataggtggtaacagctgtgttctctagagagtgaatttttgcaccacaacccctattctcacaataacttcacttggacatcgaggataagtttccatgtgagaaatattgtttagtcatttattttaaaaaagcttttaaattatttaaaacaatttgtgggttacatagtaggtgtgtagatttatggagcccatgagatgttttgatacaggcatgcaatgtgaaataagcacatcatggagagtgaatattcatctcctcaagcatttatcctttgagttacaaacaatccagttacattctttaagttattttaaaatatacaattaagttattattgactatagtcaccctattatgttatcagatagtaggtgttattcattctttctatttttttgtatccattaaccatcctgcctcccctccaatccgccactccccttcccagcctctggtaactctctttctactctaatttgattttttagatcccacaaatatttttacttttcaagttgaactatataatatgatactaaaacttgaacacaccacaaagtatatgcatattcaaaactgaacacacccatggaactaacatccaaatcaagaaacatagctgctttacactttcttgaaataagcacttacctggagatgcaaaggcacttgcgtgctctttcagtagcatttctcttctccagcatcttcccttgacatcagccttgcctgcacattgcccagttgggcaaatttctctcccaggtagaggttaccaggcttgcattccctatgttttagcttctgtcttggtctttctgtgtgtttttatacctccatttgaagcaaacccaacacatgaaaagctatatttaccaatgggaccaactattggggcagtgtctacttactatacatatttttaaaaaactgtttctttaaattggagagctccaaggtgactgatgttaataatttataactatttattaagcacctactatgcggttctgtggtgtgattgcaaggggggggggcacgtccaaggttgagtaagacatagcttctgttcttaaggatgtcccagtctagaagtggagataagctatgcatgagcttgaccaagatcttgctacaatgaaagatagctgggaagagcatgagagagttcaggggaggaaaagaccactcccacctgtggcatggagggtcattcaggaggactacatagaggagggggcactttacattggcacttagaggaatctgccccttgatgggacccaaacttacatttatgatgtgaaaaatggaaaggagacttgttatgctttaacagtaggtgttgctatttaatgtatgaagcttactcaaatggaagagtttgggtttattaaaggaaattagaggtctctgtgttagcagttctgtatgttcaaaatgtgatacaatgggtttacttaaaccattggttgccccaagacccctttcttgaggaattggcagcttggcagagtttgcacctttgaaggctgccctgcaaggataaagacctccatccaaggggaaaggccagaagcaggctcagagctaggtcccacaactctgcttccctgtatccggcccccctgccagctcactcaagcaagccctgtttctgggcagcagcagctgtgaggtgtgggtgaggggctgttgctaggagcagggatccagcttgccttttctgacacgtgtgtttaaattagcatctttaaatgctgttcccgacagttattcaattttgaaactactggggattttggggcaggtggagagtgttaaggaggaggcgaggcaaatgaaaaggcaaaacatttgggggagtttttgaaaaagttaaataaggaaaagagtgtcagctgggggaaagcacatctcaggccccattgcaggaccccttccccagtggagtcatagagtcccctactctgccccaaggtgttggagatggctcatggctcatgggaatgtgcaggaagtcccctgagtcttatttatttatttatttatttatttattttgagatggagtcttgctctgtcacccaggctggagtagtgcagtgacatgatcttggctcactgcaacctccgcctcctgggttcaagtgattctcctgcctcagcctcctgagcagctgggattacagggacctgccaccacgcctggctaatttttgtatttttagtagagataggttttgccatgttggccaggctggtctgaaactcctgacctcaggtgatctacctgcctcgacctcccaaagtgctgggattacaggcatgagccaccgtgcctggtccctgagtcctcttagggtctccagaaatcactatatcaagtgaggtttggggatgggcacatctaagtgataaccacccactaggcaaaaggatcctggtgttgggagatggggtgagaaactggggtgggtgtcattcattcaaccgagtcatcactctcaagggaccagatggagaaagggaatataataagaaaaatgatgatgcttaaaataaatattgataatgcccacattttcagggaacttctatgtgccttagatatttatttatccaagagcctcacttctttttacttgtccgatccttacagcagatctccaaagaggttctctgttatccatggtttacagatgaggaaactgaggcacagagaggcagttaaatcacttgccccaaaccactgaagccataattggcggatctgggattgaagcccaagcttccgggcactagtgtgtgggcctctaatcttgcactttgctgccaccagaaattaggcaccaggatggtaactgaggaaaccagacaagagtgagaatgtaggggtggaggatggaagatgggtatcagggaggttttctgagttgaagacagtctgtcctgtggcttcttaaaggttgctttcagatgagggtgacacaaaggtgtccccctgtcctggacatgatttagaaccctatccacagagaacatgccaaattttatgcacctcagggcctttgcacatgctgttttctttggctggaatcactgttctccctgctttgtgtgttatggttctttctcatctgtcacacttagtttaaagctgcctcctgcagaggctgacacgtcgtagcagttgctccatgaaagtgttgagtaaatggatgaagaataaagctcttggcctttcagggaataactataatgagaaatttggaagatctttctgcagctgagcctttggaattttgatgtcttccaaaagctggggttgttaggagaagaggtaccaaagtggggcttcatctgtaaagacccagctggagctcttgttcacgcctttccctgaggctggaaggtctcttggatgtcacaggctgcctctttaaaatggagacagtggtggactttcctctctgttgaggatgggaatgaggatgagggagcaggcttggggtgagcctaccatccaggggcagtgaactttatatggcgtgggatgaccagtggcctcccctggggtggctgctggatattggctgatggatggtagaggaaacactattctcatctcaattcctggattggtgtgggggccaaatgagatcccatcattcctaattaagatgtagttacattaatgataaagacaacaatggcagctaatacttagagagtgctgctacctgctggtcactgtgccaagccctttagtgtgccttatccttgagtcctcaccagcccctatgtgcaggaacctgctgagatgaagtgacttgcccgggccacacacctggtaaagttggaaaccaactggagccagccccagacctcacattgcataccccagacctcacactggataccctcacactgcacaccctcacactgcataccctcacaccacatatcccagacctcacact

SEQ ID NO: 624 - DNA, 4043 bp, Homo sapiens
gggaatagcacaggaaaggcccagaggtgagctgggaaaccacaggcagagtggtgcagggggaaaaagaggggagggcaggaacacagtgggggaacttagtgcataacaacaatgccctcaacccttttgcctggctcttcaccacgtgagaggactcaggggagaagagtctgagtgctgtgccctttctgaattctttttttttattattatggtaaaatatacacactataaaattgaccattgtgagattttaagtatacaaccagaattctgttcaaccatctgtgctacttacttccagaaccgtccagcactgcagatggaaaccctggaccaatggggagtcactgccgttctctcctccatccagcctgagaacctgtgatctgcttgctgcttcttgaggcctatttggatatttcctatgagtagaatgataggatatgtggccttttgtgtccggcttcttccacttagcataatgttcttgaggttcacctgtgttgtggcatgcagcagtactccgttcctttagttctgtgcatggccacaccacatttttcttattcatacatcagttgatggacatctgtgttgtttccgcctttggctattgtgaatagtgctgctatgaacacttgtgtacgagcttttgttggtatcttttcttttctttttttttttttttgagatgggctctcactctgtcacccaggctggagtgcagtgacacaatctcagctcactgcaacctctgcctcctggttcaagcgattctcctgcctcagcctcccgagttgctgggattacaggtatccgccatcacacccggctaattttttgtatttttagtagagacagggtttcaccatgttggccaggctggtctcaaactcctgacctcaggtgatctgcctgcctcggcctcccaaagtactgggattacaggcatgaaccactgtgccaggcctgtgtttgatttggggtatatgcctaggaatgggattgctagatcctatggtaatgctgtgtttaacttattgaggaaattgctggattcttgaggatgtgtttcaggtccaccctctgttgttgccttgaccttgttacttgctctgttgggtgcaagctctgaggcatgggctagacaccttgtgccaggtcctgttttccatcctcacaagcaaccccaggtggtgggcactcttcttggtcctggttttcagatgaggagatgcaggcacagagtggttaagcatcatacccaaggtcacacagcttgtgagtagagggtctgggaattgaacccagacaggctgtccagagtgcagtctctccccaacacaccccatggtgcctcagagacaggagtcccatagacaacatcctggatggagcctgtagcctcctgatggtggttggaggctgtgcgcacagcatggagcccgagccagcccctggggatgagggctgcaccagggcccactcagccaccctccaccctgtgttctttccttgccttgcctcccctctgcactccttccttgtgcctcctcctcactccccaccagcctcacctctctctcgctctctctctttctttctcttttaataaatggaaatggtttatgggctcttctagaaattgcacctgccttctggttataactggggagagagagaggaagagacacagagaagagacagagaggcctccttcagcagatctgggtatgcccatgggacctcctggcctggacatcctggtggtgctttcaggcctgccacagaagtgaccctgagttggctctggctctaatgtctgagagtgccttcttcccctctccccctgtgactgcctgcaggacagcgcaattcctctgccattgtgtaagcagcccccacagatgatactccatgctagggaattaactacttgttgaaaagcacttgtgtgttcccctggctgaggctgaaagtgggggatccctggggaagggggtggcctggctatggatggggagaaggccctctggggaaatgaagaggggagccccaagccagttcgtcctgtgggagctggcccagattatggttcataatgtaaatttgggagtatgccagggccatattaatactgcatgaggcagtaaggggaccttgggcttgaaacccgagctgtggcctagaatggaactgaacagtgggccttgtcttaaagggacatgacgagctcccagaagtatgtgtcggcattatttccctctaatgctgtttactatatttgtacacaatgcccccaaaggatttgaaaaggaaatggcaatgtaataagagaggtattttttgttgcacatgcgagcatgctcattgacttaattattgtttcttttgttaccttggtgaattagagagggggagatatggagagggaggatgggaagttggagagggggaagagagagagagagagaggagaaggaaacccatgtctactgttattttgctgaaatctatctcagcgagtaggcagattgagaaatcaaggattcattcacaggtagaaaaaaatgaataacactttgaaagctcagaaaatcaacacaacagagaattcagtttcaaggtgccacttttgactcttctgctgctctttgaattgagttcatggctgtgctcatcgtctccatggagaagggcaagtcagtgccatttcttgtaggaatgatcgggccactaacatttgtctagaaaccaagcaaccgaaaagtgcaaatatctggatgctattggcttttgagaaagaaaggatgtcaggcatttatttgaaagggtaacctccatccagatagtgttgtagagcattttctcagacattagaaagattcaactgtgtacagtagttttagtgttgagtgtttcagaatattttcattctttccaaattgggggtccactacattagttagatgcttttgattactaatgatcaagaacactgactcaaattggcttagacagtaaggaaatgtatctcccataagagaacagagttgggggaggaaaggctccactatggatggatcagtggttcagtgatgtggatgaggccctgggccctttcttttcttcaccctactgtccttagtgacagctttataccaagtctgatttctctcatggccgcaagatagctgcagtggttctggacatcacatctggacatggcaatgtccagagtcaaggcagggaccatctcttctggtgaggactttatatatagagaaaatctttctccaaagcccccgatacttctcccatttttctcattgaccaaaaccaggccacttgcctggctccaaatcagtcagtgtcaatagaatgggaatgccctgatgtaaactagacaggacccaccagctggtgagggaatggggtcagtttatctgaggtgcaagacactgtggagaaggagtgggaacctggacaagatggggccatgttagtaacgaggaggagggtgacatcttttgcctccatgaatagcaaagggcagttctcacttaactggggtgcacatggcatcacagaatgctagaacttggaagggaaattagagacaatcttcttcaatcctttcattttacacatgaagaaactgagctccaggaatgaggaggagttgcccaaactcatggatccaccctgggccccaggcaccagctgtgtggggccagtgggccgttgaagcactctagtcaatgccacacagcctgggagcagtaccagaacccagggtgggaaaatgttggcagggcttccagaaactacttgtagggcctgtcattttcattcaataaatgtattgatcaaccattgagtctccaaccctgcactttctgggtggttatgagaaagagtaaagttaaagaagcctcaaggcatctggaagagaacgggttccaacctgtaaggacatattccaggctggatgtgctttctcttctggagataattctcattttggtctctttttt

SEQ ID NO: 625 - DNA, 4046 bp, Homo sapiens
tggggaagagtggtgggatgcgggaagaaagactggtccctgtactcaaggagattaggatccttagggcttttacttccaacatttactgttcctcctcccgggatgcctgccttcctcttgtttggcttgtgtttgcaaatgaagcagacaagttctagagaagttaaatgatttgtcctaagtcatgtaatcattgactagggaagggaaactagacccggagctccagcttcacgggtgccctttctcctgtgtcatgcagccgcttctgtgtgttggctagtctgcccagtagactctgctccttggggctctggttgtgtctgaccttgttgaatcccctgcatgtgtagtatgaccttgttggggtgtctcaacactgggcatgttagcaacactgagggatgaaagcactgtcatgccctggatggtcagccctggtttgttgaatgcacgagtgttcatatgtcagaaatacatatgcattcactctacaaatattttcaaacatttattatgttcccagcataatagtagagcttctactattgcaggggagaaagtcttcaataaaagttatagaataattaattacagatggtagaggagctaaggaagagagtgatttcaggttgccaagagaacatactcagagaggcatgatagcttttggggaccctgtcagtatcatcaggatagcccggactcagaagttagtctctcatagagccaataggaaggttttggcaaatctggattttttcacttgcattctggttttggttctgctattgactatcagggttactttgaaaaaaccatttgcttctttatgtcttgcttgctttatctgtaaaatgaagaggttgtaaaattcttctgtaaatcatttaattaccaccctcttcccccatggaaacaaacctagaaaatcctaactttgctttaaaaatattcagtacatggaatattttagtgttcatgttttctcttttgagtggggtttggccattggctggttcttggataaaatttggagggaggtattctccaggcttaaatgagtgaaaaagtctgggaaaaaataaaccaaccctacctccttcccacccaaggagtgtcctttgcatctggcatcgctgtgttttcattcgctggtcagtccctcatctgctgccaacctcttcccttcctggcttggtcagaaggtccagagagcccactgtactggcggggagaatctgtcccttttgcgcacatcattgggaactcaaagtcatctcgtgttggagtcaaatgacgtgttagcacacgcctgcttgggggatcctcctgcagttggcatattgcgtgacacacggggggattctcatcgtgctggaatgcatggccagccccttctttctccaagcacagttcagtgcattttccccccagttgctgcttctcgtaggagattatttctgattcgtattgagttgttactggaaaacacttcagagagataatgagctgggtagttttcctcttcatttttctttgttgttgttgaattcatatgggtaactgggctctccacttacactttattgattcctgaatttagggcatagctctgtaattggcaatttcctcagtgccacgtgggcagagagaagtactgtgcctggggctgctgactctgcaggaagctgtaggggcacttccttttagccctggactgacacagctgagtgcccgtgggcaagtcccttgttgcctctttcttggctctggtttttccttgctgtcttgtgaggggtcagaccagatgactttgagcaccagcccttccagttcttgaattttccaggctaggttggaagcccttttctttggtgggtttatgcatgaagggccgggtgtttctgtgttcacggatgacactgctgatcccatgtgctcttgtcattgttttccttggagggctgagggatgtgtgctgagtcacgcacatgcacagccggagtcccttgtgactaagctgtgcatttgcaggagcgctggcagggtcggtggtacagcctctgaactgggacagcttgaacccagcgttgcctggagtgggaataaaccttgaccttgctggcgtgggtgaggggcacctgcccagggagctaactggtctggactcatacagtgctctccttctgtccatttcagtatgctggctgtcagctttgtttatgcatagatgaattactctcatttcagattatcgtggaaaatcttgctgtcaagttcttaggacaggattaagtagaataggtgataaaggtcattggcattatttacaatctcttgactttcattcacccccatctgctgtagacaagctggatgcttacaagagcggcaaagacttgggacttagaatcaggcacacccaagtttgaagccccgcgtggtgctttctggctgcgtcaccttgaacgcttgcttccccaagtctcggtttttctaaaatggtaggaaacagctttgtttggcctaagaggtttgctggtggagactaagtgagctactgctgtgttttgccacacctcaatgctggtgggatgcaagatgctttgaggagggacacagacgaatttcttattatagttgtgtatttgaatacacttgtggaaaaatagaactagtacatcagagctcgtgatttcacagatattattgcccaggacaatgctaatttgaaaaaatcgagacaatttcaagttgatttcaaggataatatgcactgaatattagtgcaggcaggcaggcggggcagaaatcaggaagatgggagagaatgacagaatttggagtactactgagacctacactacaggtctcctatagaacatgtggtgggagcagaataaatgcatctttctctttgtgtctgtcctggtacaaggaatgtttggggcattggtataagaagctcccagagaaaaggtgatggtgacttagctttgtgcactgcatcaccctcacaggcaacgctgtctgctctaggcgtgacttgcactaagtgaatgtggacaagatggccactttttctagatccttctggggaagctgttagttgtaatagtgttagaacctaagagctagaagagactttggagatgatttactgcattttatgttagacttagacaatttttttacaaaagggaaaaattaaaaagccccagagagacctggacttactcaaagccacacaagtagttgagcacagtggctgagatgaatcattttgtgtctttccccaaggatctctctttccttgtccctctgtctatcctggtcaatagcatcattgtttgaagtgagtttttggaacaggacccagctgcattcggtgggttagtccagcaccacaaggatctgtcctttagcattgcctgtgtctctggccttctcgtgttagttagaagattgaggaggcaaccatgtagacactgctggaggaagaggaaacgaatttaaaagtcacaagttttggcctcagatgcctgtggtgttgaacattattagctttgttgtcggggcatgcgcctgacctcccggagtctcaatttcctcctctataaggtggcttttacctctgcaggtttgaatgaggtaagaggtggggagagcctagtacttggctcccttgaagaaagtagcggagactgaatccaaggccaggctgtccactccaaactgggattaggatgtcatggttcttcagcccctgactttcctgacaaaggcccacgtgggggctcttggttggcctggtcactctctgcttggggtgtcctcattcttttccctggagaggttctgggatcaggggtgagaatggggttaagttatctaggaattgagagtcccttcttcataactaatttttctttcctatctcatgacttctagataatagtctgtagttttaactcatttgttatttatataatttctctgtgctcggctctaagggtataagagtaaattagatctggccc

SEQ ID NO: 626 - DNA, 4035 bp, Homo sapiens
taattatagcttatttttacattgttaaggctgataatatctaacaagtccctgagttgtttagtctcaagcatgtcccctacgtaggaattcaatttccagttgtattctttctgttctagtttactcgacaatctaaaatgggattattttggtctttgatttgttttctttgacctgctaacttttctgaattcattgaatatatgtttttgttaatttcttctatagcattaaacatttgcaggaattttctttgtttctttggttatgttttcttctagagaggttcttcatcatcataatagcacaatatgctattatgttccttattttcctcctgtagtgtgtgttcacaagtgccatattttttttatcttgcatatgtttaacttgggtagctctgtccacttcttctaatcactctgatattgagggcaaattctttaggactccttttgtgacttacctgaaacctctgccatggtgtcagctccagtttgagatgctttctgatgcctgggagcattataggggaacatgggagatgagggtggtcagactcagagctgtgtgctcctttgggtaggaccacatttaactcttgcatgactttgttaaatgtgctgttccagggctcattccactaatgaggggatataggaggggatgtccttgccatttagatgatcccctcaattaagcgttgagccctggaacctgtgtttctgtgagagaaagagagagagaatgagagagagagaaagagagagagaatgagagagagagaaagagagagagtcttgattgttcatgctgctgttttatagctctttttctaatagttctcaatctgtttccccaactctctccgtattaagtcagaaaagaggaagaaatgatgtcacactcacagtctgcttctctgcaaatatatagtaattagtgagaagtctaaagattttggcctcagcaataatacttctgaagcatggggtggggttaggaacctgacaacttctgccaaatcctgttcctgcccccaccctcaccccaggtcttttagatgttgatagtatgagtgtgtgccagttccttgtttgattgctgcttgcttttctccttcacttattggtttttgtttttttgttttgctttgtctgattatgtattgggacactctgccatctttctccaaaagcctccctgcgtatcttttaaaaaaatacaatttcctaggctcaacacagagctatagaattagattcccttaggggagggccacagaaatttatatttttataaaacttccaaggcgttctaacaatcagccaagtctgggatccattttaagtttcccctaagattctttccagtgctgagattctgtggttcattgtgttctctttaagaaacagggagggggtgttagcacagggattctgtcatattctcaggcatggcatcctctcactatgcagaagaagggcttatgtctctctttatgccaattcttccttttgtcttggtccatttgggttgatataataaaaatgccttgcactgggtgatttgcaaacagtagaaatttatttctcacaattctggaggatgggaagtccaagatcaaggtgcttgtggtttttggtaagagcccacttcctgcttcatacatggagccttctgtgtcctcacatgatggaagggaccaggcagctctctgggacctcttttatagagcagtaatcccacttataagggttaaaattgctacatataaatttttggggagggacacaaatattcaaaccattgcaaagggataaggttggaggatcttctcatttctctttgtcacaatgacctaaagataccctccatgttttagcaaacttgcccttgagttagtgaatggataagttgttctcaactctggctgcacattaaaatcactttggaagcttttaaaatattgatgcctgggcctcacccctaggcatgtggagttaattggtctagggtagggccaaatcactggccttttctttgagttccctaggtgttctatctagcgtgcttccaagactgagaaccagtagattgttctttcttatttttttagtgactcatgatccattctccattttccttactcctatctcaagccttgattttggaacatgtactttctacacactgaatagtttctaaggtaatgttacttagaacaatagagtcacgtagtttcaagaatgggctttggagtaatagaaatccaagtgtgggtcctttttctgcccctgctgcttgtgtgagcttgaacaagtaacctaacttctctatttcacagtctcatgcaaaatagggattttaattctaccttgcattgttttgaggaacaaaattagtttcatatcatattaattacatgttacactagttttcttgtgggtagagtttttctgacatattattttttgtctttttattgtcaatcttttaataaggcttttctatatgtttcttacaatcatcaaataattgaattttgtttaatgttttcatctggtttgataatctctgtcttttaataggtacgtttaattcgtttatacttaatatactcactgatacaatatgtgagttttttctgctgttttattttgggtttctttgctcctctttccccctttcctgtcttatattaaaggaattgttccatatttcttctttttttaaattttgttggttcataagctgtagatcatattctgttctcctagtgattactctttttttttttgagaggaagtcttgctctattgcccaagctggagtgcagtggtgcgatcttggctcactgcgatctctgcctcctgggttcaagcgattctcctgcctcagcctcctgagtagttgggattacaggcgtgcaccaccacactcagctattttttttgtgtatttttagtagagttggggtttcgccctgttgaccaggctggtctccaactcctgacctcaggggatcagcccacctcggcctcccgaagtgctgggattacaggcatgagccaccatgcccagccttctcctagtgattactcttaaatttttgagatacattttcataattctgggaacattgaaagtgataacagtatttttactcaaataatgtattcaaaatattcagcacaatgcctgacagtcattaaaatgcataataaattccaattgctagtgctagtcttactactgccagcactacaattaatattaccatttttacccaaagagccactaagtattatttttatccataagtatggtatcaagaagatgaacattgtgaaagttatatgaacaaattatagtctgaacagtgccagtttttcccaaaggagtttgctcatttgtaaaatgttatactgattattcaatgaggtaagttctgcagagtgcttagcccacagtaggtgctcaatcactgttagcctttatatggataccaacctggacttcccttttaaaacaccccagctttgccttattgctctgcaagccagttctaggcatgtgtctctttggctgtgaccctggatccaaagcttttggggactgagtgtggatgtgactgctctgctccacctggctgggacatagcaggacaggcagcaacccaggtctgtgaaatcaatcatgatgattctgggaggaattattggtgaattagggggatgctccaagggatggtccagatggaggtaggtgtaaagtggagttttgctggaaggagttgtttttgcacaacatattgatttccttggggtgggagaaaaaagaaacagcagctcttcgctgctctcccagagtggtgggtaggagaggacaggtgggagtctgtgggcccctttagctggttatttttttagatgtaccatcaggtagctgcaactgtattcccactgcttccccagcaatgcaaagggcagattacgaagcagagctgggctggcagcaagttttgctttg

SEQ ID NO: 627 - DNA, 4043 bp, Homo sapiens
tgggcccggttgggcagcctgtcttgggtgagtttgggttactgtaaaagctcagacacttgggttcttggctctgtatgccctccctccctgtcttcctaaagccaagaaaaatgaaaggcgagggctgtctgaactagggtgtgatatttaagtcttagtgggtaggttgaaatataacggagccgttctgttcattgagccaagcctgtggactccttaataatccatggtcgggattgcagccctgtggggaggcagtgggagccttcagcagcttgaaagtagatgtctggattccaggaggtacaagcttccaagaaggaaattttcgtagctcatctttgcacaggaaggttttaatggaaatttgaacactcctagtaaacacccttgctattagcatctttcattttgacagaggagttttcttcctctgttctgatgggttatccaggctgggctgggttcctgtgtggagttatgggctctctttagggaaacatttggtgtggtagaaagatcttggtttctggaatgagatttgtgtcttgaccatgtgccattaattgtaggtaagatcctcaggcaaagtctttgacttctctgagctttgggtctcactgttgctgggtgatggaatgagagtgggtttacaaagcaccaagcacagagcccgacacatagtaggtagcctagaagggaaaacagaactccagttgctaatgcccaggtctgccccgccatctttggggctgggttatctgtgtgctcccctgacagggagccacccaggattcactttcaaagatgggaaaggaggcctgaaggggacatgctaccacggagtgagcaggcattcctaagagtcggtctgtcctttcctctcccactggagatactcagccagtgtgggggccatgcagcaccggggaagggacacatgtctgggaatattggggataaccttgtgtgaaatttttcagaacaggccggcagtggcctgggacatggatagctcaggctgcctgctttgctcctgtgcttgtcctcgtgacttagattcttcaagatggaggggctccctggctggtcccctacacaaggcccctatatctgtgctgggtggtggttctgatccctttttccctgtgggggtggatcagagcttcctgtggcttctcggtggggctggagggccctagcacactgtgaactagtgggaggcagtgagctgggaattcagtggaggagggagagggaataggaggaggatgaggaggaagaggaggaggcagttgagacagttctctcacttatgcagaaagtgtgtgatgaaagtgtgtgatcacagccagccccacacagactttcctccaaatgagaagggagtgagaaaatgtaattttagtgtctggcttttgactgactccctgtggaggttccttctgggctgtggtgttgggtgtctctccttccctccaagggacagccaggcctgggcctggaataagtgagttcagatggtaactggggaatggccatagggagggagtgaagagccgtgcctgtgccccagggggctggggggcttggatttcaggacatcagggaggtgacatcaaggacactgcaggggggatttagggacagggtagtggggtcagtgcctgactcagtccgagctgagctatattgggtctctgttcctacgctgaggcatgctttcccaggcgtgaggccatgttttccaggccacagtccacagcctcgctgccaacacaggtgtgcattttggtggaggcttgctaccctctgtgtgaaaccaagggagcagaatatttccctgaaatcggggctcctggaacatgaccctgccaggaagctcaaagtcctgggagaatatgttccaggcagggcccggggggcacctccatgccccactgccttgtggctcctggcacaggagatgctggacagtatatactctgctggctggacaggctctcatgtctgcatgtgaaaatcaggttctggggagtttataaaccaaagaaaacccctccacccagcccacagagtgccagcgattccctcagtgattcgtgtgtggaggattcacacttggtggaaaatctacttaacatttttatcctattttccctccactcactgtcagtcctcatgtgttaggggagtggaaactcatttaaatatgagtctatgaaaaaatttaattaggaagataaattgaaaaatgcatataatacatttccgtgtcagacataaattactttatccacaccactgcacccctccagttaacccagggagttgggagttgtctgtgggatgaaaccctcttaggagattttccggaggaacccaactattaggaactccttcaaagcagaacttaaatgatagcatatagttaagtacatattagaaacttcatgattccatttaaactaatcattcagtgacttcatcgtgggtcagaaaaaatatgctctcttctcggtacattttgcacctgcagaaggatcacttggggaggaagaagatggggtagatgagggtcacatgatttttgtcttcctatgttggaagacaatgcttatggaaggggattagactttttgctgtgtccccagggagcagagtcagtgccattggttagaagttatagaaaagtggatttggggtcaatatgatgcaatactttctagcaaagaattttggttaaaaacacaggctttgtattcaaccacaatgaaaagctgaagcccagctctgcaaactactagctgggggacctcaggaaaatttacttctctgggcttcagtctcttcaacaggaagacgggcaaaactatagtgaaacctcataccttcatagagttgctctgaagatttaaagaatacgcttagctcacagttagggaaattcagtgaaaggtggatattattactagaagatagggtagcagtagaaagaaaatttgtggtcctgtaaaattgaagttgccctgcagtgggatggggcatatgaggatagtgagtgcttcatcatcactggagattttgacagcagcttggtgtgtggcttcttctcaggagtgatttttggagattcaggaatcagattcctgggctagatgccgtgctcttcaagtttagctgtgaccctctcaaccacttgggaattttttcctttaaacaattataacaattgtttttgaaaatatcaaagttcagagaagaaatttaaaaattactcaaaaatctcacttcctagacataaccatcatgaacattaagaaaactcacgtaatctctctatcatcacacacacacacacacacacacacacacacacacacacagctggaaagatatgtagatcacagattgacaggaataattttagaataatgggatcacactctacatcccaattttaacaaagagtattaacgtacatggcttaaatttctaagaggaaacaagtacatctaaaggaagttctgagttctggaaaaatatgtcttcattgaaatggatatcttttagaagagctcatcaaggttatgaaaaattttaagaagatggagtcattgctttctgttaatacctagtttcaattttagacttttgagcccatgttataaatgatgaaaaaattagcaatcacctgcttcttcctacctcctaccccctttcttattttaattatagcttatttttacattgttaaggctgataatatctaacaagtccctgagttgtttagtctcaagcatgtcccctacgtaggaattcaatttccagttgtattctttctgttctagtttactcgacaatctaaaatgggattattttggtctttgatttgttttctttgacctgctaacttttctgaattcattgaatatatgtttttgttaatttcttctatagcattaaacatttgcaggaattttctttgtttctttggttatgttttcttctagagaggttcttcatcatcataatagcac

SEQ ID NO: 628 - DNA, 4046 bp, Homo sapiens
caagtgattcttctgtctcagcctccagagtagttgggattacaggcatgtgccacctgtaaaaaaaatacctggctaatttttgtatttttagtagagatggggtttcaccatattgcccaggctggtcttgaactcctgacctcaagtgatctgtccgcctcggcctcccaaagtgctcgtgttacaggcatgagccaccatgcctggccatgaaatcacctttgatcagcgtggtgagagccacttcaggctgcatacaaagccttcctcttgcaggaagcctttattgattgcactgtcactgtgaattcactcttctctggaggctggtgaatcctcatctctgttcttctctttttgttccttgttttctgcccggtataattcactttcttttattgccaatatctcttggactttagccccaaggaacataccacactgcctggcactgtgccatgtgcctaataataaggaggtacatttatattgagctctgattctgaagcctgttcacatctgtgattccccttactttgcataacagctctctgggacaggtgggacaaatgtgataagccccagtctgcagagcaagagacgacttgcttatgggcacacagttcataagtggcagagccgggaccagggactggagtcttgccgtgggtgtgctacgcggccccacagaaggatggatgcatggagtcccattttgtggactcccccctgggcctgcaatgtgtagggatgtgttaggggaggatgagagggcaagagggggatctgtggctagaattccggaggttcgttggaaccagggaggtacatggggtgacttgaaccccaaatcttttcatctaggcatgacactccctttttcctctatggagactgggaatagcaggatggagggagggtagaaggagtagaggagtcagtgttggggctagggctgggagggacggggtagaagagagcaagttctggggacagagggcagtcaggagacctgtcagttctctctgggtagcctggactctcgagaggactgaaatgcatcaaaggatgggtaatgaaaaaatggtgatgaggacgggttgccttatcacccagaagggaggaaaagcttcaggcccaaccatcctgcttaaacatttgagaattctatgcggttcttttaagtatttagaggtactggggacaatgtgtccagaaagtggaatcccagctccttctcaccccggctattgatttttggccttgcaattactgcagaggtgctgcctctgtgaacactattagtgctagttggaaagcttgagcttttgaagcttagctgtttgagctacctacgggtttggaaaaaaaaagaatcttaccatgtgtttctttagcctgggcatgaatcaaaaatagttgaacttttttttttttgctcaagtctcaagtttaaaaataaaaaagtcacctttgggctgagatcaagaatggaaaatttcagggcatagcgtaattttttccccatctgttctgggcaagggatgataaagcattctgttggaagattgtgtgtaagcatcaaccatgagtctcactactttattgcgttgcaatgtctactttgttaagatgtcttgaaagaaagacttcttccatcctcctggcacaactgaatgtgcttggtatggggagacgtgtctaactgaatctaagcaactaattggaataggcaaaggaggaagtgatgaaagtgaagctgcagtttctgcaaaggtggctttattgtataaggtgcaggttattaccccaaatgatcaattactaaagttctggattgggcagtgacaagtgtctagagggaatgctgggcctagggaattgcattgtcatgtgagaataaggctggggccacctttacattttcattaaaaaaagatctggacagtacttgactgtggtagtagactttgtaaaggttattatggttacagctttgtttgcttgagatcctctatttttatagttcaatattattaaggtatgaagaaactgttttatggatgtcagttttactgtttctgacaacagcttgcgaggaagtatacatttgtgcaacagaccgctttggatgttaattctaaatttagaagccgccttcaatgggtgtggaaatcagttacacaaaattcaggtgcttactaaaaaaaatctgaatatccatgaagcttgtatggtccctggtggaactttgagcagctgagcctctctgaagatcctgaggttgtcagggtgtggcacagcagctgggggctgggccccgtgcatgcacatcagcatctgtgtattgaatataatcagcacagatagggaagaaacaaaccaccaccaccaaacaccctaagtaccaatctgggcatctgggcaccctggattttcattttgactctgtcatttactagttctctgaccttgggcaccatgctttgcatagcagccttggtttcctcattggtaaaatgaggctgttgaattctatatggctcaagagttctttccagccccgaaacatgcaaaaattcagtttcgactaagagctttagcactgtcttatcttggctgtttgcagtggccaaaattgataacatattggaaaacttccctgctgattaaaatagacattgccctaagtgctgtgagtgtccctgttaccttatcccttctctgaaaccctctgggtttccccttgaagcagcccctaaaatggctcagtttccagcatagcaggaggtctccagcctagccaatggtgccccttgtgaaggtcatggacctgccttacccattgttaaatgttttccatccctctggtgtacgtggagagcttctgggtggagtggacacaaatgatttaactttcccgagtctctgcttctgcgccagaaagtggaaggaatcataaccagtgtagtggaggtaattaggagggtccaaagcttggaccatctgggttcaaaccctggccccaccacttagtatctatgtgagtgtgggcatgtcaggtagcctttcttacctcaattcataatccgcaaagtggggatgagaatagcaccaactgtatcaagctgatgatgagatcaaataacacacaaaattcttagaatagaataagcactgtagaagtgatagctctgtgtatgtcattaatacattcactggtatcactgaactttattttatatcaagtgagataactactataccatccagggagataatgtgtgtgaagcccatagcacaatgcttgacaaatagttttcagggaatgttagcttctatctaagcaggtcccattggaaaaaaaaaaagttgtatttttatatagttctagttagtttctcatctgtgatctatgctatttttaattgaaaaaaaaaagtgtttccatacattgtcaggaggagccgttcccctgtcccagcctctcacaaagcacaccctcactccctcatttttccagtagtcccagggctagaccacctgtagagacaggaagcctgcctaaagagcagaagcatctgctcagaaagatctagttgtttgctggagcctcagcttgaagaaggctccaagtttattataaagtcccagccacacagtttgcttgagactttataaagagagaatgagatgtagaggctgggcccaaacccactaccaggctgtgggaatgggggatggggtgcttggctggcatctcttctcagggcctcctggtcagcctcaggagatctagtgctaagggttactctgctggggaaaatctcaatggcactagagaccacttgagcacagctcttaggaactgaggagccagctacttagcatcccagaatcccaatgcccatggccagagccagagctgcttagaagaaaagcaaagtccgcaggctgcatggactgagaaccacctcacctggctgcacattctctgagtggccttgaccatgctgttctctgagcctcagtttcctcatcaa

SEQ ID NO: 629 - DNA, 4058 bp, Homo sapiens
cagtgggagatacagacagttaatgcacattttaacaaatatataggggatgagagtccatgtcttgggagtgccctggccagtggctaggaagtggtggcaggtggattttctagataaggaacccaggaaggcctctgaggaggtgacatctgagtcccgagagaggcagagcccttggcggctggatactctggagcgagagggaagatgagatctctttctttgtcctcttcaggctccaggaggtggtgagaggttgtcacttctcttcttccaggctcacagcaccagcagcctaagagtttacaccagactttcaagtcagagtcctcctccctcgttgggggctgcaggcttccctcagacccttctctagagggcatttgatccctaccacaggacttaactggaagcccctttttgagatctgtgagatgtctgggattttccggccaagaaggacttcagagataggcctgtcttcatctcaagaagcaaagctgaaacccagagcagttgagtcccttggccaccgggctgatcagcggcacagccgggaccagagttctggttttctgacccttagagcatgagatcactcatcttcttctgatttaattgggggatctcaggacagatcagccactagaattgggaggaggccattaaaggaaccccttgggtccacacaccactcaggagaaaggcccactggtgaggccaaactacttctttgaagaggcttctcttagtatcaccagtggtgtgttgctggaggtgtccagaggcactgtccgaagctgctggcctctaatcccaccagtttaatttagctccagtcctaggggagctttgctaattatagctagctggccatgctgggagctataaatagggcaggaggcacctgtttggtccttactggatgtttatcaaggtacctgcagaggatttggccactggactgggtgcaatgtgggcacagaaagcaccttgaactgtgctctttattcagtttaggcaccaaagccaatgtgaactgtggagggggcagggggatgtcaccagcacaacctggaaaccagactgtcagagttcaaattctggcttcaccaccaactagctgggagaccctagttacccaagctctttgtcctttagttttcccatctgcacaatggaaatctagatatttacaaagaaggctgttgtgaggatggaatgagtgtatgtttttatctatacataagttacgtatgtgtgtatatatgtgtatacacatgtagtttagagttgcctggtgtattaagtgcaattatattgcttgatgttatttattaccatatgaaatggcctgaggacgggaccatcttgcatagaaacctggatcttggaaggaggctgagtctcggtctctcccggtccttgatgaggcaagttaagtgcctcatctttaggcagttaaggcaagttaactgcttcaactacatggcagttaagagagtgtgagccgggcgtggtggctcacgcctgcaatcccagcactttgggaggccgaggcgagtggatcacaaggtcaggagttcaagaccagcctggccaagatggtgaaacccccgtctctactaaaaatacaaaaaaattagccgggcatggtggtgggcgcctgtaatcccagccactcgggaggctgaggcagagaattgcttgaacccgggaggcagaggttgcagtgagccgaggaaagaaaaaaaaagagagtgtgtaggctcgtcaacatggggtcagttactgctgttacctcctgtttggcatgctacttcacatctgtaattctccattcttctccattctttcctgttaaactgtggtgccatagcaatgagcatttcatgggatttcagtgagaattgaatgaaataatacttgcagagcatttcacacagtgcctaacacatggtgcatgggaaacagtgtaagccattgtcgtccttcctcctcccgttaaatgacttggacaggttaccagcatctcgaggcttgatatcctgtagctctctaggctagagaatgggaccagtggcttagagggcagaaggctagcagtcctgagacccctggcctgcagatgggaactggatcttcttcctttgcagtcttcttgttccagctgttagcgtcactccttttagaatcccatggtgagctttcttgcacggctgtgtgcttcctgtgtttctgtcattgtgccccagctgggtcccaagccctgaggaccatatgcagcatgtggtggacacttaggaagcacgtctccagtggaggggacttaaatgtcacgtagtactgccccatcaagtgctgggagaggccgagagtccgcctgcttccaagatccctgaggttttgtttgttgtgacatagcaagaggagttaaaggatgggggattgtttcgtagggagaaagagaggctaagaggtagaggtggggacaggatacctgggtgcctttctgggagaggaagtctttttctttgtcctgtggctcagagcaagtctctcagagtggaggtttcaaggaggcagatctctgttagggaagggcgagttgcctggccctagacctgcttgaagtgggaagaatgtagatttggcagtcaggcctgctagtctagggccttgttcctcagacggtggttagaggatcagcagcacaggttccacccaaacctcctgggcatgaatctagatgcgtccggatgtgcacacagaagactgaggagtgctattctagaacagagcttctcaagccaggagccattctccccaatccatggctgagaagcctaaggctagaaacatgggccttgagcactggatctcaaagctctagtttcctctctggaccagtagcatcagcctcacctgggagcttgttggaaatggaaattcagaggcccaacccccaagtcagggactcccctctgggggtggggcccagggctctattttaactggccttccagtggctctgaggcaccagtgagatcgataaccaagagccagagcacctgcacgttggaaactcctggggagataaagcaaatgcttggaacaaatccgaatagcctctgggtatggcagggactctgggaacttcagatgctccccgggtgatcctaatgtgcagccaatattgcgaaccagcattttaggcctgtgaactaaatctcagcgttctcagctatcagttgggtagactaacctctgtttgcctgccagtgatgggaaggtgccttggggagcattaagacttagctccctgggttctggaaggcacaccagaaagtgggcttccatctgtccagaaaggtgcagccaagattcccgttttggaggaggcaggattggatgcccgccatggcctcaggtggaattgcaatgtggtggctgtttggtccaagtactaagtgctgtaaagacgataacctgctctggaaaaggaaatcgctagtgccttgagagaacagttcatgcattctcctcctcttgtgcttcccagcctctgccaccactgcttaattctggggcttacctttagtgaggtcatttgccctgtattcagggagctgatgctgtcagcactgtcctagcattggaacggtggggctgttggggagctggccggctcgttctgggcactggtggaggcaagaatgaggtttagagaaatatttacccaaagtaatccctttgctatgccactgcccatctcccaggaggctgggcaacaaacacagggttctggtcatcatttattgaggggacaagctttgcctcccaagggctaggaggaggcaggaacaaagggtggtggtacgatctgtggtcccagcccctgcagtggtcaggccctggggcctcctgaaagccatcagctcccactccaagcaggctgcatgtgcaaaatgaatactggattcaaaagcatcatgaagcaccagacatggaaagcattcatagtcttgtcttagaggcaaaattatatggcactt

SEQ ID NO: 630 - DNA, 4045 bp, Homo sapiens
aaactaagtacttgtcctactccagtgctgcctccccagtcatccatggccagactaaattactctatctttcctttgggctgcaaagtcgttttatttataacacacctctcttgttttataagtagccatgaaggggtttgttttacccactagattagggattggtacattacaggtcgaatccggcccactgcatgttttgtaaataaagttttattggaacacagatatgctcatttgttcgtgtattgtgcatggccacttttgtgctatgtcagaggtgagcatttgctacagagactaactggcctgcacagtctgaagtattcactatccggttcttcacagaaaatgtttgccagctcctcccctgggaggtgagctccctgagggcaggaacggcactccgtttatcttgctgcttcttgtttcttgctggtagtaggcactcaataaatgtatgttgaataggcttgaaatgcagtggattgatttgtcaaagatgagcgccagccacatggctgttctggcttccccaggtttcctcttgctgtttggccactttgtgctccagttttctctctacagaaagaagataatattatctatcttgctgagttcgttgatctgtggtgagggtagaacaggatattaaaatatcttactagaaccttgggcccagcttccggtcttcctgatggtttcaatccaggcctagcacgggacctctgtctaaaattctctgctctcatggccctgccattcctgaggcaccctttgcctccaggctaaagtaaacacctgtcattcatgatcctccttactttgatatgataaaatatcagggcccagactgcagtcccacggccctggactccagacctacctgtctgtcttgatctctcaatcctctagggcagccttctcctacatccagaattttctgcattctgtcccctacatgaatattgcacttgttcttgggaccctatccccctctccctcctaacttcctaccttgcccctttctgcctttctgctctcagcctcctgtctgcccttgcaggtctcttttatgtctgaccttgctggagtcctttgacctcggccaacaggagtgactgtctcatttgccacttaggcactgtcttaggttttaaatttttaatctttgtggctgcttgttaaaaatacagggacccaggcttcattcccatggaattagaatctccaaagatgtgatccaggcccctttgacttttaataagctcctaatgtggttgtgattatgatcaaagtttgaggaagactaacttaaaatagagtgctttgcagtattatttctctttctgtgggactctgcttatgtctccaaataaactataaacatcttgaaggcagatctgggccttattttcttttcagagtggcacatatatctgaagactggggccgtgagatgatctgtcggtgagataactccacctggggccctgcatctgataggcgctcagtaagtgtttgcttgttgatcaataaaagacatgaaagcacctgggaaagcaaaacagcctctgcaaagcagggcattattactgggagcagatctgatgtgtaccttccacagattccactgaaggtgtcctcagagcaccggacactcaggggcccgcagcccagacacagaaagtccactctgctgagaaatgctcaccaagcagaatccctcacactctctagctttgttttctttgatctctctgagcttaggaggaaaggctcctgttccctccctcttggcttatcccaataatgcaaagccatagaagtgcaggctgctggggaaaagtttgtttggacacttaagaatgtagaaaagggtttagcttgtataaagagttttgctttctcattataatgcttggagagaagtgcaaatgtttcatctccgcctactgagttatactgcctgtttacataagcctatattcagtggcctgagaaaaggcttcttgccttcttcagggcgtgatggtgcaatcttggtgtagagtttccaagcagagatgatgctacggcctcacgtggtgggaaggctgtgtggcaggaagaataagttcaaactgtgctttgtttagaactgttgtgcaaagttgtttcttccatccaagtattaactgggccagaccctgcttagctgccaagatcagacaagatcaggtgtgtccagggtggtatggccgcagataccaagctatttctaacacaaggatgctctccttttattgagcagggagaagacagcacgtacagaccaaccatcctggttgtaaacttgtgtcctagtcagagctctttctagctggagtagaaaattcttaggctgtatgtaatggaaagagagtggagtccagcaataaaaacagatcaggtaaaaatagagctaggagtcaatagtgagggctgagttaggagagttctctgtacttccctagagatttccagccatctaagcatacgtgtgagttcttgctttgacaaataagtactccactggtatgcacatagaaacttctttcacctgtgggatcattattaacatgttttatgtggagggaaaaataaagattttagaacttctttcttccctcatgttttcactccattaatattaggcttaattattcaaatttattatattagagtcttattgcttaatttaaaaaattgaatggattattagctttttaataaacagtgacatttactgtctactaatgagggctcaaatcatgtaatttattgctgcatctctattttgttcatgaaatgaaacagaaattactacctacttgaaactggacttgttttctgcgctcctatgaaactgaacagtggagggttgctcgtgaaggatctgggacatgtttcatatggagcacaagaaaaggacgtcgaacatgcaacggtctgcatccaggtgctagaaccattttgtttttcccttcatcatccctagaaccaagagtgtgggtgggaatagctcagtagagtgaccatgtgatcctgtgttacaactgaagacaaaatctggcacagagtctctccagtgatgactatgaaactgactggtgccccatcagattcagaagtggagagtgttacatactgatttcagaaaaatgttagataaacattgggaccctttattatataccgggaacagaaaatgcatgttgataaaagtttgggatgttccatttcactctgatataaagtgtgcgtggtcagattggtttctatttttgataaaaatgaggttctggaaagccattctggctcatgggcttatgagaaaaaggttttggaaaggagttttggagtgctcccctacagaaatagcactgctttttaattgttctgtcgctagagccttggccccaaataacaatgcatgaatctcagtatttgtcttcaaggagctgtggtctgataggagcatatagtatacctatatggatgggtataactgaaggtggtgaggacctgtttttagatgcctgagaaatccaaaaacaagacagggaagttgttcgtctgggaatcatgaagcatgtaaacctaattaggggaggtggcatctgatctcatccttgcagaatacataatttttatacaaacaatgttgaagaggtgatgagaacagaaaagctgggtaaagtgcagagcatgttcaaggaagggttacaaacatttcttgagggcctgccatgtgcacagggcaccaatctagtgaaagcaatctgataagagcttggtacaaaaccaagtaatatagcttgtgcattaccttcactcctcttactccagtaatttttgagtaaaataaatgttgtctttaattatattaattcatacaactgcgacaacggcctggtgaaatcagtaccatgcttgtcctcatatgagagaagaggaaacagacattttaagttaagcgacttgcttcaggtcacccggctagtgcgttgtggggctgaga

SEQ ID NO: 631 - DNA, 4046 bp, Homo sapiens
aaaacctttttttttttttttttttttttttgagacagagtcttgctctgtaacccaggctggagtgcagtggcgtgatcttggctcactgcaacctccacttcccaggttcaagtgattctctggccgcagtctccccagtagctgggaatacaggcgcccaccaccatgcccggctaatttttggattttttagtagagatggggtttcactatattggccaggctagtctcgaactcctcacctcacgtgatctgcccgccttggcctcccaaagtgctgggattacgggcgtgagctactgcgcccgaccactaaaacctttttttccactcacttgaatttacaacctcattgtgagattttctaggcagctactccactgggacattttgctagtccaggtggcctagctgctgtagcaagcaaccctcaactccagccatgtaacacaatcaaagggtgtgtctgtggctctgccctttctaggtacccagaatcctcctctgggtcttcagctggcagaggagaaaaagagggagcaggatcgtgtgtgaaggctttatagagcagatactctgcccacattctgctggccagaacttgatcttccagtccatctaactggagggaggctgggaaaggccagccatacgccattgttatcagtcctgaccaggtgcttggtgaaccatggtctcttagtgccctgtgggacttgtaagtttttgaagtgtcttctcaagtgtgatctcactccatcctcatagcactgacaaccctatgaggaagtaagatgagtgcttctaactcccagttcagaaccgtggagactgaggtctagggagataagtgtcgtgggcaagggtaggcacttaggtagggacacaaatggtagggagacggggtttgaacaaagagctctcatgctgactggccccatccgacaggacacaagagcacccactctgggtgtgcctgggtcaccctctgcatgtagtgggcatgggagaaaagggctgcttagcgaggggaaattggtggctggctggagtgcttcttctatcctagagtgtggcaagaaaggaagttgtctcttgccttttgcaaattgcaaccgaatggtgaggggtgacagtattgctactggtaggaaagcttggatggcagggacagaacggctgtaaacctggcacctctgggggagctgccccctcaccttgactttgaccattgtccctttcttttcactttcatgggacactagcgttgaaaaattggggcctttttcttcacactcccatttctctttatttaattattttaaaacatctgatgctgcagtgagatcagctgtgatacatcatctgttctattttgagctgcagggagacaaatggagaatactgctacctcccctcctggcgaggactgtgctcccaggagcccaatggatggaccgagccaaggcagctctgggcacaatttggatgctttcccctccaggggaatgcctgggtttccttattgtgcagatgccttgaactaacctggtcaaaaactagagagacaaaatcacagatggttgcacaggttgttggagtagcaaagacagcaccaagcagcagaaagaagatgaggcattgagtcctacgctcagggctgagcaccgtcactcctaattgaatggccactgaactttgtttcctcatctatgccaaagaaataacatttttcctaccactttcactgggttcttatgaggatcacacaagataatgtgtataaaaatgctttgtaaatggaaaagcactctgcaatttaagacattattatattaatagtaacaattaccatttccaattctggtgattcacttggggtaggagcccatagatctcatcactgctaccattactaccccacattgtacttcaaagctgcaattaccttgcacaatttcatttgatacattactgattatgcagtgttagaactggaaagcatcttgaggattaactaatccaaatgtatcgctttatagatggtgacctggcgcctggaagggagagacttatttgaggtccctagaactcaggactgtgggctgtcattcctagggagtaggctgttttactttggattatggttccctgtcctttctgaagggctagacatgggaactttgggtgggacgttgatccttagtcattaggtggagtctcagcctgactcatgtctgcttactcacgtcaaccctgctctgagctccactgctcaaggttctgggcgcatgtggacagtgcttagaggagaagctcacatgctgagaagcttgggcacagggtcaaagagaggagaaagtaggaactaaagtggtttgctggcaagaaaaagagaccagggcaattccagaacaaagaaggtggaggtgctcctggtctcaaccttggtctttattggaccccactgcctttgtgcgctctctcttactgtccactccaggggctcaggctgccggggcacactcagtgggcacagctgcaggactgtgaggcctcctctaaagagaagactgagggtcctccagcattattgtaagtgttcaaagcgtggtcagaattcatctggatagaagaacaagcacaaacgggtaaacatcctggcaagactgagtttggcctcatgtcattcacagtgccactggttggcccctttcctgcctctgggtcttgcccaaatgtcatcttgcccacatgtcacttctctatttaaggatgccaactgcacctcacctcttatttggaccatctttcccaactggatttgccatcaaaatattatacagaaaatttgcaaattagtacagagaattcctgtctacctgttagccagtttcccgtaattgttcacatcttacatcactatagaaaagaacaagtttcatgttggtctaaaactgcatgtcaaactttaagccttcctcaaatatcatcacttttcccactgatgctgtttttcttttccaggatccagtccagggtcccacattgcatgtacccaccatgtctccttagtgtgcttttgtgactcgtctttccttacctttcatgactttgacattggtgaagagtgctggttagttattttcataggcggtctgtatattttggtgtgtctgatgttttctaatggttaaagcatatgggtttttttttgttttatttatttattgctattgattgggtctctcctgccactggaatatctgctccctccgagcaaggattctcattggtctcgttcacttgtgtgcaggaacatctgtgtgtgcctcgcacccatgctcagtcaatatttgctgggcgaacgaatgagactgaactcccaggcattagtggagcatctgacctgacctgagagaaacgtggagaagctgggtcctggcagagccttgatgggcagttgggctggatgggcactaaagcctctttcagcattcaggttctgtgattttgtaacctgatggtggtatctgaactcaagctaattaaattccacaggtgtttgctgaggaagtacttgctgtggcatcctgggctgggcaaggtgggggattgatgggcatgtgcgatccaggctctgaaatgcaaccacattcccagggaagccaggagcacagggattgcatgtaaaacacaggtgtccagttagtggtttagaatctagactttggattagtggctcccaaaccacagcctgctttagaatcactaggaggacattattaaaacaccaattgctgggtcccaccctcagagtttctaagttgcttggcctgggtggggcctgagaacttccaacagcagttccagcaacttcccaggtggtgcttattgatgatgctggtctcgcaaccctatgttgagaagtattactctagatgttaagagaacacacaatttactgctaattagcaagagccaggagggcttcctggaggaggtggtcaggcttgagtagggtaggattttcagaggtgggt

SEQ ID NO: 632 - DNA, 4048 bp, Homo sapiens
agctggactcctgctatatcccttgctcagaactctgtactgcctggatctgatcattagcagagtctgcgccacctgctttggctcttggtccaaaaaatttgctgtatccttggcttagctactctgtgtccttgagggccaggaggttgccttgaagtccatgtggttcctggttgagtcactgacaaataaagtggccttggtgcttaccagggcccggggagaggagacaccatggtaatgacctcagacaataaacagaccattgggattggactgtggcctccagtgtcttgctgactcctgtcttggaaccaaatgcagaagctactttgtcctgcagctgatgggaataagctgccagcagatattttggtgcctagattatgaaaggagagtcaatatgtaatccacgggtataaaggtcatcacatggtccgagtctaaggcgatggtgttatttgtgcttgattggcggaatcttatgctgactgcttcttcacttcaccatttagagagtggacatcacacattagtcaatggcacacatttgggtttgaagataggttcaattgtatctccgtgttttcatgacatcttagagatcgtccgtccttttcactcatgaggctttggggtggagatagtaaaggtggctgatgtccctggatgtgagtgtgctagttcagcatgggacctcaggcagaaccttccccacgtgagccccagtgaccttctctgccgagaccctgcctcttagaggtgtgaagctcaaaggagatcatgtttctgaatacattttgcaaaggtggcaagggctgaccgtaaaagccaggcagtcagaccttcctgcctgtgaagggccaagatgaagtctctcttttgcttcgcagatgagaaaattgactttgctcagtgggagggatgtctgaccatctgaatctggggagaatcattaagtgcccattatgtggctgtcactgtgttaggcagtttgacaagcataccctggagcctgggagggggagtggtggagtggagtgagcttaaggactggaacagaagcccttggtgcatgcctgggcgctgtcacctactgactatgtgaccttgaacaaggtgtgtctgtgtatgtgtgtgtgtgcatgtgcgcatatgtgtgtgtgcatgtgtgtgtgtgtgtgtgtttgagatggagtttcgctctgtcacccaggctgcagtgcaatggcgtgacctcagctcaccgcaacctctcctcctgggttcaagcgattctcctgcctcagcctcctgagtagctgggattacaggcatgtgccaccaagcccggctaattttgtatttttagtagagatggggtttctccatgttggtcaggctggtctcaaactgccgacctcaggtgatccacctgccttggcatcccaaagttctggaattataggcataagccactgtgcccggcctctgtgtgtgtgttttgtagcaacttctctgtgtcctgatagccacaggggctgctgtgaggactaagtgacgaggtgtatgtcaggtgcttggaatgtcagtccatcccacctcctgctctccccactaggctgccacctcctcctcctccattaccttttgataggtctgattaccttcattttacagatgactctgggtcactcttcatcttttgtagaaatacctctgtagcaaatgtcatggggacattctcatctttggtagcagggagctcactgcctcctaggtatgttgttccattttggaatagcttcatgtgaatcttagcatgtgccaaggtggatgtggagtctttgcatcagaatcctgaactgctcatcctgaaaaaatgatgcgatcagcctgcttcccacagcgtatgctcagggtgacttcttgtgacatggagatggttggcagtgagctttctcttgtgacttcacacagggacaagtctgtggcattttaaggactagtgagagttcaggatggaggtgaaggagattggcccagagagctacagagttgaggagaggaggggtggcacacaggaggacggaccatcaggggctcaggctggcggctgaggtgggagtggtgtcattatcttccgggtcccaggccttgttcctcctgaccctgaaaggcagtattgggtagaggcatccccttgttttgcagacctctattaaaacaaaggagaacaatcatgtaatgatctctctaattgctgaaatgacattcaatatgatccagtaggtgcttcatgatcacacatcgtcaactctgcgcagtgggaacttacttaatctgaagacagatagctactgaaatctctagcaaaccttattcctgatagatagacatgagatgcaatcccttcaggttaaaaagaagacaagaacgcccactatcacctctcttattcaaccttgcaccctaggtcagagccagcgcaataccacaagagaaaaccaatagagacataagtcttggaaaggaagagatgaaggcatcattattttctggtgcagccatcatctggctggaggaaatcgtagactccgaatgtataaattattagaagcaacagagttgagccaggtggccaaaggtcagatattaaaatgcatattaaatgcatttttgatagaccaacagcaaataattggaaaacacaatagaggaaaccaaggctccgtgtggggcggggttttgcattatccagtgaggcatccacgctgctgattctctttctaatgatatttgtacagcatgataaagcagtatcgtatacatccagcccactggggcaaggcagatacctttattttgacttttagggaggaagaaccagaggctcagaggttagagcacccttgcccaagctgactcagtgactaggaggctgagctggggcctggccccctggaccaaccctcattcctttttgctgctttctacccaccccaccttcttcagaccttactttctccaccatttgtcttgttctgccagcttttcgttgtctgcctctagtaccagctgagctgggtgggagggagagtctgggagtgttcggatttgggttagcatctactctgtagtgtctttcatgagccacagcctgaccttcccaggacgcttgctgcactggatgcggggcagggatgggttcttctgagggaggagagagccaggcggttgtttggcgtggcctgggtccctctctctttgcgttgtctcccctcccctccacactgctcctctgagtctgacttacatctttgcttttttgttttatttaatgtgtgttcaaaagttataaaaatagcatatgttcacagcaactggtggaatcataatatggagaaaaagaaagtctttcttatttactgtttgatggctctcggatgccatgcactcctctcctgcagctttcctggccaagtgcttagggcctagggtggacccttccacttatttccccaggcccgggtcaagataggcaaacaggttttccattcattcagcaaaaatttgctggatatttactgtgtgctaggtgctggggatgccacagggaacaagacagggaaaaacccttgccctcttggagctgacagtccaggggattaaaatattttacagtgggccgggtgcagtggctcatgcctgtaatcccagcactttgggaggccaaggtgggcggatcacttgaggtcatgaattcaagaccagcctggccaacatggtgaaaccctgtctctactaaaaatacaaaaattagccaggtgtggtggcacacacctgtaatccagctactggggaggctgaggcaggagaatcacttgaacctgggaggcggaggttgcagtgaaccgagatcgcgccactgcactccagcctgggtggcaaagtgagactcagtctcaataaaaatgaaaacaaaacaaaacaaaaatatcttacagagaagtgaatgcagccaatgataagtgctatggagaaaaataaaacaggataaagttcc

SEQ ID NO: 633 - DNA, 4033 bp, Homo sapiens
agggctgcaggcaccatgccagctctttcctgtgttacctccttaaccctcttcaaggagggcatccgggacagtccctggcaactagcaagcacccaacacagggcccttcttaccaggtggcctctgaggacctttcagccatgtgcccctgggctgcggctgggcgcggtccttgggagggatgtccctctgtggttcctggaaagcccggcagctggctgctttgttctggccactgggtgtctgctgttaggactgcgggttttatggctgtttccttgtgctcaaccttttataggtgaccctgtgttttttggagccacacctgatgggggccaaggcctttgaaatgttccagagtctttatgggctgcagcggcatatggtgggtggcccaagctgcctgacaaggaaggggtgggggagggtggaggcagggaggccaggacctgcatttccaggtgagcctgagacctcagacggatgtgttgtttttctagttgcctacttaggtctactaatctttaggaaggaatgatagcctggtttatgggatatgacataagtttttctaaaagggacctgagatgaagaattaggcaactcttttttttggggggcgggggatggggttttgctctgttgtgcaggctggagtgcagtggtgcaatcatagctcactgtagcctccacctcctgagttcaagcgacataggtgcacaccaccatgcccagctaattttttttaattaagtaaattttttgggggtagaaatgaggtctcattctgttgcccaggctggtcttgaactgctggcctcaagtgatcctcctgcctcagcctcccaaagtactgggattatagaagtgagccactgtgcctggccaacaacttttaaaaactaaaataaatatcatgcctgctgattgttttttcttgagacttctttttttcttctctttcagtttctgttactatgtccctcactgtccttgacaaaagaggctttttatgcccactgtgggttttgcaggtgatagtttagtgtagaatggtagtgaaagccatgggcttagggtcagacaaagcttggtttgaatcctgtccctaccactgaactgacttgattgtcacctagactagaggagcaactcctagcattcacttcctcggggccaggacaagttggcatcctgctgcacacagggcaacctggagaatcaagagaaggctgccagcctcagatgccagtggctccctaggaaagatagtgttagttggtccccagtaatatctggcctttatcacacacctttatgtgtcaggcaccgttgtgagcaattcacattagtcctggaggcaggaaatgtcattaacctcatgttgcaggtaggggaactgaggttaagtaacttgtctaaggccacacatgtagcaagtggcagaggcaggatttgaatcaggcagcccaatgccagtgtctgcacttagaatcactgagagccatattgcctttctgagggctgttcttgatctgagagactagagtcctctgtcaagagctagtactgggcagccctgggggctgggttgtggggtgtgggctgtggaaggagtaagggaggtgctttctgctgtgtaatggggcaggtggttgggtgtgaactcgcctgacttacggccccagctgtttcctcttctaactcctcctcccagatgcctgccaggatgccagaggttagagggaggtgtgtccaatcatggactggatctgaggtccctctccttccctgcttatgacacaaatgctcagaccctgttctcctgaagggacacagaacctgtctccctgtttggattgcaagctccagactgcatccttgaagtgggacaacagagggaaatctatctcagcctcatgatccatggacgcatctcattcagtcctgggctccttgctggcccctggtgctgcagaaatccatggctgagggggtggagatgggtgggggggaccgaaggaagctgtgcaagcctgactctgcaggaagtcctgcgaacgctggcattaaaaacaccattgcctgttgctttatttttagtggtacaaggagccctgagggcaccaggggggatgtgggaatcctattttttgctctgtcttgctaatggaacctctagcagtttttatgcctgatttgtttccctctgaagtctgtcatgcctgcagccccagactgtactcttccttgcacacagctcagaggaacatagacgatggtgtcagctgttggacttgcagccccacttcctgccagccccggcttccctgagaaggaagagggccgcctctcttgtttcatacccttccccattcttggcttggttacattgtgcttgtcaaataagcactcagctcccctctgagatgaatgcatattcccggaggtgtcccctggacatgctctgagaatgttcccatgcttgctttggttactcagaaccccgaaatccacgggagggatgagggtggttggctggcaggaggggctgctggagggctgaacaaatgcccgtgtggggtgctggtctcctatggtaggattgcaagggctgctaggtaggactgatatgtgcccagtgcccaggtgacaaatgacagacagcttgtggggcagggaagcacctcctagtgtgctacctccatattcttctacaccatcaaattttaaaaaccgagctttattgaggtatcactcacatgctataaaatttactcatttgcagtggtttttagtatatacagagagttgtgcaatcattgctattatttaattccagaacattttcatcaacctaaaagaaacaaaccccatacccatgagcagtcactccccacacccctccttccccagcctcagacgctactgaactgctgtctgtctgtacggatttgccccttgtggccattccatctaaatgtgctcatacaataggtggcctttctgagcccgtgtcatgctacaatagtgaacccctatcctattctatgacagacatgagagtgctcagaacctgaagagttggcattatcacaagcgcatccccgtctcccccaaaccaggcttcagtgccagggcagacatgggagacctgggaagcctgcccccagattttgctgtcaggcattggtgagttttgtgtccctcacaagtgggaatacattcaaaagacccctcccaccaactgggatggtgaaaagtataaaggacagtctcattctcagtgccatttagaatagggcagttttgatgaggagcaaggtgagtttcttaggtggtgtggctcttctcgaaatcaagggagctggagctggactcctgctatatcccttgctcagaactctgtactgcctggatctgatcattagcagagtctgcgccacctgctttggctcttggtccaaaaaatttgctgtatccttggcttagctactctgtgtccttgagggccaggaggttgccttgaagtccatgtggttcctggttgagtcactgacaaataaagtggccttggtgcttaccagggcccggggagaggagacaccatggtaatgacctcagacaataaacagaccattgggattggactgtggcctccagtgtcttgctgactcctgtcttggaaccaaatgcagaagctactttgtcctgcagctgatgggaataagctgccagcagatattttggtgcctagattatgaaaggagagtcaatatgtaatccacgggtataaaggtcatcacatggtccgagtctaaggcgatggtgttatttgtgcttgattggcggaatcttatgctgactgcttcttcacttcaccatttagagagtggacatcacacattagtcaatggcacacatttgggtttgaagataggttcaattgtatctccgtgttttcatgacatcttagagatcgtccgtccttttcactcatgaggctttggggtggagatagtaaaggtgg

SEQ ID NO: 634 - DNA, 4037 bp, Homo sapiens
tactgatttcatttcctttggatatataaccagtagtgagattgctggatcatatggtagttctatttttgatttttctgaggaacctccatactgttttccataatgactttatcaatttacagtcccaccaacagtgtaacagggttctcttttctttatacccacaccagcacttgctctctctctctctctttttttgcttatagccattttaacaggtgtgaggttataactcatcgtggctttgattgtgtagccctgatgattagtgatgttgagcacctttttatatacctgtgggccatttgtatgccttccttggaaaaatgtctatgcaacggttctttttgatagagatgttaaataaagcagttctgggcagagggagatcaatgcaagtgtctataacaggctgagagttgattcactggtgaacaggacaaccaaggtccctgccctcagaggtctgagcaattccatcatcagtgactagattgaacagataatcccctcttacacacgtatatgcacacttcagcctggagtgtgatgagagactatggactataatgcgtgtgtgtgtgggggtgcatcctctccttggccggggctcagggaaggcttccctgcagaaatgagacctacaggcccggcatggtgactcatgactgtaaccccagcactttcagaggtcaaggcgggtggatcgcttgagcccaggagtttgagaccagcctgggcaacatggcaaaactccatctctacgaaaaatacaaaaaattagccaggcgtggtggcacatccccgtagtcccagctactcttgaggctgagatgggatgattgcttgagcctgggaggtggaggttgcagtgaaccaagattgtatcattgcactcctacctgggcaacagagtgagaccctgtctccaaaaaaaagaaatgagatctacaggatgaagaggcattagccaggggtgggtgcagggggacgtgcagaggaatggtgtctttgaagactctgaggctggaacaaagcttcatggaaggaatgagagctggaaggacggggaggacttaggcagaaagcagcatagtccaggccacagggaccctaggaaagaggatggaggaaagaggatgacaatatgttacgggaaggcagggatgggtctcttttgtgaattacttaacccctaatggctagcagtgttgagcaggagaagggacctctcgagtggctgagtgtgggtgtcagttttcccttgctgctgtaacgaccacaaacatagtgccttaagataacacaaatatactcctacagttctgaaggcgagaagtcggaaatcagtttccctgggcttttaaagtcaaagcgtctgcagggctggttccttctggaggctctgaggggcaagtcgtttttcttgccttttgcagcttccagtagccacctgcatccccagtcttgtggctttctgctccgtatccaaagcacattgctccatctcagtttccatcatcacatctcttactttctcttctgtgtcaaatctccctctacctccctctttgaaggacctttgtgattgcatttagggcccacctggatgatccaggctaatctcttcatctcaaggtccttaattaaattatgtctgtagagtcccttgtgccagttaaggtcgcagtcacagattccagggatgaggacgtggacatcttctagggccatgattcagcccacctcagcatatagatgaatgccatttttatgggaatcagtgaggcatgctaagcaggaagcaatgccttttgcaagcagaggtaggaagatcggtctagtccgtcagctggcactggccaggctccactgtccattatcctcctcacctgccctaatctttcctttattgctcctaagtgataccacgtagcttcttcagtctcaaatcatcctactcagacccttttctgacattcagagccttccttatcccacagttctttctgtccttttcccttcctatctgataaatccttgtgagtagttgacaaaagagtgcctgaagatgtcagggcagaggctcacttctggtctgtctagttgggtgagtctgaacttgaggccccagggcttattggaggcaaactgagtcatggagagggagagtacagtaaggccactaccaagggctggctgcagagggtgcaagggttgcacgggttttggggttgttggcttccccagaggggttctttgtatggtgtcaaggtgcctgtgggcattaggtgactaaaaggactgaacacgataaactcttggtggctcttcctgctgcaggaagggaatactccaagttcccagaggagaccacccagtgatggagtgaagctgcatccttggctcccctcagctcaggaccctcagaaaggacttaggaagacgggcactgccagatacagacgtctttctggactctaggaaggggtgccttttttcttttctttaagagatagtctcactctgttgcccaggctagagtgcagtggcatggtcataacttactgcagccttgaactcctgagctcaagtgatcctcccacatcagcctcccaagtagctaggactacaggtgcgcactactgtgcccagctaattttttaattattttgtagagatggggtcttgaactcccagcctcaagcgatcgtcccctcttggcctcccaaagcactgggattacaggtgtgagccactgtgcctggccaaagatgcctttttgagggccatgaggggttgctgctctgggtctgggcatttctctggaggagctgcttgtacagcaatgattgtcccatccctccttttagtcccacaggtcagagtgggacttaggacagtgggacagtgggacccaaaacttaaagccagcctggtatttcagcagtattatctgttacctagagagaggctgatgcaggggtgtctgggaggctggagggctgcaccaagggtggatggcagagcctgagccatgggtctaggccgcagcactgccatgcggctgggaagatggtagtgtgtgggtatagtcatgggtgttgcggcttatctgcacctgcttgcgttcaggcagaagcagggtagcgtggcatggtgaggaccatggattcagttccagctcggctgctgatagctgcatgaccttggggaagttgcacatcctccataagtcctagttttctataacatgggcatccctgatgtagagcatttgtgcagttgtgtgtaaaggatgtggcagttaggaagcacctaccaagtgtgagccatttctgttgtcattgccatgtatcagccagcctgagggcctgcagggcctggcctgggatgtgggaaagctttccagaaagggagcaggagatggcgccctgtcacctccctcaactgggccagagtgtggggaggctgctcggggcttgctccttctgaaacacccctgacgactgtcccagcagaggagggaggctgccttggaagcctggctgcactgtgtagggagggtacccagcagagggctgggaggtctccaggcccctttgagcactgacagcccatcatctgacctctccaggaacccacgagaaagcatgagatgaacagacagacttggcttgaagctcacttcctagttgtgttactcctcagggcctcagttttgccgcctaaaagatgggaatcacgtcccacttgccgggtgctttgaagctcaggaaagatgaagcatctcttttagaggccctcagggctgcaggcaccatgccagctctttcctgtgttacctccttaaccctcttcaaggagggcatccgggacagtccctggcaactagcaagcacccaacacagggcccttcttaccaggtggcctctgaggacctttcagccatgtgcccctgggctgcggctgggcgcggtccttgggagggatgtccctctgtggttcctggaaagcccggcagctggctgctt

SEQ ID NO: 635 - DNA, 4024 bp, Homo sapiens
aggttggattgcacgtctgtggaatgtccaccccctgctggaatgtagcatctctgaagcctaggactctgtgccttccatctttgcatccacagtgcaacattttgaatgttcattttggtctcttaaattcagtcttgtgaggctcttagcctagtttggaattggtcaaaggcgggtttgagtcctggctctaccttgcattagcttggtggttgtggccaatttacttaaccttgcaaagctcactttcttcattggtaaactgtgaatactaaaaataccagccacgtaaaggttttgtgagtataatagcatttagcatcttgtaagtcctcaataaatggccctgttatgatgaagttggcctttattttagatccctctcctttgtcaatataaccaggattgtgctgaactgagggacaggagaccactggaaggggcagggtagccaggggccaacagtgagcaccaagacggacagtgaggtagtgctaaagatggaggcagaaagtagggttggaggaaaatggggtgagaaatgctcccttccctctgcctctcatcacccacggcacacccctataccactataggaaggacgagggagaggggaatggagagagaggaaaggaagaattttgcagtacgagatgtcaggcattgaaagggttaactcaggggcgaggcctcagtttgccacctgtaaaacggaggattggatgaggccattctgagggtccctggtggctccagcagtcccttgcatttttataagaattgtgattgtgctcctgcctgttctgcccctacaccacccaccttctgcagcctcaggcagttggagatgatgtcaaaaggaacagaaggggtggaaagtgctggagggcatggaatggtttctcccagaaggctgagggtctgaaaagaggcttagaagcctggtagccagagcaggacggacctggtggacccatctggtgatcctggggctgctctggggcctggtgaatggtgaatggaccagaggcaccttttgggctctgaacaaagaagaaaggccaggctccagacccagccctcctgcctggtgggctttttagttggcactttcccctatttaggaacctgtgctactctgataggctgaggcagcccaggcgcctgtgttaaggttgcttaacatctggtatttgtctccagactcttttctctatcagggattatgtgttctgaggcacccaaaacatctttctgtacaccaagttccttcatgaagacttccgggtcttctttccacttcacactcccttttatctcaagcttattctgccacaggcatttggttaagcaaatatgttgctcattggcaacttgtcccatacctgggccaggttatgaagaggattccaagagtgtcagtcatgtggtgcttgcttgggggagcccaagctgagctggggctgggtgagggatggacaagggggctccttcctctgctcatgcagtgaggtggaaagggcatggggttggggtgcaaggacctgggttcctctcttgcctcccctgtgtggtcttgggcaagttgtctaccctcctcatgcctcagtttccattacatgtagggtgaagaccacagagaaagttccacctagcacatgaaaaatactcagtaggtaatggctcccatttttgtgatgtatccaggtagaataatggcatttagcagaagtcagtttattcaagctcacctttgagtctatcttacacaaagcactggttaggtgagggatggcgatgagccccggagaattccgcatgcttcccttctttagctttccagctagattgtaagctcctaactggatccttcaggatttggcacactctggtctgtgggccactgagacaggacatacatcttcttcatttctttctgtattcccagcaccaaacacgtggcatgtctctggtgggcatttggtagatggtgggcgaatgaatgaacaaacgagcattcagtaacctcttgctgatgaattgactaatactccacactggttacatttatattttgggcactgaatctctttgttttctggctctctcagggtatttaattttttctggaagctgaggttgagcctttcaggccacctttaccaggtcccaggctccaagtagactagacacccacccaggcctgggcagtggtagggagggtgtgacccaggcattggcctgcaaatttgccccagctccttcttgccaatgacttgtcacagggctcctgaagcctctcatgcctgactgcctcagaagaaagggtattttgtgagctctgtgggtgttaagtgttgaggagcagttcccaccagcagacagccttcacctgtgtttgataaaatgacaaattcatttttttcttctctaccccatccatctcctctttccttccctgtctgaaggggcctctgtcaggccagccaccagctatcgtgagaggagccaagttcctcattgccctgtgctgaaccgaactgcagcaagttggatagaggaggcagttttggcttgaacgcaaacatcctgtcggagaacagagtgattatagttttagctgcacacggggaaataacagcacagaggtgaatcatggcatctgtttactgctaattaacccctccgtgtacaccagtgttgtatgtgagccggcctgcggtctgaaccgcctcctataaggagggctcccttggcagccaaaaccagttggcccaaatgccttgataggcttcctgcttcacttgttgcccatgtggtctgattttagataaaagcattgcttttgggccagataagctttgagttctttaatgaagcactgtgtgtattggagagaggcacagagcacccagagctgaagctggtcagtcctggtcggccacagtttatggggctcctgggaggttttaaactctgtgctgcaactggggaaggttgtgggggaaggttgggtccagggagctactatttattgagggcttacaatatatcacattctgagctggccactttacatcttagctggtaaaattctcacagtgatcctgaaggacaagtgtggttcaggagctgagactcatagaggttaagaaatcacctggtggtggggttttggggagggccacacaggcatcccaagaggtagaagacaagctcagacatccaggaacttacagacttattgtgtgtgagatagttccataccatttgtaatttattcccaaaataaacagttattgagcatctattgcatgcctgtgctcagtgggggtggggggagtagggagagagaatccagaaaggagtcagctccagctttgtcttccataagcaaatggcttagaggggattgttcattttcactgttttgttttggggcaaggaggtgtgtcagggaggtgaggaggtagagtagagaatcatcctccaccgtgaagtgaagagaggaaggtacccccacattggaaatatgccttgaggaccagaaggaattgaccagtcttttgactttcattttttaaaattgaagtctaacatacatgtagggcatgcacagacataaggtgtacaggttggtacaatgtatgcgcctgtgcagccgcctgttcttggaggcaagagccctatgagttgcatgtggtcttcaggcagaatgaggagatgccgaccacaagcgctcctaggaattcagaggaaatggagcgcaatgaacccctccaaatctagtttccaccagaagggagaggaagatgaatattcatggatcttgatctctttttgcatcatttacattttgctttctccagatttgaggctccccacctgcccctgagttctgaagaataattgtttcatgcatcacatttttactgcattgggagaaaaagagggaaaaagaaaataaattgggagaagaaaagatgataggacttcttgactagttcagccagtttcgtga

SEQ ID NO: 636 - DNA, 4038 bp, Homo sapiens
gaaactgtgttagtaaaagaatgggaattctgtgaaagagaaataaatatatccaaattccaggtctgttaaaatttagcgcacttggatgttggtgcgacagagaatttaatctgcacactcagaagaaggtagtggttaactcattcagtggttatgaatcttccttgccttagaaagatcaattccttgtgcctctccacctccgtggcctggaaatacattattatatttcaatatggctctctttctaggccattgcgcattgtggccgtgtgcctgccaaaccccgtgcatggaatatttggaagcaggagacaaattggttagttagcaaatctttattagcatggctggccttttcccggggatatggggtcatgtaagacatcatttcctctctggcaataccggtaaccacattgcatgattccagggcgccactcacatcctggtcatgaatgaagccctctggagttgtgcagtgcacagcctgcatgcccatatacattgtcttttctaggcatctagctgtgtttgtgtaaaacccttacacaacaaattaaaaacacagtgcaaagcccataattcttaatggcaatgtgaataacagaaacatcaagaatttgggtttccaaaaatggggagaaaacagaactggccgtagagggagtggccagagagaacccactggggatgtggggttatgacggcagccccagcatatcctccaaatccagcctctgcaacaggcgctctccctaacttctgatcactgtgcagctcctgacatgatacaagaggcctcccaggcctctgtgcctgttctaagcatgagccttggagaagagagaatgctcagtgccagctcatgtgtatcccatggacaaggactaataggaccctgaggacttagaaaagccttctctgttgccaactgtgctatttttacctccctcccacagctcctgctttccccaggtatttgtcagcagagcgtcttgcacctgcatggaaagtggcagttggggcccaggatggccttgtgctgtgcaggccacagcagtctccttaccaggcctggcggccaggcccggcggccaggcccagcctctgaggctggcaggctgtggtgaggatggttgcataactggcctttctgccgctggttctgggtgaggtcgagccagagaaaacagttctgcagtcgacagcccctcctgggcactggtgcaacagacaggcttgtgggcctggtgctgacccctcacggtcaggagccacccttgctcttgagctgctgatcatcactgcagagtgcccaggtctgatcaacatccctgctgggaaaagcggagatgacctggcgtggtccatagtgatccaaatgtgatagaaggctgggggtggccccagtgatggcctactccttcccttccaaccctccacctcctccatcctccaagtcttagctcatcttgctgggaatgccgccttcctgggaagccttctctacctaccctagtcagctttctctgcctctcccttccctgatgcgtcctctctgtttgtccttccatcctgggtggggagcagccgtctgatgctgcagccctattttctatacaggcatcctgtctcctctgcagacagctccttgtggacagggctggtcctggtttctttctggatctgtgcctggcaggtggtcctagagggcagtgaccaggggtcgctcaatgtggtggctggtcatcaaagcaggccctcagtgaaccacgactcctcacgttcatcctcttgggttgtaccctttggggcagagctagcccctgtaatccatgggttgcttgtaacccatggattgtggtggaaatgatgctatgtgacttctgaggctatgttggaagaaccctggcagttcatttgttatctgggaatgctacttcttagggaagttggccactacagggggaagagcgagagtgagaggaagcatgtgcgtgggcatacgagagagagagagagagagagagagagagagacagacagacagagagacactactggggcaccacgcatatgtgtgaagatgccatcatggaagtggatcctccaaccccagttgacatagattggagatgaacccaccagctgatccctctatgaattccttacttaaaagtcataaacaaaatgaaatgattgttttaagccactacattttggggtaatttgttacatagccatggatgactggaacaaataattactatttagtgaagtcctttcacaaggtccagctcctgccctctttctaggttcctcttaacatcttcccaagctctccacacccagccacttaggacttccttcatttcgttaaaccttttgatttttacctctgggccttcacacatgctgttcacactgccggacttctcttttcttgtcctccttctccccttccacttagctgactcctgtttatccagggatgtgctggtaagtgattaacaacgggatttctagagaagaaagtccctatgtacggtgttcgtcaattcctatggtataaatattcctgccctggctggtttgaagataccagtgtgatgtcacagaacatagggtattgttatccatgattggcagttgtggaaactgaagcccagagcagttcagtcacttttctgggtagatcccaggcagatatggcctctgatatgcttggcctttgagaccatgctctttcctgttctcctgaagaaccagtagctatgagcacaggtaatattgctgctgggccatcctgtttcttctagacgagtagtcttccctctgcatttcttgagttgctgcaggctttaccttatgcttaccatacctggccagttgccagttaccacaccacgctgctggtttctctcctggaccatatttatggtatctagactctggtgtgtgcagtggcgatggaatcattgaggcaacagggacctgtgagtccatcttgaggtttgataaactgtgtattagtcagctaggccacctctgtaacaagaggtcaacatgtcaatgacttaatacagcagaagtttacgtattgctcatacaaagtaccattgatggtgtgtgtggagggtgcagtgaagacacacttcagacagtcattaaagaccccggctcctttcacttgtggacctgaaatcttctaggggcccctgaaggtctctgctggaccctctgcatctgtccggatgataggggatgagaagtaaggatcatgaggggtagttttgtaggggtagttatggaagtcattcacatcacgtctacccacacagttcattggccagaacttgatcacatggtattttaactgcaagggatcctgggaaatgtagcactgcacccaggagattgaaatagatttggagaacacctggactgctgaaggggctcccgagtcccacactgagggcttctgctgtccatagctggctctgccagaaccattatcatgacccaatgagaaaactgaatgtttactgggtatttgctaggtgtcagacatggtgtcaagcactttatatgcattatctcaatcctctaaatcagcctatgatgtagatactatctgtatttttcccattttacagatgtacaaaaactggggcttgcaatggctatgtgatgtcacttgcccaagaggcatccttaataagtggcagtaccagcattagaacccagggttttctgtcttcagattgttaactcttaccctcttcctatgctgctctggagtgccttcagctctgcctcttcttatccctgtctgcagcttgaaagctactcagcttcttaaacaccttcaggataaagggactaaggggcataactgcctccctgcttcatgtttcaaagagattgtcactggtttacgttggccctaattcaggggtggtgaattgacagtagttacctgagcctgccctcatgatttgaatgcatcatctcccagtctgccctctccca

SEQ ID NO: 637 - DNA, 4023 bp, Homo sapiens
atgggcttggtttgttgacaacatggtgcttgaatcattcgtggattttaattattcatgccacctggtttctcttgatcagtagctaacaaggatttagttcataatgggcagttgtttgtgaggtggatgagtcaggcacgggagggaagggcagtttcaaaagaatggctgctttaagatggaacttgctttgtttttggcattatttggtgattgtcttgggacattgtgtctaattgccaatttggaaatgtaattggcactccaggcccagaatggatatacacttaacgttgtcaagccgagccttggaatcatctccctgtaagatcttgttacctgtatgactaatacttcttcacgtggccaaaatcaaaattatttaacacatctcctttattttctattctttatgctggttcactggcctctctaccagattttcttggggactcagatccagtggcctctaggcatttcaaagcgaattcacaggaaagcctgaattccagccttctccccctcctcctcttgctccatcctttcttttacatccttttttccttagtggctgtcattcctgagggtttctgtggaaagttggtgctgtttaattttggtttctagcacaatagggaggaatacttcaatttggggaagaagtaattaaggtaaacattatgtagatctccccattatcagagttgacttttacttggggaaggggtgtttttttaaaaaggaaaaataggattttagatttttttttttttttgagataccgtcttgctgtgttgcccaggctggcaggctggagtgcagtggcatgatctcggctcactgtaacctctccctccagggttctagtgcctcctgagtacctggcattccaggttctcatgccccatgcctggctaatttttgtatttttaatggagacgggatttcaccatgtcagtcaggctggtcttgaactcctgacctcaaatgatccacccgccttggcctcccaaagtgctgggattacaggcatgagccaccgcgcccggcgagattttaggtttttgacttgaagtgaagttaatttccatctgttaactgctgaagtctgggaccatgatgtcttttgcaaaagagtttttaaggcaagactgtcagtaatattctttccagggtcacttctaactgtacgaaactattcagccacgatgggtctgcatctttgcatatcattgtaaaccaaattatctacaggctgttgggctgcctgtatgtgcatttcaagttgggagtataagatgagtatttattttattttctggttccatgtcttgttcttgctccttcttcccttttagagactggacagtcctctctgtcttcatctttgggagtgaactggggctggggggtgggatcgagagtggcctctgctggctgggggcttcaggtttgtagattagtagacaacaaatagcgacctgatttaacaagtgcagaagcgcatggaactataaattcacagtggtggaaggaagctttggggcctcaggccctgtgcgattcctccccagtgctggaagcccaccctaccagtgtgtttatgatctcctgaggccactattccactggggacaaacccaccttacgatgaacttggaaagatctttctgtttgcactagtccttgtttgcttctagtctgtgtctgggacatgcagaacaagccttggtggatggtagatttcaaattctaaatccagttcaggaagggacagagctgggtggtgtttccatgtccgcagtgttgagacgtagaatgaccttaaccttaacttgtgtttcctccatgaaggccactttatttttctccctgatggcttccctgggttcttcgtcctcctgagacagtgtggtttccctttgcccctttgcccagagttcagaaaacgacccattctggttgtttcttgaagtttgccttctgaggtctcttcggtcttgtcagcagctgtgactggaggcttttgactgttgctgggccataaattcacctccttatcaatgtcacgtgccttgtatctccaaggtttagcccccttctcagtttcacgtgggggttgtaatttgggggccctgccaagaatttggatgtagggtacagagcctttgttaggaaactcgagttggattccattttctaggtgttgactctttttcacctagggagacagacagtgctcttgaacctctttttgcatcacttgaatacagccgcttcttagaataggaggctgtttctttcccacctgctcattgggtctcctttcctctggggctcctgtatgcctctgctgtcatctcccctattttgctgaacagaaagaaaccagaaaagaaaagagagcaaaacacacaaaggaagaaggtgagggagggcaggaggtagagggagaggttgacaccaaggaaaaaagaatttctcctctgagagttagaggttggataaatagctaattggatggattttggttttagttacctcacctttgtcttaatgaataaatcatgtcaaatgacttcacctccaaggagtaaagcattctaccagtgggtagaatgagttcacgtttggaaaattttagctcttcaaacgagacattctgtggaatgaactgatagcacgcggcctgtgtggctcagaggtgaagcgttggaagggtttgtgggagatgttctttgtgtgcttgttaaccaagagcagaattctgctcctctttgggagaagttgccacattgacgttgttttctctttatgtggttttggaaagtggaccctttgtggctctggaaggggaaaaatgggcctccagttattcaaatggagaactcagagataagtgttctaaggcttggaggaaagatttggaagatgaaaggccttacccaagtgctagggatttttatgaccaacattagctggcaacagcttaatatacattgttgttctccttcctgcatctgggaacactttcctcccagagcttagaggaattatttcagctgcccatgaattatggccgtttctcctgtggcttgtggcagccacagccgatcaggtggtagattcttgaagagtataggaatgatgtctctagctgagcccacaagagggctcaacagtttgcctcagtctaaaaaaaaaaaacccaatcatttcttaagttctttcacaaccctgttttctccataggatttactttttaacttcagtattttatattttgtccttaatcccaaatatactacatgttcattgtagaaaacgtaggccgtgcaggggcattaaacaaaaaggacacagtcacatctgttaggatggctactgtaaaaaaaaaaaaatagaaaatcaccagtgttggtgaggatgtggagaaattggaacccttgtgcagtgtttgtgggaatgcaaagtggtacagatgcggtggaaagcagtatggcagtttctcaaaacaaattaatcattcaattatcatataatccagcaattccacttctggttagatatccaaaaaacttaaaagcagggtcttaaggagatatttgtacacccatgttcacagcagcattatttacaatggccaaaggtggaagcaattcaagggttcattcacagatgaatagattagcgaattgtggtaggtacatacaacagagtattattcaactttaaaaaggaaggcaagtctgacacgtgctaccacatagatgaacatcgaggacatcagccaaatgaaataagccagtcacaaaaggataacttccacttacatgaggtacatagagttgccaaactcatagaaacagaaagtagaagggtagtttccagggccagagggagggaagtgtttaatgggtatagggtttcagttttgtaagatgaaaaagttctggagatgggatgcacaacaatgtgaaacatgcacatttttaagtgtgaagtactacacacttaaaa

SEQ ID NO: 638 - DNA, 4037 bp, Homo sapiens
cagagccagggaacagcagtctcctgacagatagaaaacagctgaaactgatcagcagcttcccaataagatctcaggagtggggagggttaaggcaagatcttggaagtaggccaaagtataaaaccctgtgttagtttgttctcacgctgctaataaagacatacctgagactgggtaatttataaaggaaagaggtttaatgaactcacagttcacatggctggggaggcctcacaatcatggcggaatgcgaatgaggagcagggtcatgtcttacatggcagtaggcaagagggcttgtgtggcggaactcccctttataaaaccatcagatctcataagacttattcactgtcatgagaacagcatgggaaagacacaccctcatgattcaattacctcccaccgggtccttcccacaatacgtgggaattacgggagggagctacaattcaagaggagatttgggtggggacacagccaaaccatatgaaaccccaagtcaagaggtcaagctatgcacttggtttctcaagctgcccacttgaccatcttccaagttgtactctccttcttctctttcctttccttcctttccttactgttctaaagcttttaaataaactttcactcctgctctgaaaaaaaaaaatgtttatctttgcaaaaatatagcaaaagcagaatttcctggtttcacagaaagagccttacctttcataaaagcatcatggtttataattttttaaaccatcaaatgatcatctttgggaagcagggtgcttggcaactgtgggataacaaggctgaagaagggatgcaccttccagggaggccactgtgaaacaaagggctttaaaaaaaattccatttttatttttgatttgagggtacacgtacaggtttgttacaagggtatattgtgtgatgctgaggttagtgcttctattcatcccaccatccagacagtgaacacagtgcccaataggcagcttttcagtccttgctccccttcctcactcctccttgtggagtccccagtgtgagtctattgttctcatctttacgtctgtgtgaacccgagagttgattcccacttacaagtgagaacatgggatatttggttttctatttctgtgttaattcacttaggataacagcctccagctgcaaccatgttgctgcaaagaatgtgattttttttcctggttgcatagtattccactgtgtacacatactacattttctttatccagtgcaccatcgacagacattcaggttgattccatgcctttgccattgtgaatagtgctgtgatgaacataaaagtgcatgcatttttttggtacaatgacttattttcctgaaacaaagggaccttgttttggagaacattatgacaaaagcagacaccaggaaagcaagtcagaattggaagtaaatgaaactcttagagatgttgtacttcctgacttctctccttattcccaagagggtttgtaagtgggaaggatgatctcagcattgttcttacttgcaaatattgcaaaagctaccaggaagaggcaggagtaagtccctgcttcatctgcacagtcccttagattgcggtcattggattattttggagcactaggagtaagaagtcaagtcctggactgcccaggcattgaactagagcttttgcaaagattaaatcaggaatactctaagaaaaggattagaaagctttttggtctgtcagtcaggaagacaagttctgtagcactgaggaaaatctttttccttttggtgccttcttctcccactagcaaaaatgggtggactgatttttgccctgcctacctcccagaggcaaggcccacagtagtggtgttctgctggggggtgacactgatcacagagaggaaagggacacaggaatctgcagaatcgttattctggaaatcctgcagaatggtggtgaaaggtgaattctaggcagggcattgtgcctgagctgtgccttctttgacctagccatggatgtcctttggggaatgaagatgatgttcttgcaagtttgtatcttggcaggcaggtggcgcaatgattgaggaggatacgatgagaccacagcattattttcttccaatgcactggctttgatgtgttagaaaagaagagaattactttgcgggtaacatgccctggctcaaagcttcttcatcacaattggctgatctgaggccagtgacctggggcagggctgggaagtatcccacggccagactgactgccacaggcacctctttcctacacacacctgctctcccgaggcactggagacaggatggaagcatgtcagtggaaatcttctggacatcttttttgacaactagaagtcatttgcacacagttttataatttattttaaaacatattaaactttggaatcatctaaatgccaggagtatgccatctactgaaatgttatccaattatcattttttaaaatagtgttttccatgatatttaatgacttagagaaaatgctaacagtttcatgttaagggaaaataggataaaagttagatgtttaatctaaccctaattttgcagaaatacacacccaaggaaaaggtatgagataaatatataaaaatattaatagtggttattttggggtggtaagattctatgtgacatattcttttttcttgtcactgacttgaagcttatatgaaacttttatattccaaagtttataatacatatgaattattcttacaagcagaagtaaatataaaataaatatctataaaaatgtaagcatgtgaaagcttgttctgtaagtcccactctccagcattataaattacaaacagataaatcacttcagaggtaacagactttccttgtcgtgccaagtaacctggcagagctaagcctcagttttctcacctgtaaagtgggaaaatagctacagccttttttttttttttttttgagacagagtctcgctctgttgccagttggagtacagtggtgcgatcttgactcactgcaacctccatctccccagttcaagcaattctcctgcctcagcctcctgagtagctgggcttacaggcatgcgccaccacatccagctattttttttttttttttttgagatggagtctcgctctgtcgcccaggctggagtgcagtggcgcaatctcggctcactgcaagctctgcctcccgggttcacaccattctcctgcctcagcctcccaagtagctgggactacaggcatccaccaccacgcccggctaattttttgtatttttagtagagacagggtttcactgtgttagccaggatggtcttgatctcctgacctcgtgatccacctgccttggcctcccaaagtgctgggattacaggcgtcagccaccgcgcccagccaatttttatatttttagtggagatggggttttgccatgttggccaggctggtctcgaactcctgacatcaggtgatctgcccgcctcagcctcccaaagtgttgggattacaggcgtgagccaccgcgcctggccactactgcacttttttacttcacaaagagactgtgaagaccaagggtggttagaaagagggatactgctgactttaaaagaaaacacagtggtgattcaaggaagggcagggttactggtggcagtaacagttgagatctgacatcaagtcatagtaataacatgaactttgttagctgcctttatccacaacagcttatatgctggtaggactggtaactagataattcatactgttgaagctgtagggttttgttgtttttttatcaatttttcttatttttttaagtgacaaaaagtgtgtttatggtgtacatgatgtttcaaaatacacatacattgtggaatggctaacttaagtaaattaacacatgtattacctcacatacttatcatttacctgtgatgagaagacttaaaatctctcagtggttttcaagtatacaaaaaaacattgtttatccac

SEQ ID NO: 639 - DNA, 4034 bp, Homo sapiens
tgcctctaacagtctccctgttccagctgcatagtgctgtaggcaagccatctttctggaagcatctaaagtttgcgcttaaataagcccatgtcagaggtcctcagagagaaagagctggcgaggcactctgtggatgctacgaaattgtagtggctgcagtgctcagagaaacgggaggtcatttctctttgtgtttggactttctagaatggccaggaagatggcagggtctctcccaccttcaggtctctttctggattagtcagatgtccacgcaaaatccactggggaaatttccctggtgggagactcaaagactcagtttctagccaaaggtgaggatctacctctccttcctggctccaggcagcattcctagaatggtgattcttacattctgggactctaacagcattctgctgaaatatggtaagcaccttctactaggacctttactgaacttccctcttgaacccagaaaccagtttattggtctgtatttatggcttttttgcaggacactgctagattgggtttttgttctggaaggaccccttcactgttttattatttacccccagggccattaaagtactagagattgccagctggatacaacatacccgagtgaagccgtgaaaaggcttcaggacaccagagttggaagcaatgccctcagctcctcaatacacttgcaaggccctgaaagatctgaggttcctctttaaggggaaaggacatcaagctccagatgatcctcagtgagagatattgtcctctcaatattcaagagtcacctttctaaagggaacctctagattgttcatcagtgggacacgacagaggcaaaatcctgcccctgtctcccttagacctggctggataccgctttcaccaattcatggacccaagtcggccctgacagctagcaagaggccaagacccacagaaccaccaccgcccctctgtcagcaggaagaagttgcagaagactgaccttcatccattttcccccaaaggtttaggatcttggactcttgaggggggacgtgttatagtaggtagccagtcaggtatgagcaaggcaggagagggctccccacaacacacttaggagtggtgggcaaccatcaggtgatggtcagggggttaactgtttctctaaagtaataattggtcacagccagagccagggaacagcagtctcctgacagatagaaaacagctgaaactgatcagcagcttcccaataagatctcaggagtggggagggttaaggcaagatcttggaagtaggccaaagtataaaaccctgtgttagtttgttctcacgctgctaataaagacatacctgagactgggtaatttataaaggaaagaggtttaatgaactcacagttcacatggctggggaggcctcacaatcatggcggaatgcgaatgaggagcagggtcatgtcttacatggcagtaggcaagagggcttgtgtggcggaactcccctttataaaaccatcagatctcataagacttattcactgtcatgagaacagcatgggaaagacacaccctcatgattcaattacctcccaccgggtccttcccacaatacgtgggaattacgggagggagctacaattcaagaggagatttgggtggggacacagccaaaccatatgaaaccccaagtcaagaggtcaagctatgcacttggtttctcaagctgcccacttgaccatcttccaagttgtactctccttcttctctttcctttccttcctttccttactgttctaaagcttttaaataaactttcactcctgctctgaaaaaaaaaaatgtttatctttgcaaaaatatagcaaaagcagaatttcctggtttcacagaaagagccttacctttcataaaagcatcatggtttataattttttaaaccatcaaatgatcatctttgggaagcagggtgcttggcaactgtgggataacaaggctgaagaagggatgcaccttccagggaggccactgtgaaacaaagggctttaaaaaaaattccatttttatttttgatttgagggtacacgtacaggtttgttacaagggtatattgtgtgatgctgaggttagtgcttctattcatcccaccatccagacagtgaacacagtgcccaataggcagcttttcagtccttgctccccttcctcactcctccttgtggagtccccagtgtgagtctattgttctcatctttacgtctgtgtgaacccgagagttgattcccacttacaagtgagaacatgggatatttggttttctatttctgtgttaattcacttaggataacagcctccagctgcaaccatgttgctgcaaagaatgtgattttttttcctggttgcatagtattccactgtgtacacatactacattttctttatccagtgcaccatcgacagacattcaggttgattccatgcctttgccattgtgaatagtgctgtgatgaacataaaagtgcatgcatttttttggtacaatgacttattttcctgaaacaaagggaccttgttttggagaacattatgacaaaagcagacaccaggaaagcaagtcagaattggaagtaaatgaaactcttagagatgttgtacttcctgacttctctccttattcccaagagggtttgtaagtgggaaggatgatctcagcattgttcttacttgcaaatattgcaaaagctaccaggaagaggcaggagtaagtccctgcttcatctgcacagtcccttagattgcggtcattggattattttggagcactaggagtaagaagtcaagtcctggactgcccaggcattgaactagagcttttgcaaagattaaatcaggaatactctaagaaaaggattagaaagctttttggtctgtcagtcaggaagacaagttctgtagcactgaggaaaatctttttccttttggtgccttcttctcccactagcaaaaatgggtggactgatttttgccctgcctacctcccagaggcaaggcccacagtagtggtgttctgctggggggtgacactgatcacagagaggaaagggacacaggaatctgcagaatcgttattctggaaatcctgcagaatggtggtgaaaggtgaattctaggcagggcattgtgcctgagctgtgccttctttgacctagccatggatgtcctttggggaatgaagatgatgttcttgcaagtttgtatcttggcaggcaggtggcgcaatgattgaggaggatacgatgagaccacagcattattttcttccaatgcactggctttgatgtgttagaaaagaagagaattactttgcgggtaacatgccctggctcaaagcttcttcatcacaattggctgatctgaggccagtgacctggggcagggctgggaagtatcccacggccagactgactgccacaggcacctctttcctacacacacctgctctcccgaggcactggagacaggatggaagcatgtcagtggaaatcttctggacatcttttttgacaactagaagtcatttgcacacagttttataatttattttaaaacatattaaactttggaatcatctaaatgccaggagtatgccatctactgaaatgttatccaattatcattttttaaaatagtgttttccatgatatttaatgacttagagaaaatgctaacagtttcatgttaagggaaaataggataaaagttagatgtttaatctaaccctaattttgcagaaatacacacccaaggaaaaggtatgagataaatatataaaaatattaatagtggttattttggggtggtaagattctatgtgacatattcttttttcttgtcactgacttgaagcttatatgaaacttttatattccaaagtttataatacatatgaattattcttacaagcagaagtaaatataaaataaatatctataaaaatgtaagcatgtgaaagcttgttctgtaagtcccactct

SEQ ID NO: 640 - DNA, 4058 bp, Homo sapiens
tcactgtaaccttcatctcccgggttcaaacaattctcctgcttcaacctcctgagtagctgggattacaggtgcctaccaccacacctggctaatttttgtagttttttagtagagatggggtttcaccatgttggccaggctggtcacgaactcctgacctcaggtgatccacctgcctgggcctcccaaagtgctgggattacaggcgtgagccactgtgcccagcctcgtgtaagaattaaaacgagtaggaaagcagtgcttccaaaaaggcaggctgcttgaccccacgcggtacaaaggatgatttgagcttatactccggtcttggcactcagtgggaaagtcatgccctgcccaattccctctctaacctgattgccacagagatggtcattgtgcctggaacatctctacaacacttaccaatttctccttttagcaaaggcagtctaggcttcagatggagggctttcacctgaaaacagcaagctctgattttacagcattgtttgcatttattatatttacttttacacttgccttctatttatttctaatgtatttatattttgatttgttatttatttttattttattattacagtagtccccctcttatctgaggttttgctttctgcaatttcagttacctgtggtcaaccacagtccaaaaatattcaatggaaagttccagaaataaacaattcataagttttaaactgctgccattctgagtagtatgatgaaatctcttgccaaatgctccatcctgcctgggatataaatcattcctttgtccagtgtatgcaccacccaccacctgcctgttagtacctgagcagtgttctcggttatcagatggaaaaacttgtatatactgtgtgtagagttcagtgctatctgtggcttcaggcatccacaggggttctgggaaggtatgccctgcagaaaagtgagagactactgtatttatttacctgctacttacagtgatgttggttttccaggaagatagtggtatagaatttccttttgaaataaatttaggtaaataaaagtagtctattgaagacaaatattagtaagtaattgaaaaggcagtatgacgatatggtcaaaattgtgaaggtggtctaagcattagggaaatatgtgcattgaattttgggacatgtaaattgcccattatggtctctggcctcaactattattcccctagaaggaagggcatgccctgcctacatgctttttctctgcctaccacctcagctcccaggcagtgctgatctcaccagtcttcatggaagacccagggaagagagagccgagcgagccctctgggcagtgcgatgtgtgcctgcattctgtttagtttgtaaattggttctgactcaaataatatcccccattgaatttaatggaacatcatttcaatgggccaccacattatgaaccattgaagttaatgaaaagtcatttcaatgagctaccagattatgaaccattgaatttctatactaatgataaaggggctggaattcccttctgggtcattgtactttaaatagaatatgtattaccttctgaaataaaagccacttatgcataccaactcatctatctcagtagagtgtcaccaagacagatcttgatagaaaagccaagagcaagtcaaatgaaaagctctaagcccatgaccatatatcacccagggagttcccagggctgctagagcagtttgcaggttgctttgttcaacttacagctttcaattttgttattaggagagaagaacaaaatgaaatttatagataaccaaaaggatgtttttgcacgctttcaattcagtgtagcatcttgcagaaaatgcatttagcacagtgtcctggagctcacagaggctttttctgaagggaggtctgagacacacgctgggcagtgtctgcctctaacagtctccctgttccagctgcatagtgctgtaggcaagccatctttctggaagcatctaaagtttgcgcttaaataagcccatgtcagaggtcctcagagagaaagagctggcgaggcactctgtggatgctacgaaattgtagtggctgcagtgctcagagaaacgggaggtcatttctctttgtgtttggactttctagaatggccaggaagatggcagggtctctcccaccttcaggtctctttctggattagtcagatgtccacgcaaaatccactggggaaatttccctggtgggagactcaaagactcagtttctagccaaaggtgaggatctacctctccttcctggctccaggcagcattcctagaatggtgattcttacattctgggactctaacagcattctgctgaaatatggtaagcaccttctactaggacctttactgaacttccctcttgaacccagaaaccagtttattggtctgtatttatggcttttttgcaggacactgctagattgggtttttgttctggaaggaccccttcactgttttattatttacccccagggccattaaagtactagagattgccagctggatacaacatacccgagtgaagccgtgaaaaggcttcaggacaccagagttggaagcaatgccctcagctcctcaatacacttgcaaggccctgaaagatctgaggttcctctttaaggggaaaggacatcaagctccagatgatcctcagtgagagatattgtcctctcaatattcaagagtcacctttctaaagggaacctctagattgttcatcagtgggacacgacagaggcaaaatcctgcccctgtctcccttagacctggctggataccgctttcaccaattcatggacccaagtcggccctgacagctagcaagaggccaagacccacagaaccaccaccgcccctctgtcagcaggaagaagttgcagaagactgaccttcatccattttcccccaaaggtttaggatcttggactcttgaggggggacgtgttatagtaggtagccagtcaggtatgagcaaggcaggagagggctccccacaacacacttaggagtggtgggcaaccatcaggtgatggtcagggggttaactgtttctctaaagtaataattggtcacagccagagccagggaacagcagtctcctgacagatagaaaacagctgaaactgatcagcagcttcccaataagatctcaggagtggggagggttaaggcaagatcttggaagtaggccaaagtataaaaccctgtgttagtttgttctcacgctgctaataaagacatacctgagactgggtaatttataaaggaaagaggtttaatgaactcacagttcacatggctggggaggcctcacaatcatggcggaatgcgaatgaggagcagggtcatgtcttacatggcagtaggcaagagggcttgtgtggcggaactcccctttataaaaccatcagatctcataagacttattcactgtcatgagaacagcatgggaaagacacaccctcatgattcaattacctcccaccgggtccttcccacaatacgtgggaattacgggagggagctacaattcaagaggagatttgggtggggacacagccaaaccatatgaaaccccaagtcaagaggtcaagctatgcacttggtttctcaagctgcccacttgaccatcttccaagttgtactctccttcttctctttcctttccttcctttccttactgttctaaagcttttaaataaactttcactcctgctctgaaaaaaaaaaatgtttatctttgcaaaaatatagcaaaagcagaatttcctggtttcacagaaagagccttacctttcataaaagcatcatggtttataattttttaaaccatcaaatgatcatctttgggaagcagggtgcttggcaactgtgggataacaaggctgaagaagggatgcaccttccagggaggccactgtgaaacaaagggctttaaaaaaaattccatttttatttttgatttgagggtacacgtacaggtttgttacaagggtat

SEQ ID NO: 641 - DNA, 4047 bp, Homo sapiens
ctcccagcttccggctacagctgtcccgctagactcctctgtccctcaagtgagtctgcctgcgacgcccggtgcccctttgtctggcacagaggccaggtggagaccagagcggcgccagggaggctggctagcgcactgggctgctagagagattgcagcaggtgacatggacatagtggagcttgggggtcgccagtctgctgtgtcccaaactttctgaccactggctggcccagcacggggaggtggtgctacttcactgagctgcttcaggaccacctctaaactcgaaacccacctgaggccccatttgctcttctgcgatccattatctatctttcccttccacatcccggctctcatctcaggggtcccttttcttccttgtcactcctgctcctcctgacttctctacagaggttcttcttctccctgcccctagaccctcctctggagctccgaggtttgagttactgccatgtgagtccagacctaagagcaaaatagtgtaattaccaaattcctccaggacaaagacgcctcgaactgtattgcactttttaatgtgattcagctctatgaaaacctgcaagagagggagggaggccggggtaaggcccacaggctccacccctgccccacacagcacactctcccagctacagccccacccacacaaagaaagtctatttcccaaagagaggacagaagaatccacacgcacacaactcaaaagcgctaagaagcgaagatagcagaaagggcatgtaccttccgctcctggccggaggagaaagcatgggagagaaatgaaggcgttagtttgaatggtcaaacccaacccgaaggccctgctgctggcctgggctgcccgcccgtaccctctgcccagggcagtgcttgtaagacacagtgccccaggggtccccactcagcccattaggtctctacccttccatgcatcctcctccggcgcagagggctggcacgggcgcaaagctcccctcagactgtcctcagggtgggaggtgttggtatcctccttgaaacaggatccaggatctcccaagaggtatgtggtgataataatatcagctaccacttgctgagcacctacttggggttttacaaatacgatttctaatctctgcacctactacgtgacacagtaaatagtattacccccattttctacatgaggaaactatggatcagaaagtttctttgcccatgaacgtggaagctgggcttcaaatccaagcatgtcctcacaccgaagcctgtgcttttcccatttaccccagactgcacagctccaccaggaggtctgctgcctcctccactccaactgaacactgtgtggcagaatagggggcaggtcgctatctcattactaactgtgaggtgagattgagaacccgggctttcctccccttctctgcagtctatcttctaggggccaagccttcaaccacagactggcttggatggctgcccagtggggctatgccaagggcaggacgaggaacagggcagagcacctgggcgttgctcagcaagatctcatcttcagaggccacggcgctaaaatgtggtcagaagtctgctccccaagaagtactgacacctttgtggtccagaaaagcacttaggtagacccctctctgggatggtcctaaggtctttggggttggctactgccctaagtcctaaattgaaaatatactaaggggctgctggcagcctgcgcagccatttcctgttaaaccaaagctgcccagctacgttcctgaaagagagctacaacggctagcggagggagggagacagccacgtcagtcaggcatccacctcccctgagggtctgcggcctggccagggtctgtggggcttcacacatttgggtctggctcagagcctcagggagaggaacccggacatcagggaaagaggagggaaggcacttgtgtgaggagtcagagctgtgaacggacctgggatgatgcgctggcctcagaaaggaattagcttaaggaatgtccactgagagaaaaaggtaacactgtgttaaaagaccaagagagaaaaaaaaaagtcagctcctatggtggaattacaatgagggaaagatgtatccacaagtgctccccaatcaaaagaaagggaatggggcctgtggagcaggggacagagtgggaacactcagaggaaggaaaagaacaggaagaagaatccgcagaagaaaaaggcaaataaacacactccagagaggacagatacaagctacttacacacaagcacgcaggcacgcacgcacgcacacgcaagctgcacgcacaccagaaagacacaaggagatcggccagtctagactctcaaagcaaaaccaccaagcagaagcatatcctgggaatagaggaaggcagagacactgcaggggaagggccaagtgagacgctcccactcacactgtgtggagtccaacggatggggcagcgtggccacctggcctcgctcctgcccagcctcccccacgggctccctggtgcaccttcacagcgccaggtggtcgccaacgtcactgtgccctcccctggggtttctttcctgggtccagctgctccagttctccctctagctccagagggccctctctcatgcttgctggggaagtactgggggcttggacattggtccttcttacagatggaacgacagggagcctcgtgctgccgctcgcacctacctgattgtgcatgaatttgaggttgatcccttccagggtcacctgcagcaggccaccctcaccagtcttcaggtcctgcacagggaactcgccacccaattcaggtcctgtggtgagggagggggctatcagctcactggtgaggtggggaatcccacccctgacttccctgccaggcccctgacactcagaaggactggtagaaacagggaagacactctcaggaaaaactctcctcaccgggtttgatgctttgctgtcgggcggcagcgcgctccatgctgtccttcacacagtagtacagctcccgacactgtggcacagggggagagtggtcccatcatgagggctgtccagggttccccacccactgctctataatggccactgaaggctggaggttgaagtgaggggtaaaattttaagtagtcctcctatttttcggatgtcttattcattgttgaggttatgaatgatagatccggagcatatgaatagtatggctttaaagaaggcatgggtacagatgtgtaggaatgctagatatggttggttaataccgattgtgactactattaggcctagttggcttgacagagacagctttaggtactccacccaacagctggagacagaagtgtggctccagatgtgtgttttggaattttaacttcccaaagagaaattcactatttggtcttcaatgcctactagccccaacccaaacacagatcctgcgtacctttttagtatagaacttgttgagctgggtctcagagccatttctacgccacaagcacaacaccttcgtcttgggacagtaggtcatgttgatgagcttctcgtaccaccagcgctcatacactgttccgatgttactacgcaacaccacacagtcatcgcacacctggagaagtgcacaaagcggctcagtggttcctgtctctgacagcctctccctagactgtttcctacagggaaaggtggtcctggggcatccccatggtcaggttttctgccttacgctcatggtttccctaggtgaagacacaaaacagaactactgacatgctgcctgctacaaggattgttggaagagatggagtcattagaaggaaccgatgtataagggaggaggcacaaatcaatcagttatttattacctcttttttttttttttgagacagggtctcactttgtaccccaggcttgactgcagtggcgccatctcagctcactgcagcctcgaccagccaggttcttcctgcctcagcccccaaagtagcagggactacagg

SEQ ID NO: 642 - DNA, 4037 bp, Homo sapiens
cccttcctctctgtgcccttcctctgagagggtgagccccagggttccctcactcctcacagagtgaaactgctccaggcgcccagtcatgccgggtcacagagaagggagagccagactcttgcagtggacagttataacgccagggacaaggacaaggaaccacaacacaaatgtctcaaggacacaaaatagtgggttcacaccggccccacagactgtacacattcttgagccctgaggggaaggcagtttggtcttctgggagtggagagggagaaggtggacacgctcaagacacactcagagggacacataaccggtaaccaaccaagccacagcagggggcttgcagaggacacacgagcatcatccactcctcagtcacagcagcatcgtgcacttgggaacagcaaggggccaggggcgtgccctgggctggggcagctgcgtagcccctctccatcagctagagacaggccggggcggggttctgagatcttcctcactgctatgaactgcagccacgtacgagaagagacataatacggagtagcagatttcgtgggcctagaggagagaaaaccaggcggatcacgatactgagactcctccatctccatatgtgaaggatctgccaatgggcaactcctgccctaacactgggcatgggcctctgggctaaacgtgagctccaagcaaggaagctgtccccatgggagaggggatccgtgtgtgtgtgtctgtctctcagggctcaagacctgtttcagcctgagttgaacctttggcaacaaaacgaggtccccactcacccctgtgcgctcagagggccctcccctcctcctgtccgaaggtcccccagggagccctgcgcaccgtggcccatcagggttgagcggcacactcaccattggtgtcttgtacttgtggctcaccacttctttaatttcaggaactaaaaccggacgggcaagagacaaaacagaaagttcaacactaagagcaatcgtgccatgctcccccaggcggcagcgcccggcgtcagggtccccttcccctctgtggcctctcacagtggctgcagcagcttaggctatgacagggcagaggccaccagaggctctgtccagactctgccagctgggaggacatggccctagcctcctcagctaggcctctgtcatccgcagtggcgtttacttgatggccgtgattctacccacttctttgaaagccctggatgggagggacgggcctttcaccagcctggtcacagctactgtccagggcccctgaggagctgcagtggggaattcccaggttttggctgggaggagagagctctctctagcttgtgtccaactttgctgagacacccgtgaactcgtcaccagcctgaaaattgggtcatgttaaacacagttcccgttattcccagccccctacacagagggtcttgaggctggatgaagaggtaacatgatataaacccacaggatgtggcagtgtccttccctgagtggcaggagaagcccagacctgcctgtgtgagggagagcgtctgagggctctggagcaacacacccagcagaagacaggcgagtacagcacccagggagggaggtgacagggagcatcaggcaaaatacacacatgtccacagcccagaaggcaagagtgagagtccccccgctccagccatgcaggggttctgcttggccagaggaaggagtaggccccccaggctcagccaccatcatggccccttgagactgggagcagaggggcctggcatctccctgggggccagaaaaggcaggaggagaattggccgtaccttcttctgaccctgggaggtagaatttgggggaacccagggtcagcagggaataaactcatcaaaggtagagcaagaagccccaggccattctcccgagttggaagattcccccaagtatctctctgacagaagagagaagggaacacacggggaggaaagtccagtgagccggtgagaagggggaggcaaggtaggaagaaagagggtaggggagaaaggaagagacgagctggcagtgtgaggagctggttcgatgggagctacccacccagggcagggcccaaggcagagacctggggagaggcagcacgagccgaggtcactttacctgctggagaacgaaggttttcatagcagcgatgaggggcacaaaagaatgaagcacaaacacagcaggaactcaaagccccagggtgagaacccactacaccactccctagcgctggctcccagcttccggctacagctgtcccgctagactcctctgtccctcaagtgagtctgcctgcgacgcccggtgcccctttgtctggcacagaggccaggtggagaccagagcggcgccagggaggctggctagcgcactgggctgctagagagattgcagcaggtgacatggacatagtggagcttgggggtcgccagtctgctgtgtcccaaactttctgaccactggctggcccagcacggggaggtggtgctacttcactgagctgcttcaggaccacctctaaactcgaaacccacctgaggccccatttgctcttctgcgatccattatctatctttcccttccacatcccggctctcatctcaggggtcccttttcttccttgtcactcctgctcctcctgacttctctacagaggttcttcttctccctgcccctagaccctcctctggagctccgaggtttgagttactgccatgtgagtccagacctaagagcaaaatagtgtaattaccaaattcctccaggacaaagacgcctcgaactgtattgcactttttaatgtgattcagctctatgaaaacctgcaagagagggagggaggccggggtaaggcccacaggctccacccctgccccacacagcacactctcccagctacagccccacccacacaaagaaagtctatttcccaaagagaggacagaagaatccacacgcacacaactcaaaagcgctaagaagcgaagatagcagaaagggcatgtaccttccgctcctggccggaggagaaagcatgggagagaaatgaaggcgttagtttgaatggtcaaacccaacccgaaggccctgctgctggcctgggctgcccgcccgtaccctctgcccagggcagtgcttgtaagacacagtgccccaggggtccccactcagcccattaggtctctacccttccatgcatcctcctccggcgcagagggctggcacgggcgcaaagctcccctcagactgtcctcagggtgggaggtgttggtatcctccttgaaacaggatccaggatctcccaagaggtatgtggtgataataatatcagctaccacttgctgagcacctacttggggttttacaaatacgatttctaatctctgcacctactacgtgacacagtaaatagtattacccccattttctacatgaggaaactatggatcagaaagtttctttgcccatgaacgtggaagctgggcttcaaatccaagcatgtcctcacaccgaagcctgtgcttttcccatttaccccagactgcacagctccaccaggaggtctgctgcctcctccactccaactgaacactgtgtggcagaatagggggcaggtcgctatctcattactaactgtgaggtgagattgagaacccgggctttcctccccttctctgcagtctatcttctaggggccaagccttcaaccacagactggcttggatggctgcccagtggggctatgccaagggcaggacgaggaacagggcagagcacctgggcgttgctcagcaagatctcatcttcagaggccacggcgctaaaatgtggtcagaagtctgctccccaagaagtactgacacctttgtggtccagaaaagcacttaggtagacccctctctgggatggtcctaaggtctttggggttggctactgccctaagtcctaaattgaaaatatactaaggggctgctggcagcc

SEQ ID NO: 643 - DNA, 4023 bp, Homo sapiens
acccagcttggtctttcctgccccctccctgatgctcaggcagagcagccagcggtccctgggactccactagcctcgaccactccatcctctgatgccgaaggcatggcaggccacagggaattcgccgctccactgcagtcacagaggctgtggcaggcagcagccaacactgcgggccctgggcagtagctgccggcttgggaatgcagaaggaagcagggaggctgccactcactccggctgccccccaattcttcccttcctctctgtgcccttcctctgagagggtgagccccagggttccctcactcctcacagagtgaaactgctccaggcgcccagtcatgccgggtcacagagaagggagagccagactcttgcagtggacagttataacgccagggacaaggacaaggaaccacaacacaaatgtctcaaggacacaaaatagtgggttcacaccggccccacagactgtacacattcttgagccctgaggggaaggcagtttggtcttctgggagtggagagggagaaggtggacacgctcaagacacactcagagggacacataaccggtaaccaaccaagccacagcagggggcttgcagaggacacacgagcatcatccactcctcagtcacagcagcatcgtgcacttgggaacagcaaggggccaggggcgtgccctgggctggggcagctgcgtagcccctctccatcagctagagacaggccggggcggggttctgagatcttcctcactgctatgaactgcagccacgtacgagaagagacataatacggagtagcagatttcgtgggcctagaggagagaaaaccaggcggatcacgatactgagactcctccatctccatatgtgaaggatctgccaatgggcaactcctgccctaacactgggcatgggcctctgggctaaacgtgagctccaagcaaggaagctgtccccatgggagaggggatccgtgtgtgtgtgtctgtctctcagggctcaagacctgtttcagcctgagttgaacctttggcaacaaaacgaggtccccactcacccctgtgcgctcagagggccctcccctcctcctgtccgaaggtcccccagggagccctgcgcaccgtggcccatcagggttgagcggcacactcaccattggtgtcttgtacttgtggctcaccacttctttaatttcaggaactaaaaccggacgggcaagagacaaaacagaaagttcaacactaagagcaatcgtgccatgctcccccaggcggcagcgcccggcgtcagggtccccttcccctctgtggcctctcacagtggctgcagcagcttaggctatgacagggcagaggccaccagaggctctgtccagactctgccagctgggaggacatggccctagcctcctcagctaggcctctgtcatccgcagtggcgtttacttgatggccgtgattctacccacttctttgaaagccctggatgggagggacgggcctttcaccagcctggtcacagctactgtccagggcccctgaggagctgcagtggggaattcccaggttttggctgggaggagagagctctctctagcttgtgtccaactttgctgagacacccgtgaactcgtcaccagcctgaaaattgggtcatgttaaacacagttcccgttattcccagccccctacacagagggtcttgaggctggatgaagaggtaacatgatataaacccacaggatgtggcagtgtccttccctgagtggcaggagaagcccagacctgcctgtgtgagggagagcgtctgagggctctggagcaacacacccagcagaagacaggcgagtacagcacccagggagggaggtgacagggagcatcaggcaaaatacacacatgtccacagcccagaaggcaagagtgagagtccccccgctccagccatgcaggggttctgcttggccagaggaaggagtaggccccccaggctcagccaccatcatggccccttgagactgggagcagaggggcctggcatctccctgggggccagaaaaggcaggaggagaattggccgtaccttcttctgaccctgggaggtagaatttgggggaacccagggtcagcagggaataaactcatcaaaggtagagcaagaagccccaggccattctcccgagttggaagattcccccaagtatctctctgacagaagagagaagggaacacacggggaggaaagtccagtgagccggtgagaagggggaggcaaggtaggaagaaagagggtaggggagaaaggaagagacgagctggcagtgtgaggagctggttcgatgggagctacccacccagggcagggcccaaggcagagacctggggagaggcagcacgagccgaggtcactttacctgctggagaacgaaggttttcatagcagcgatgaggggcacaaaagaatgaagcacaaacacagcaggaactcaaagccccagggtgagaacccactacaccactccctagcgctggctcccagcttccggctacagctgtcccgctagactcctctgtccctcaagtgagtctgcctgcgacgcccggtgcccctttgtctggcacagaggccaggtggagaccagagcggcgccagggaggctggctagcgcactgggctgctagagagattgcagcaggtgacatggacatagtggagcttgggggtcgccagtctgctgtgtcccaaactttctgaccactggctggcccagcacggggaggtggtgctacttcactgagctgcttcaggaccacctctaaactcgaaacccacctgaggccccatttgctcttctgcgatccattatctatctttcccttccacatcccggctctcatctcaggggtcccttttcttccttgtcactcctgctcctcctgacttctctacagaggttcttcttctccctgcccctagaccctcctctggagctccgaggtttgagttactgccatgtgagtccagacctaagagcaaaatagtgtaattaccaaattcctccaggacaaagacgcctcgaactgtattgcactttttaatgtgattcagctctatgaaaacctgcaagagagggagggaggccggggtaaggcccacaggctccacccctgccccacacagcacactctcccagctacagccccacccacacaaagaaagtctatttcccaaagagaggacagaagaatccacacgcacacaactcaaaagcgctaagaagcgaagatagcagaaagggcatgtaccttccgctcctggccggaggagaaagcatgggagagaaatgaaggcgttagtttgaatggtcaaacccaacccgaaggccctgctgctggcctgggctgcccgcccgtaccctctgcccagggcagtgcttgtaagacacagtgccccaggggtccccactcagcccattaggtctctacccttccatgcatcctcctccggcgcagagggctggcacgggcgcaaagctcccctcagactgtcctcagggtgggaggtgttggtatcctccttgaaacaggatccaggatctcccaagaggtatgtggtgataataatatcagctaccacttgctgagcacctacttggggttttacaaatacgatttctaatctctgcacctactacgtgacacagtaaatagtattacccccattttctacatgaggaaactatggatcagaaagtttctttgcccatgaacgtggaagctgggcttcaaatccaagcatgtcctcacaccgaagcctgtgcttttcccatttaccccagactgcacagctccaccaggaggtctgctgcctcctccactccaactgaacactgtgtggcagaatagggggcaggtcgctatctcattactaactgtgaggtgagattgagaacccgggctttcctccccttctctgcagtctatcttctaggggccaagccttcaac

SEQ ID NO: 644 - DNA, 4047 bp, Homo sapiens
gccctggctgaatcaccacacctctctcgaccatacccacctgtaagggaacggagagggccagggccttggctttctttcacttaatctcagttcaggtgaggacgcccagtctggctgctccctctagcagcctgttcattcatggcagcccagctctctgcagggccctcaggtgcccaggaaggaaagctcctcccgcagccttgctctaggagcccagaacaggggagctggggcctccgtgtgccaaagcttggacatggatgacctcatctccttccttccttccagcctgaggtgactttttagagtccagggatagctttcctcaggcctgagccaagaggaggtgtcatttaacacaaggcagccagggagcctgaagggagttgaggacatttatttcacattcacacaactgtacattttctataaataatgtggggctgaaatatttacagtcatttcttgcccatacccaggctgtctctccctcctgacaccccgtgcctggagagacagcctgcagacagatgtgcaaacccagcttggtctttcctgccccctccctgatgctcaggcagagcagccagcggtccctgggactccactagcctcgaccactccatcctctgatgccgaaggcatggcaggccacagggaattcgccgctccactgcagtcacagaggctgtggcaggcagcagccaacactgcgggccctgggcagtagctgccggcttgggaatgcagaaggaagcagggaggctgccactcactccggctgccccccaattcttcccttcctctctgtgcccttcctctgagagggtgagccccagggttccctcactcctcacagagtgaaactgctccaggcgcccagtcatgccgggtcacagagaagggagagccagactcttgcagtggacagttataacgccagggacaaggacaaggaaccacaacacaaatgtctcaaggacacaaaatagtgggttcacaccggccccacagactgtacacattcttgagccctgaggggaaggcagtttggtcttctgggagtggagagggagaaggtggacacgctcaagacacactcagagggacacataaccggtaaccaaccaagccacagcagggggcttgcagaggacacacgagcatcatccactcctcagtcacagcagcatcgtgcacttgggaacagcaaggggccaggggcgtgccctgggctggggcagctgcgtagcccctctccatcagctagagacaggccggggcggggttctgagatcttcctcactgctatgaactgcagccacgtacgagaagagacataatacggagtagcagatttcgtgggcctagaggagagaaaaccaggcggatcacgatactgagactcctccatctccatatgtgaaggatctgccaatgggcaactcctgccctaacactgggcatgggcctctgggctaaacgtgagctccaagcaaggaagctgtccccatgggagaggggatccgtgtgtgtgtgtctgtctctcagggctcaagacctgtttcagcctgagttgaacctttggcaacaaaacgaggtccccactcacccctgtgcgctcagagggccctcccctcctcctgtccgaaggtcccccagggagccctgcgcaccgtggcccatcagggttgagcggcacactcaccattggtgtcttgtacttgtggctcaccacttctttaatttcaggaactaaaaccggacgggcaagagacaaaacagaaagttcaacactaagagcaatcgtgccatgctcccccaggcggcagcgcccggcgtcagggtccccttcccctctgtggcctctcacagtggctgcagcagcttaggctatgacagggcagaggccaccagaggctctgtccagactctgccagctgggaggacatggccctagcctcctcagctaggcctctgtcatccgcagtggcgtttacttgatggccgtgattctacccacttctttgaaagccctggatgggagggacgggcctttcaccagcctggtcacagctactgtccagggcccctgaggagctgcagtggggaattcccaggttttggctgggaggagagagctctctctagcttgtgtccaactttgctgagacacccgtgaactcgtcaccagcctgaaaattgggtcatgttaaacacagttcccgttattcccagccccctacacagagggtcttgaggctggatgaagaggtaacatgatataaacccacaggatgtggcagtgtccttccctgagtggcaggagaagcccagacctgcctgtgtgagggagagcgtctgagggctctggagcaacacacccagcagaagacaggcgagtacagcacccagggagggaggtgacagggagcatcaggcaaaatacacacatgtccacagcccagaaggcaagagtgagagtccccccgctccagccatgcaggggttctgcttggccagaggaaggagtaggccccccaggctcagccaccatcatggccccttgagactgggagcagaggggcctggcatctccctgggggccagaaaaggcaggaggagaattggccgtaccttcttctgaccctgggaggtagaatttgggggaacccagggtcagcagggaataaactcatcaaaggtagagcaagaagccccaggccattctcccgagttggaagattcccccaagtatctctctgacagaagagagaagggaacacacggggaggaaagtccagtgagccggtgagaagggggaggcaaggtaggaagaaagagggtaggggagaaaggaagagacgagctggcagtgtgaggagctggttcgatgggagctacccacccagggcagggcccaaggcagagacctggggagaggcagcacgagccgaggtcactttacctgctggagaacgaaggttttcatagcagcgatgaggggcacaaaagaatgaagcacaaacacagcaggaactcaaagccccagggtgagaacccactacaccactccctagcgctggctcccagcttccggctacagctgtcccgctagactcctctgtccctcaagtgagtctgcctgcgacgcccggtgcccctttgtctggcacagaggccaggtggagaccagagcggcgccagggaggctggctagcgcactgggctgctagagagattgcagcaggtgacatggacatagtggagcttgggggtcgccagtctgctgtgtcccaaactttctgaccactggctggcccagcacggggaggtggtgctacttcactgagctgcttcaggaccacctctaaactcgaaacccacctgaggccccatttgctcttctgcgatccattatctatctttcccttccacatcccggctctcatctcaggggtcccttttcttccttgtcactcctgctcctcctgacttctctacagaggttcttcttctccctgcccctagaccctcctctggagctccgaggtttgagttactgccatgtgagtccagacctaagagcaaaatagtgtaattaccaaattcctccaggacaaagacgcctcgaactgtattgcactttttaatgtgattcagctctatgaaaacctgcaagagagggagggaggccggggtaaggcccacaggctccacccctgccccacacagcacactctcccagctacagccccacccacacaaagaaagtctatttcccaaagagaggacagaagaatccacacgcacacaactcaaaagcgctaagaagcgaagatagcagaaagggcatgtaccttccgctcctggccggaggagaaagcatgggagagaaatgaaggcgttagtttgaatggtcaaacccaacccgaaggccctgctgctggcctgggctgcccgcccgtaccctctgcccagggcagtgcttgtaagacacagtgccccaggggtccccactcagcccattaggtctctacc

SEQ ID NO: 645 - DNA, 4021 bp, Homo sapiens
atttcggtgtgcctgttttcataaaaatgcacaggggatggccaggtgcggtggctcatgcctgttatcccagcactttgggaggcggaggcgggccgatcacctgaggtcaggagatcaagaccagcctggccaacatggtgaaaccccgtctctactaaaaatacaaaaattagctgggcaaggtggcgcgcctataatcccagctatttggaaggctgaggcaggagaatcacctgaacccaggaggtagagtttgaggtgggccgagatcatgccactgcacttcagcctgggtgatggagtgagaccatgtctcaaaaaaaaaaaaagaaaaaagcccagggacattgatcttcacagcaaagtgagagcagatactgttttttgttttgttttcccgatgattaaaccaggcccagagtggtttctgagttcataaaacattaacgctagaaggaacctgtcttcccctacagcattcactcttcagatgatgaaactgagctgtgacagcggaaagtgcatttaactggtcccaggtgctcagcgtgatccttgtgccaggggccgtggtcacaaccgcctggaggtggggtgaggcagaatctcagtgttgtgattgtgctggggtggagctgcactaggtggctttggagtcccagccagcaataagccagcagcgggttcagacccatatccccggtgggagacagcaacccaatccagtccaggacgctgggcaccagaaaggtgtcagggccagggccccactctgctctcacttcccccatggggagcctaaatccgagcatctgtttccttttgggcgcgggaagccagcaggtctcaaattccctgagagtgcagccaggtttttccaggacagaattccatgaaggcagctcctaggggagcttctgggagttctatgcagtggaagacactcctggccaggagtccggggccctgtgggaggccctggctgaatcaccacacctctctcgaccatacccacctgtaagggaacggagagggccagggccttggctttctttcacttaatctcagttcaggtgaggacgcccagtctggctgctccctctagcagcctgttcattcatggcagcccagctctctgcagggccctcaggtgcccaggaaggaaagctcctcccgcagccttgctctaggagcccagaacaggggagctggggcctccgtgtgccaaagcttggacatggatgacctcatctccttccttccttccagcctgaggtgactttttagagtccagggatagctttcctcaggcctgagccaagaggaggtgtcatttaacacaaggcagccagggagcctgaagggagttgaggacatttatttcacattcacacaactgtacattttctataaataatgtggggctgaaatatttacagtcatttcttgcccatacccaggctgtctctccctcctgacaccccgtgcctggagagacagcctgcagacagatgtgcaaacccagcttggtctttcctgccccctccctgatgctcaggcagagcagccagcggtccctgggactccactagcctcgaccactccatcctctgatgccgaaggcatggcaggccacagggaattcgccgctccactgcagtcacagaggctgtggcaggcagcagccaacactgcgggccctgggcagtagctgccggcttgggaatgcagaaggaagcagggaggctgccactcactccggctgccccccaattcttcccttcctctctgtgcccttcctctgagagggtgagccccagggttccctcactcctcacagagtgaaactgctccaggcgcccagtcatgccgggtcacagagaagggagagccagactcttgcagtggacagttataacgccagggacaaggacaaggaaccacaacacaaatgtctcaaggacacaaaatagtgggttcacaccggccccacagactgtacacattcttgagccctgaggggaaggcagtttggtcttctgggagtggagagggagaaggtggacacgctcaagacacactcagagggacacataaccggtaaccaaccaagccacagcagggggcttgcagaggacacacgagcatcatccactcctcagtcacagcagcatcgtgcacttgggaacagcaaggggccaggggcgtgccctgggctggggcagctgcgtagcccctctccatcagctagagacaggccggggcggggttctgagatcttcctcactgctatgaactgcagccacgtacgagaagagacataatacggagtagcagatttcgtgggcctagaggagagaaaaccaggcggatcacgatactgagactcctccatctccatatgtgaaggatctgccaatgggcaactcctgccctaacactgggcatgggcctctgggctaaacgtgagctccaagcaaggaagctgtccccatgggagaggggatccgtgtgtgtgtgtctgtctctcagggctcaagacctgtttcagcctgagttgaacctttggcaacaaaacgaggtccccactcacccctgtgcgctcagagggccctcccctcctcctgtccgaaggtcccccagggagccctgcgcaccgtggcccatcagggttgagcggcacactcaccattggtgtcttgtacttgtggctcaccacttctttaatttcaggaactaaaaccggacgggcaagagacaaaacagaaagttcaacactaagagcaatcgtgccatgctcccccaggcggcagcgcccggcgtcagggtccccttcccctctgtggcctctcacagtggctgcagcagcttaggctatgacagggcagaggccaccagaggctctgtccagactctgccagctgggaggacatggccctagcctcctcagctaggcctctgtcatccgcagtggcgtttacttgatggccgtgattctacccacttctttgaaagccctggatgggagggacgggcctttcaccagcctggtcacagctactgtccagggcccctgaggagctgcagtggggaattcccaggttttggctgggaggagagagctctctctagcttgtgtccaactttgctgagacacccgtgaactcgtcaccagcctgaaaattgggtcatgttaaacacagttcccgttattcccagccccctacacagagggtcttgaggctggatgaagaggtaacatgatataaacccacaggatgtggcagtgtccttccctgagtggcaggagaagcccagacctgcctgtgtgagggagagcgtctgagggctctggagcaacacacccagcagaagacaggcgagtacagcacccagggagggaggtgacagggagcatcaggcaaaatacacacatgtccacagcccagaaggcaagagtgagagtccccccgctccagccatgcaggggttctgcttggccagaggaaggagtaggccccccaggctcagccaccatcatggccccttgagactgggagcagaggggcctggcatctccctgggggccagaaaaggcaggaggagaattggccgtaccttcttctgaccctgggaggtagaatttgggggaacccagggtcagcagggaataaactcatcaaaggtagagcaagaagccccaggccattctcccgagttggaagattcccccaagtatctctctgacagaagagagaagggaacacacggggaggaaagtccagtgagccggtgagaagggggaggcaaggtaggaagaaagagggtaggggagaaaggaagagacgagctggcagtgtgaggagctggttcgatgggagctacccacccagggcagggcccaaggcagagacctggggagaggcagcacgagccgaggtcactttacctgctggagaacgaaggttttcatagcagcgatgaggggcacaaaagaatgaagcacaaacacagcagg

SEQ ID NO: 646 - DNA, 4058 bp, Homo sapiens
atgccagccccgtgccaggagcctggagggaagttggggaaacccctccctactgttggatgtatgtgtgacaagtgtgtctcctgtgctgcgatgggggatcagcagggcagttgtcgggcagtcctgagtgggtgttgcacagactggtccacagggctcctgaaggaagcccctggatctttggggtaaaaggagggtggcctcaagaaacaatgtctggggacaggcctttctggcctgctatgtcttcccaatgtttattgggcaataaaagataagtgcagtcacagagaactcactcttctcaatttcggtgtgcctgttttcataaaaatgcacaggggatggccaggtgcggtggctcatgcctgttatcccagcactttgggaggcggaggcgggccgatcacctgaggtcaggagatcaagaccagcctggccaacatggtgaaaccccgtctctactaaaaatacaaaaattagctgggcaaggtggcgcgcctataatcccagctatttggaaggctgaggcaggagaatcacctgaacccaggaggtagagtttgaggtgggccgagatcatgccactgcacttcagcctgggtgatggagtgagaccatgtctcaaaaaaaaaaaaagaaaaaagcccagggacattgatcttcacagcaaagtgagagcagatactgttttttgttttgttttcccgatgattaaaccaggcccagagtggtttctgagttcataaaacattaacgctagaaggaacctgtcttcccctacagcattcactcttcagatgatgaaactgagctgtgacagcggaaagtgcatttaactggtcccaggtgctcagcgtgatccttgtgccaggggccgtggtcacaaccgcctggaggtggggtgaggcagaatctcagtgttgtgattgtgctggggtggagctgcactaggtggctttggagtcccagccagcaataagccagcagcgggttcagacccatatccccggtgggagacagcaacccaatccagtccaggacgctgggcaccagaaaggtgtcagggccagggccccactctgctctcacttcccccatggggagcctaaatccgagcatctgtttccttttgggcgcgggaagccagcaggtctcaaattccctgagagtgcagccaggtttttccaggacagaattccatgaaggcagctcctaggggagcttctgggagttctatgcagtggaagacactcctggccaggagtccggggccctgtgggaggccctggctgaatcaccacacctctctcgaccatacccacctgtaagggaacggagagggccagggccttggctttctttcacttaatctcagttcaggtgaggacgcccagtctggctgctccctctagcagcctgttcattcatggcagcccagctctctgcagggccctcaggtgcccaggaaggaaagctcctcccgcagccttgctctaggagcccagaacaggggagctggggcctccgtgtgccaaagcttggacatggatgacctcatctccttccttccttccagcctgaggtgactttttagagtccagggatagctttcctcaggcctgagccaagaggaggtgtcatttaacacaaggcagccagggagcctgaagggagttgaggacatttatttcacattcacacaactgtacattttctataaataatgtggggctgaaatatttacagtcatttcttgcccatacccaggctgtctctccctcctgacaccccgtgcctggagagacagcctgcagacagatgtgcaaacccagcttggtctttcctgccccctccctgatgctcaggcagagcagccagcggtccctgggactccactagcctcgaccactccatcctctgatgccgaaggcatggcaggccacagggaattcgccgctccactgcagtcacagaggctgtggcaggcagcagccaacactgcgggccctgggcagtagctgccggcttgggaatgcagaaggaagcagggaggctgccactcactccggctgccccccaattcttcccttcctctctgtgcccttcctctgagagggtgagccccagggttccctcactcctcacagagtgaaactgctccaggcgcccagtcatgccgggtcacagagaagggagagccagactcttgcagtggacagttataacgccagggacaaggacaaggaaccacaacacaaatgtctcaaggacacaaaatagtgggttcacaccggccccacagactgtacacattcttgagccctgaggggaaggcagtttggtcttctgggagtggagagggagaaggtggacacgctcaagacacactcagagggacacataaccggtaaccaaccaagccacagcagggggcttgcagaggacacacgagcatcatccactcctcagtcacagcagcatcgtgcacttgggaacagcaaggggccaggggcgtgccctgggctggggcagctgcgtagcccctctccatcagctagagacaggccggggcggggttctgagatcttcctcactgctatgaactgcagccacgtacgagaagagacataatacggagtagcagatttcgtgggcctagaggagagaaaaccaggcggatcacgatactgagactcctccatctccatatgtgaaggatctgccaatgggcaactcctgccctaacactgggcatgggcctctgggctaaacgtgagctccaagcaaggaagctgtccccatgggagaggggatccgtgtgtgtgtgtctgtctctcagggctcaagacctgtttcagcctgagttgaacctttggcaacaaaacgaggtccccactcacccctgtgcgctcagagggccctcccctcctcctgtccgaaggtcccccagggagccctgcgcaccgtggcccatcagggttgagcggcacactcaccattggtgtcttgtacttgtggctcaccacttctttaatttcaggaactaaaaccggacgggcaagagacaaaacagaaagttcaacactaagagcaatcgtgccatgctcccccaggcggcagcgcccggcgtcagggtccccttcccctctgtggcctctcacagtggctgcagcagcttaggctatgacagggcagaggccaccagaggctctgtccagactctgccagctgggaggacatggccctagcctcctcagctaggcctctgtcatccgcagtggcgtttacttgatggccgtgattctacccacttctttgaaagccctggatgggagggacgggcctttcaccagcctggtcacagctactgtccagggcccctgaggagctgcagtggggaattcccaggttttggctgggaggagagagctctctctagcttgtgtccaactttgctgagacacccgtgaactcgtcaccagcctgaaaattgggtcatgttaaacacagttcccgttattcccagccccctacacagagggtcttgaggctggatgaagaggtaacatgatataaacccacaggatgtggcagtgtccttccctgagtggcaggagaagcccagacctgcctgtgtgagggagagcgtctgagggctctggagcaacacacccagcagaagacaggcgagtacagcacccagggagggaggtgacagggagcatcaggcaaaatacacacatgtccacagcccagaaggcaagagtgagagtccccccgctccagccatgcaggggttctgcttggccagaggaaggagtaggccccccaggctcagccaccatcatggccccttgagactgggagcagaggggcctggcatctccctgggggccagaaaaggcaggaggagaattggccgtaccttcttctgaccctgggaggtagaatttgggggaacccagggtcagcagggaataaactcatcaaaggtagagcaagaagccccaggccattctcccgagttggaagattcccccaagtatctctct

SEQ ID NO: 647 - DNA, 4043 bp, Homo sapiens
acctggaccaaagaggggcagcccctggcaggcgaggaggtgagcatccgcaacagccccacagacaccatcctgttcatccgggccgctcgccgcgtgcattcaggcacttaccaggtgacggtgcgcattgagaacatggaggacaaggccacgctggtgctgcaggttgttggtgcgtggccaaggcctccttgagcccccttgtttcccttccctgggctgggctgctggggccaagggtggggccaggggacccaacccacagctcacattttccagtccactgccccagcaggcctggccctggttggcaggggtggggtggtccctggagccagtgaccccctgctcactgtcaggaggcgtggtgacccaactgggtctgtctcccgcagacaagccaagtcctccccaggatctccgggtgactgacgcctggggtcttaatgtggctctggagtggaagccaccccaggatgtcggcaacacggagctctgggggtacacagtgcagaaagccgacaagaagaccatggtgagcccagggtctggggtccccacgtgcaccctgcctaggcccggcagacccaggccgcagctacccttcactgtcctcaccgtggacccctcaccctccctctgctgatctgaatccctccatagtaggggtggagatgccaagggcacccaggagaggctctcggcatcaggaagggcctggcccagagatgcctcccctccctccctgcccccaggagtggttcaccgtcttggagcattaccgccgcacccactgcgtggtgccagagctcatcattggcaatggctactacttccgcgtcttcagccagaatatggttggctttagtgacagagcggccaccaccaaggagcccgtctttatccccagaccaggtgctgtaccctcattcttccaaccaggggctggggcagggaggctgtgggaacagggagaggggcctagctttgtgtggccctctcggtaccaagtcctgtcaccaacaggcatcacctatgagccacccaactataaggccctggacttctccgaggccccaagcttcacccagcccctggtgaaccgctcggtcatcgcgggctacactgctatgctctgctgtgctgtccggggtagccccaaggtagggaactttaggcgctggtccaggccgaccaggaggcagggctcacaggccccgacgttgagcagtcctctccccagcctgtctcccctgctttctctccaccttggggtgtatggaccgggttcctccccctgggcagggccatggtactcactcttggttccatgtttgtttccagccttgggcatagtcagggactctcgtgggaccccccgagtagaaacacagatgtgtctccctgggtccctgccaggtcccctctcagcctggatggcttccctccctctctttaccttatttatagcccaagatttcctggttcaagaatggcctggacctgggagaagacgcccgcttccgcatgttcagcaagcagggagtgttgactctggagattagaaagccctgcccctttgacgggggcatctatgtctgcagggccaccaacttacagggcgaggcacggtgtgagtgccgcctggaggtgcgaggtgaggagccctcggggccagggcctgggagatgggaagagcgggcggcagtggggaccctgggctttgctccgttgtcctcggccaagcacctgccctggctgcaagggcacggaccctgccacgcccagatgggcaatagcttccagaaggctgggaggacacagtgacatggcctcctcttctgcagtgcctcagtgaccaggctggctcctggggatggccaggtatgtaccacccgacacccagggcacaagtcagtggctgagccctggcccttggtcctggggcagccatcagtaaatgggaggctgtaggggccctccattcactcgtaagataacctgtgttgcaggtacaaccggatgccagccccgtgccaggagcctggagggaagttggggaaacccctccctactgttggatgtatgtgtgacaagtgtgtctcctgtgctgcgatgggggatcagcagggcagttgtcgggcagtcctgagtgggtgttgcacagactggtccacagggctcctgaaggaagcccctggatctttggggtaaaaggagggtggcctcaagaaacaatgtctggggacaggcctttctggcctgctatgtcttcccaatgtttattgggcaataaaagataagtgcagtcacagagaactcactcttctcaatttcggtgtgcctgttttcataaaaatgcacaggggatggccaggtgcggtggctcatgcctgttatcccagcactttgggaggcggaggcgggccgatcacctgaggtcaggagatcaagaccagcctggccaacatggtgaaaccccgtctctactaaaaatacaaaaattagctgggcaaggtggcgcgcctataatcccagctatttggaaggctgaggcaggagaatcacctgaacccaggaggtagagtttgaggtgggccgagatcatgccactgcacttcagcctgggtgatggagtgagaccatgtctcaaaaaaaaaaaaagaaaaaagcccagggacattgatcttcacagcaaagtgagagcagatactgttttttgttttgttttcccgatgattaaaccaggcccagagtggtttctgagttcataaaacattaacgctagaaggaacctgtcttcccctacagcattcactcttcagatgatgaaactgagctgtgacagcggaaagtgcatttaactggtcccaggtgctcagcgtgatccttgtgccaggggccgtggtcacaaccgcctggaggtggggtgaggcagaatctcagtgttgtgattgtgctggggtggagctgcactaggtggctttggagtcccagccagcaataagccagcagcgggttcagacccatatccccggtgggagacagcaacccaatccagtccaggacgctgggcaccagaaaggtgtcagggccagggccccactctgctctcacttcccccatggggagcctaaatccgagcatctgtttccttttgggcgcgggaagccagcaggtctcaaattccctgagagtgcagccaggtttttccaggacagaattccatgaaggcagctcctaggggagcttctgggagttctatgcagtggaagacactcctggccaggagtccggggccctgtgggaggccctggctgaatcaccacacctctctcgaccatacccacctgtaagggaacggagagggccagggccttggctttctttcacttaatctcagttcaggtgaggacgcccagtctggctgctccctctagcagcctgttcattcatggcagcccagctctctgcagggccctcaggtgcccaggaaggaaagctcctcccgcagccttgctctaggagcccagaacaggggagctggggcctccgtgtgccaaagcttggacatggatgacctcatctccttccttccttccagcctgaggtgactttttagagtccagggatagctttcctcaggcctgagccaagaggaggtgtcatttaacacaaggcagccagggagcctgaagggagttgaggacatttatttcacattcacacaactgtacattttctataaataatgtggggctgaaatatttacagtcatttcttgcccatacccaggctgtctctccctcctgacaccccgtgcctggagagacagcctgcagacagatgtgcaaacccagcttggtctttcctgccccctccctgatgctcaggcagagcagccagcggtccctgggactccactagcctcgaccactccatcctctgatgccgaaggcatggcaggccacagggaattcgccgctccactgcagtcacagaggctgtggcaggcagcagccaacactgcgggccctggg

SEQ ID NO: 648 - DNA, 4046 bp, Homo sapiens
aacggccacggcttcagctgcccaggcacctgcgccagaccattcagaagaaggtcggggagcctgtgaaccttctcatccctttccaggtgggactggcccccttccctgtcccccaggggagagaggctatagtgtgttgttcccatccagtggactgatgtctcagggctggcctgatctgaggtaccagaggctggggtggcggccggcccttggagtgatccaggttcagggttaagcttttcctcccctcagggcaagccccggcctcaggtgacctggaccaaagaggggcagcccctggcaggcgaggaggtgagcatccgcaacagccccacagacaccatcctgttcatccgggccgctcgccgcgtgcattcaggcacttaccaggtgacggtgcgcattgagaacatggaggacaaggccacgctggtgctgcaggttgttggtgcgtggccaaggcctccttgagcccccttgtttcccttccctgggctgggctgctggggccaagggtggggccaggggacccaacccacagctcacattttccagtccactgccccagcaggcctggccctggttggcaggggtggggtggtccctggagccagtgaccccctgctcactgtcaggaggcgtggtgacccaactgggtctgtctcccgcagacaagccaagtcctccccaggatctccgggtgactgacgcctggggtcttaatgtggctctggagtggaagccaccccaggatgtcggcaacacggagctctgggggtacacagtgcagaaagccgacaagaagaccatggtgagcccagggtctggggtccccacgtgcaccctgcctaggcccggcagacccaggccgcagctacccttcactgtcctcaccgtggacccctcaccctccctctgctgatctgaatccctccatagtaggggtggagatgccaagggcacccaggagaggctctcggcatcaggaagggcctggcccagagatgcctcccctccctccctgcccccaggagtggttcaccgtcttggagcattaccgccgcacccactgcgtggtgccagagctcatcattggcaatggctactacttccgcgtcttcagccagaatatggttggctttagtgacagagcggccaccaccaaggagcccgtctttatccccagaccaggtgctgtaccctcattcttccaaccaggggctggggcagggaggctgtgggaacagggagaggggcctagctttgtgtggccctctcggtaccaagtcctgtcaccaacaggcatcacctatgagccacccaactataaggccctggacttctccgaggccccaagcttcacccagcccctggtgaaccgctcggtcatcgcgggctacactgctatgctctgctgtgctgtccggggtagccccaaggtagggaactttaggcgctggtccaggccgaccaggaggcagggctcacaggccccgacgttgagcagtcctctccccagcctgtctcccctgctttctctccaccttggggtgtatggaccgggttcctccccctgggcagggccatggtactcactcttggttccatgtttgtttccagccttgggcatagtcagggactctcgtgggaccccccgagtagaaacacagatgtgtctccctgggtccctgccaggtcccctctcagcctggatggcttccctccctctctttaccttatttatagcccaagatttcctggttcaagaatggcctggacctgggagaagacgcccgcttccgcatgttcagcaagcagggagtgttgactctggagattagaaagccctgcccctttgacgggggcatctatgtctgcagggccaccaacttacagggcgaggcacggtgtgagtgccgcctggaggtgcgaggtgaggagccctcggggccagggcctgggagatgggaagagcgggcggcagtggggaccctgggctttgctccgttgtcctcggccaagcacctgccctggctgcaagggcacggaccctgccacgcccagatgggcaatagcttccagaaggctgggaggacacagtgacatggcctcctcttctgcagtgcctcagtgaccaggctggctcctggggatggccaggtatgtaccacccgacacccagggcacaagtcagtggctgagccctggcccttggtcctggggcagccatcagtaaatgggaggctgtaggggccctccattcactcgtaagataacctgtgttgcaggtacaaccggatgccagccccgtgccaggagcctggagggaagttggggaaacccctccctactgttggatgtatgtgtgacaagtgtgtctcctgtgctgcgatgggggatcagcagggcagttgtcgggcagtcctgagtgggtgttgcacagactggtccacagggctcctgaaggaagcccctggatctttggggtaaaaggagggtggcctcaagaaacaatgtctggggacaggcctttctggcctgctatgtcttcccaatgtttattgggcaataaaagataagtgcagtcacagagaactcactcttctcaatttcggtgtgcctgttttcataaaaatgcacaggggatggccaggtgcggtggctcatgcctgttatcccagcactttgggaggcggaggcgggccgatcacctgaggtcaggagatcaagaccagcctggccaacatggtgaaaccccgtctctactaaaaatacaaaaattagctgggcaaggtggcgcgcctataatcccagctatttggaaggctgaggcaggagaatcacctgaacccaggaggtagagtttgaggtgggccgagatcatgccactgcacttcagcctgggtgatggagtgagaccatgtctcaaaaaaaaaaaaagaaaaaagcccagggacattgatcttcacagcaaagtgagagcagatactgttttttgttttgttttcccgatgattaaaccaggcccagagtggtttctgagttcataaaacattaacgctagaaggaacctgtcttcccctacagcattcactcttcagatgatgaaactgagctgtgacagcggaaagtgcatttaactggtcccaggtgctcagcgtgatccttgtgccaggggccgtggtcacaaccgcctggaggtggggtgaggcagaatctcagtgttgtgattgtgctggggtggagctgcactaggtggctttggagtcccagccagcaataagccagcagcgggttcagacccatatccccggtgggagacagcaacccaatccagtccaggacgctgggcaccagaaaggtgtcagggccagggccccactctgctctcacttcccccatggggagcctaaatccgagcatctgtttccttttgggcgcgggaagccagcaggtctcaaattccctgagagtgcagccaggtttttccaggacagaattccatgaaggcagctcctaggggagcttctgggagttctatgcagtggaagacactcctggccaggagtccggggccctgtgggaggccctggctgaatcaccacacctctctcgaccatacccacctgtaagggaacggagagggccagggccttggctttctttcacttaatctcagttcaggtgaggacgcccagtctggctgctccctctagcagcctgttcattcatggcagcccagctctctgcagggccctcaggtgcccaggaaggaaagctcctcccgcagccttgctctaggagcccagaacaggggagctggggcctccgtgtgccaaagcttggacatggatgacctcatctccttccttccttccagcctgaggtgactttttagagtccagggatagctttcctcaggcctgagccaagaggaggtgtcatttaacacaaggcagccagggagcctgaagggagttgaggacatttatttcacattcacacaactgtacattttctataaataatgtggggctgaa

SEQ ID NO: 649 - DNA, 4041 bp, Homo sapiens
cagaagaatcgcttggacccgggaggtggcagttgcaatgagctgagatcacactattgcactccagtctgggtgacagagtgagacaacgtctcaaaaaaaaaaaaagtgcagaaagggctctcttggtgtatgtcagtcccttagttctggaacagggaaagtaaaagccacagtacccaagctctcttccaggagtgtctcagctccaacaggtaaatattgtctatgtagtcagattggtccctctgggatccacttcccattcctttgttccttgtcccaacaaagggtccatcttttgtaaggattggttctcaaagctggaacgaggcagcaaactcaggtggtaacaacacagggcatagggtgtcaaagcccaggcttacaccctggtctatgacttactagctgtgtgacttcagtcaagttgcttaccctctctgatccctgccttttgaagtggtgaggctcggggaagccagctgggcttgggcagcctggagttgctgtgttagcaggagctaaaggaggcgcagggcccagcaggcagcttttttcttagctgcagctctctgggccttgtctcaagggaggttggagctgtggagcccctcagagctgtggcgggccctcacttagctacccactctatacccacagaacggccacggcttcagctgcccaggcacctgcgccagaccattcagaagaaggtcggggagcctgtgaaccttctcatccctttccaggtgggactggcccccttccctgtcccccaggggagagaggctatagtgtgttgttcccatccagtggactgatgtctcagggctggcctgatctgaggtaccagaggctggggtggcggccggcccttggagtgatccaggttcagggttaagcttttcctcccctcagggcaagccccggcctcaggtgacctggaccaaagaggggcagcccctggcaggcgaggaggtgagcatccgcaacagccccacagacaccatcctgttcatccgggccgctcgccgcgtgcattcaggcacttaccaggtgacggtgcgcattgagaacatggaggacaaggccacgctggtgctgcaggttgttggtgcgtggccaaggcctccttgagcccccttgtttcccttccctgggctgggctgctggggccaagggtggggccaggggacccaacccacagctcacattttccagtccactgccccagcaggcctggccctggttggcaggggtggggtggtccctggagccagtgaccccctgctcactgtcaggaggcgtggtgacccaactgggtctgtctcccgcagacaagccaagtcctccccaggatctccgggtgactgacgcctggggtcttaatgtggctctggagtggaagccaccccaggatgtcggcaacacggagctctgggggtacacagtgcagaaagccgacaagaagaccatggtgagcccagggtctggggtccccacgtgcaccctgcctaggcccggcagacccaggccgcagctacccttcactgtcctcaccgtggacccctcaccctccctctgctgatctgaatccctccatagtaggggtggagatgccaagggcacccaggagaggctctcggcatcaggaagggcctggcccagagatgcctcccctccctccctgcccccaggagtggttcaccgtcttggagcattaccgccgcacccactgcgtggtgccagagctcatcattggcaatggctactacttccgcgtcttcagccagaatatggttggctttagtgacagagcggccaccaccaaggagcccgtctttatccccagaccaggtgctgtaccctcattcttccaaccaggggctggggcagggaggctgtgggaacagggagaggggcctagctttgtgtggccctctcggtaccaagtcctgtcaccaacaggcatcacctatgagccacccaactataaggccctggacttctccgaggccccaagcttcacccagcccctggtgaaccgctcggtcatcgcgggctacactgctatgctctgctgtgctgtccggggtagccccaaggtagggaactttaggcgctggtccaggccgaccaggaggcagggctcacaggccccgacgttgagcagtcctctccccagcctgtctcccctgctttctctccaccttggggtgtatggaccgggttcctccccctgggcagggccatggtactcactcttggttccatgtttgtttccagccttgggcatagtcagggactctcgtgggaccccccgagtagaaacacagatgtgtctccctgggtccctgccaggtcccctctcagcctggatggcttccctccctctctttaccttatttatagcccaagatttcctggttcaagaatggcctggacctgggagaagacgcccgcttccgcatgttcagcaagcagggagtgttgactctggagattagaaagccctgcccctttgacgggggcatctatgtctgcagggccaccaacttacagggcgaggcacggtgtgagtgccgcctggaggtgcgaggtgaggagccctcggggccagggcctgggagatgggaagagcgggcggcagtggggaccctgggctttgctccgttgtcctcggccaagcacctgccctggctgcaagggcacggaccctgccacgcccagatgggcaatagcttccagaaggctgggaggacacagtgacatggcctcctcttctgcagtgcctcagtgaccaggctggctcctggggatggccaggtatgtaccacccgacacccagggcacaagtcagtggctgagccctggcccttggtcctggggcagccatcagtaaatgggaggctgtaggggccctccattcactcgtaagataacctgtgttgcaggtacaaccggatgccagccccgtgccaggagcctggagggaagttggggaaacccctccctactgttggatgtatgtgtgacaagtgtgtctcctgtgctgcgatgggggatcagcagggcagttgtcgggcagtcctgagtgggtgttgcacagactggtccacagggctcctgaaggaagcccctggatctttggggtaaaaggagggtggcctcaagaaacaatgtctggggacaggcctttctggcctgctatgtcttcccaatgtttattgggcaataaaagataagtgcagtcacagagaactcactcttctcaatttcggtgtgcctgttttcataaaaatgcacaggggatggccaggtgcggtggctcatgcctgttatcccagcactttgggaggcggaggcgggccgatcacctgaggtcaggagatcaagaccagcctggccaacatggtgaaaccccgtctctactaaaaatacaaaaattagctgggcaaggtggcgcgcctataatcccagctatttggaaggctgaggcaggagaatcacctgaacccaggaggtagagtttgaggtgggccgagatcatgccactgcacttcagcctgggtgatggagtgagaccatgtctcaaaaaaaaaaaaagaaaaaagcccagggacattgatcttcacagcaaagtgagagcagatactgttttttgttttgttttcccgatgattaaaccaggcccagagtggtttctgagttcataaaacattaacgctagaaggaacctgtcttcccctacagcattcactcttcagatgatgaaactgagctgtgacagcggaaagtgcatttaactggtcccaggtgctcagcgtgatccttgtgccaggggccgtggtcacaaccgcctggaggtggggtgaggcagaatctcagtgttgtgattgtgctggggtggagctgcactaggtggctttggagtcccagccagcaataagccagcagcgggttcagacccatatccccggtgggagacagcaacccaatccagtccaggacgctgggcaccagaaaggtgtcagggcc

SEQ ID NO: 650 - DNA, 4046 bp, Homo sapiens
caaggaggtgggttgacacatagacacagataaagaaatgaagacaccatgcctgtaatcccagcactttgggaggctgaggcgggcgcatcacctgaggtcaggatttcaagaccagcccggccaacatggtaaaaccccgtctctactaaaaatacaaaaattagctgggcgtggtggcacatgcctgtaatcccagctactcgggaggccgaggcaggagaatcacttgaacctgggaggcagaggttgcagtgagccaagatggcgccattgcactccagcctggccaacagagcaagactctgtccaaaaaacaaacaaacagacaaacaaacaaaacaaaaagaaatagagacacagagaagtggaagcggggcggcacagaggggattggagggggggacctgggccccagccacagccacagtagcttggcctgggggagcagggtgcgggcggtggggtggccggggctgaggggtggtgctcagcctttcagaagaagctggagccggcctaccaggtgagcaaaggccacaagatccggctgaccgtggaactggctgaccatgacgctgaggtcaaatggctcaagaatggccaggagatccagatgagcggcaggtgcagcctggggtggggaggggggctcgggtggaggtggggacccccatagccttgcctcctgcccctctccacatgcgtatctctgactcggtgtggctctcagccccatctctctgggcctaatttcccatccttttgctcctgccggtccctctctctctctccttttgtctcgggctcacttcctcccgtcgggaacacttcaacggccccttctgttctacagcaagtaagttcccctctggatggcttggggtggggggcacagggattatcatggggcgcactgggcccggaggggtgtccgcagctttcctgccacttccctgcggcccccacccaggtacatctttgagtccatcggtgccaagcgtaccctgaccatcagccagtgctcattggcggacgacgcagcctaccagtgcgtggtgggtggcgagaagtgtagcacggagctctttgtgaaaggtgggcctgggacctgaggatgtgggaacctggggaggagatggcctcaggggagccaaccctcatgctcaccctgcctggacagagccccctgtgctcatcacgcgccccttggaggaccagctggtgatggtggggcagcgggtggagtttgagtgtgaagtatcggaggagggggcgcaagtcaaatggtgagttccagaagcacggggcatgggtgttgggggcatctgcccagaagaggccacagcacttgccacccacccacccggctaggctgaaggacggggtggagctgacccgggaggagaccttcaaataccggttcaagaaggacgggcagagacaccacctgatcatcaacgaggccatgctggaggacgcggggcactatgcactgtgcactagcgggggccaggcgctggctgagctcattgtgcagggtgagcctggctgggggggcacatgaggctttagggcttggacccctcagcccccaccccacctagccctgtaggggagcaggcaaacctgggctcaaggcctctgtgaccttgggcctttgacagcctaaacctcatccttctcatctctaaaatgacgatgctgaggtgaccgctccagagggtactgagagggtcatacgggcctggtgagcatcaccacccctcagacacttgaggttccttatgtgcactgcaccatcacaggcaaacatggcacacacaggcacacgtgttttcacatgcccacatgcacccagacacgtgcgcaccagcgcccatgggcccacacgccctccacagggattcacgccacacccacacaccctcccgagctcaatggctctgccctgccctgcagaaaagaagctggaggtgtaccagagcatcgcagacctgatggtgggcgcaaaggaccaggcggtgttcaaatgtgaggtctcagatgagaatgttcggggtgtgtggctgaagaatgggaaggagctggtgcccgacagccgcataaaggtgtcccacatcgggcggtgagtgtgcagggcaggtggatgggacaggtggagactgagatggagacagagagagacacagggagaaacagagagagagagataaagacaggtggacagagaggcagatgcacagagacaggacagagactgagacagagacccacagagagggagaaacagacagacccaaaaagacaaagagacagaaagacagaaatagttctatagagacagaaagatatgcacagggaggcacacacataggagagttcgtcagagacagagaagaacagagggacagagacaaagaggcagcagggagagacacggacggggtcgagcgctccccagcaccctcccccagcttgtgaccagggcagggcaggaggccaccaaggaggccggctctggccagaggccctcactgcctctcccgccctcttgctcatccctggagcaactgggctggccgtgctgggcccaagttcacagagattaatgagacccagcccctgcccagtctccaagggcccagccaaggagatgctttgatgtagaaatcacttttacgctgcctacctctgaaggcacattaaaaagctggaaaattagataatatagaaaaaaaaaggcatttttaaaaatcagaataccaacaagccaggacaaggtgagggcctcctgggaccctggctggggtatctggcaaggccaggggtgtgtggcccagtggggtcccctgagccactgctcccctgcagggtccacaaactgaccattgacgacgtcacacctgccgacgaggctgactacagctttgtgcccgagggcttcgcctgcaacctgtcagccaagctccacttcatgggtgagcctgctccagggtagggtgggtcggggcagtggggccaggagcccctgtcactgggccctgcctttgcccccgtgctacttgctcttccttctcttgcagaggtcaagattgacttcgtacccaggcagggtaagtcttggggcccctgagtcttggttctgctcactttcccgcaacccacccacgcaggcctcccctccactcacagagggaagagcaaggatcaaaagtgggggtcctggggcccagcttcagctttgccactcatgaccatgggtcaattataatctctgtgagcctcagtttcctcttctctaaaatgggaaccctgatagtgccacctcataggatagttataaagatgaggtgacatgatgtatcagacctgtcaagtgctgtcacatgtgtgactgttattattacatcttttcttcttcttcctttttttttatttttattttttttgagacggagtctccctctgtcgcccacgctggagagaagtggcgcgatctcggctcactgcaagctccgcctcccaggttcacaccactctcctgcctcagcctcctgagtagctgggactacaggcgcccgccaccatgcccagctaattattttttgtatttttagtagagacggggtttcaccatgttagccaggatggtttcgatctcctgatctcatgatctgcctgcctcggcctcccaaagtgctgggattacaggcgtgagccactgcgtccagactgctttgctttgtttaactgagggcagattcctgatttatttggccagggaacctttttaatgtgtgcatgtgtgcgtgcatgtgtgcgcgcgtgtgtgtgtgtgcatgtgtctgtgtgtgtatgtatatatgtgtgtctgtgtctgtgtgtgtgcgtgtatgtatgtgtatttgtgtctgtgtgcatgtgtgtgtctgtgtgtgcatgtgtgtatgtgtatgtgtgtctgtgtgtatgtgtatatgcgtgtgtgtgtgtgtattgtgtgtgtgtgtatgtgtgtggcaagacactgatgttcccccagt

SEQ ID NO: 651 - DNA, 4050 bp, Homo sapiens
taagtccccttgtttgttcactccaagcctctgcttttcccaaccttccccagtcctgggctaggcaagggggcctctagcaagagaggccaacatgttctgctgtgcggggctgtgcattgcacaaaagcctgtatttcaccacaaccatgtgccagcagatggcaatcatgggtttcgagatagtcccctttctctgtacaaaaactctgtatgggttaactaaagcctgagggtgcgaagatcgatgagcatttgtcactcccagcctcctttaaatatatatatatatatataatttgagacagggtctcgctctgtcgctcaggctggagtgcagtggctcaatctcggctcactgcaacctccacctcctgggttcaagcgattctcccacctcagcctcccgagtagctgaaactagaggtgtgcaccaccatacttggctaattttcgttatttttagtagagacggaatttcaccacgttggccaggctggtctggagctcctggtcttatgtgatccgcccgcctcagcctcccaaagtggggattacaggcctgagccaccgcgcccggccactcccagtctcctttaagggtgcggagccttgtctcccggcccctggtgtcccctgacgccccgtccctccatgcacacaggtctatctgttcgagctgcacatcaccgatgcccagcctgccttcactggcagctaccgctgtgaggtgtccaccaaggacaaatttgactgctccaacttcaatctcactgtccacggtgagggggccctggtgtctgtcctgggctcgggctccccatgggtcctggtctcctacctccttttcccaacactaaggaggatgcctcgtcccatccagacatgagtgctggccacgtgcccagtgctgcacacacagggtgtgagagaaaccccaaggcttgcagggtaggcgtgggggcttagggctgagtccgggtctcatctgggtgggactctgttttatcatcttggtgtcacggctcctggcccatggcctggcactgtctgaatgtttgggcgatgggtgaaggtgagttgagagatgggtgggaattggggacaataaaccgtcccacctgcctggtaccttgaccctgggaaaggctgggaaggtgagatcctggggcagatgcccagcctcatggggtcatgaatgggcaagtctgtgaatactcagaggccgcccccagggcagggcttctcaaacggccccctctgaagccccttcccccatctctccaccctttgaacccagaggccatgggcaccggagacctggacctcctatcagccttccgccgcacgtgagtggccatcctcagggcctgggggaggccagtgctggagtctgaggcccttcagggtctcgactgggggtcagggctggggatgatttgcggggcggagctgaagtcagtgggggctgcaggggagagcaagcttcccaggcaggtgaggatactgagtctaacccccacaggagcctggctggaggtggtcggcggatcaggtacccctgccccaggccctacctgcaccatccgcagacccccaggggtctgagacgggtgggagcccaatctggctagtgtccctttctccctccccactccactcccatcctgctcctaatccctttccagtccctcactgcagcctcactgggggtccctctccatagtgatagccatgaggacactgggattctggacttcagctcactgctgaaaaagaggtgagtcctgggtggcagttcctggggcagctggtgaggcctggctccaaatcccagcactgtggtttgccagctgtgtgaccctgagcacaacactgcacctctctgagttggtttccttgtctgtcgaggggatgatcccagtgtggaaggagttaaagggctctgcagacattatgtcccgtcaacagtcatcctcacagtgtcccccacggccactccacacttgaggctgcaaaagctccctccgtaaactccggggacccagaaggaacagagagagggtccccagagctgcagggtctaccaggtcggcccaactgacttatgttctctctgccctctctctccctctcccccggcccctccattatggctgctgctgctgtggcccagagagtaagaatcggggtctgggtgtttgggggcggcagggcgctggtgggtgcagaggggattcccgtcccctctctgagaggctgtggtgagagactcagagcagggtgcggctccccacggacaggggtgagtctctgtgccttgggcttctcctgccacccacctatctgtcagagcttaggagggataagaaaaagtaatgcacacaggaggtcctgccagagcctccggagcagcatgggtgccccacaacacagggagtgcaagtgcggaaaatagggaggaagtaaaggcccatgggtggggtccaggtctttgagggaaggtggccatacctctcatgtgccacctaccctttctcccacccccacccctggagcagcagtttccggaccccgaggtgagtgcccaacatagcacagcaccctcatcacccctaattctgccaggagcccctccagatccccagcccctcttcagctcccttggcccccagtcctgcctggcctgggacccagagcagctccagctgccccaccagaagggaaggggcagagggacaggggtggctacagctccttggtcctgggcccaggaagccccgcccagggggctgcagtcttgcccccggccacagcctagactgcgggacacagggactcgaagctggaggcaccagcagaggaggacgtgtgggagatcctacggcaggcacccccatctgagtacgagcgcatcgccttccagtacggcgtcactgacctgcgcggcatgctaaagaggctcaagggcatgaggcgcgatgagaagaagagcacaggttagcccttcctcagaggggagaggagagggcacaggctagcccttccctacacaggagaggagagggcataggttagcccttccccacaggggagaggagagggcacaggttagccccccacctcgtccacatacatggaaagagcggagtccggcttagcacagagactcacaggaaagaagagcccaggttaacccctccttgtgtagaaaaagccaagaatgcccaggttagccccttaccacagagatagaagagaagagcaaaagttaggccaggacagccacaaggaaaaggacagagctcaggttaaccctcctcaccaaggaaaaatcaggctacactttctttctctaccctcttctgaaaagaaatgaagcccggttaaccctctccacacccaaaagaaaagggaagaggcccgctaagcctggagagccacacacaggcaaagaaaagagcctggctaatctttctctcaggcaaacaaagcaggagggcttgggttaactaccctcacccccaggcagatggaaagaggagagcccaggaatagcccttctccactgaggggttgacaagggcgggtgtgagccgggaaagcaggggtctcacatgccttctccccaccatgtctgggtctagcacagggcctggcacacacctcgagcgctctataaacaccgactgaatggaggggtcagcttccatgcaggatatgggagacaagcccctcccaaagcacacacacaaaacacacacgatcatggggacggggagaggagctggttagtccctccctgctgacctcccccaggccccttatccctctgccctgcctccctgttgtctcagcctcactgggtttcccatcaccccatcgctaggtggcctggcccttaccggcaccgtggccccatttaagccagggatcccctgaatgccaccaatgttcctctgggttaactcctgaactgctgagcccagagggcaccaagcaaaggactgtaggtgcccaaggaggaaaagatggaggctggcaaggcag

SEQ ID NO: 652 - DNA, 4049 bp, Homo sapiens
cagcttttccatttgccattgggaccttgagaaagttttcttcttcttttagacagagtcttgctctgtcaccgaagctggagtgcaagtggtataatctcagctcactgcagcctccgcctcctgggtttaagtgattctcttgtctcagcctcccaagtagctgggattatgggtgtgtgccaccacgccctgctaatttttgtattttcagtagagatggggttttaccctgctgtccaggctggtctcaaactcctgacctcaagtgatctgcccgcctcaacctcccaaagtgttggaattacaggcgtgagccatggtacctggccaagaaagttttcttaagtccctctgtccctcagtttcctcatccaaaaatggaagtaattataatatttgctcgtttgaattaatgcaacacttgacatatagtcaataaatgctggttgtgatgatgacgttaccatgtaggttgttatttgtggtcctccccaaatgagagacatccatggtggaactattatgaagcctcgaaaaccaccaggcttgaacaatctagaaataaaaggcatttgtgtgactggattctcgagttctttttccagcaccgtgctttggactttcatttctaatttatgtaaaaattctggcaatctacgatgatacactaagtgaattgagaaggaatctagggaggatctgagttaggcttcacggtaacttgagaataaagatttaaggaaatggagccataatgatttttaagaatttgatgtttgccttaaaatgtagcttttcagaccaggtgtgatggctcacacctgtaaccccagcactcttagaggccagggtgggacaattgagcccaggagttcgagaccagcctggacaaccaaaggagacagacaccttctctacaaaaaattagctgggtgtggtggagtagctgtagtcctagctactcaagaggctaggcagcaggattgcttgagccccaagagttcaaggctgcagttagctatgatctcaccacagcactccagcctgggtcacagagcaagtccttgactcttgaaaaaaaattctttccaggcaatgttagttttaaaaagttgctagagtattgttaagtatagatcacttaatctatgtcactctttggaaagaatgcagtgcataaaaagaatactcaaattttgatctcagattattttctccaatgtaaaaaagtactttccatccaaaaatccatccacacaacctcagactttccaaaaaagcaagaatttttttaaaaatctcacatgaaacttcagcatacctaatacagaactttacacactcagtgaaagtttttgaccttttcagaagcatgtcaatgtaattcttctggtcaaatcttaggttatcatttgagagagacatttcttttaaacccatttctccccaaaaaactaaatagcaaagaattcaaactgagttaacttagaaatatttaaaatctgttttgattacatgtggttatgaattgttctttcctaacgcacttagtatatctcttgtgtcaagtatttacccattgcaaaaagggctctgatgaatttttaggccttcacacttcacagcttctacctccaaattgggaaatttctccttcgtagaagagcacaataaattggcacttgctcacactttataaactaattgactataatgtagaaaaatatatattttaatagaaggaaacaaaatatccaacaccttagagaaagtaagcaataagaaaatcatggttctcttgtgaacatttttctaatgcaaagtgctggcccctaaggaaggacctaccacactcctcctctttgctggctggaatactggcttagtcagggttcccagccatctccccagtgggcaggatctcttctgggaaaaatactgtgacagtgtttgtagtcctgccttctgctgggttctttcttggtgtacctccaagaatagaatcatagaaatgtagagctagaaattattttggagattttgcatatttgaaaaaatgaagtccagaaaagggaagtaatttacccaaggcctaacacctaatagacaataggactggagccctatctaatggtctccattgcttccaaacccaactgctgctttggaagaactcagaatccataatttcacagacatttttagcttcgtattattgttattaatagatgtagaactatatgtgcagaagataaacattcagtgattcaatcattaaaataacatttgcataacatgttgtgaatgtattgtatataatagacaaccaaatttactaaaatttataatgtctatattttttaaaagtttaaacactgtgaaaataatgtcatcatcttgaataaaaatgtatccgtgttatcattaacgaattcaaccaacatttttgcagtttcaccattagcagacatagtcataagtgtgaaaatatagaaaagacagaaaacaggtcttgttctcacctcgccagcaaattgggaaggctgacataaaacaggcaagtatgatactgtgtgtttccagctgtgatatcacgtggcgtgagtcccatggcagcacaaatgaggggcacttaactgtggtagaagaaaaagaaggctccctcaagtaggtaacaccaaacttgaagcttaaaataaaggagatttaggaacaaagggcattaaaaggagagagaacagcctgtgccaagcaagtaggttgacagcacgtggcagatttggagagcaagtacatccatatggctgcatcccagaattaaatgagggtgaagacaggcagggaccagatcacaaagagctttgtgcatcatgctaaaacatttcagttttaccagaaaatagtgagaaggtgttgaataattgtatgctgtaaattaaacaatgtgactgaaattatactataaaactctatgttgtgttggtttggtttttccctgctccttaatatcagataccttggtagaacacctaagagtagaatgtggtaagaccaccagaatctagttgtggttgtagagctgacgaaaatctcaatgtctgcatctataaaatggaaattgttatagggttgtaaaaagtacacaagttaagtcctgttaagcatttgcgtctgctgtattgcaaacactcaataaatagaaactggcatcatcttcgtcatcgttgtaaaaagctgaattgcagaaaatggattagaatgccgagagttcattttaacatctggacttaagaacagttgtctgattctgcttaatctatattgcttacgataatagagctcctttaagagaactactttgtcagaggcatggctaggaaaagacatcagttagcaaaatacactgattatgtatttgaaaggaaattttccactgattttgttgtccaagagaatgtacgaaaagaaaacttgggtttcagcagttaggagcagtatcctgagaagagctatgtgcttgaatttattagttacaggtagaagacagaaatgccaaggttcatagatagcaattggggataaaaataaacttttttatgcctccctctgttgacggacaggtcaccaaaagagagagtatattatgcttttaatttgctattacatggtaactaatagtttataaaatacccttacaccataatgactgaagtttattttttgctgtgtttttgtatttggaatactttctgtccttgtgccaaattggaaatttggaatatagtttagtaatttcaatttggttgtatttaaaaattagggaggcctaaattagatttactgtctttataatgccatctttctataaaaaaagactgtatctcaatgttccataaaataataggtttactttctgtattctattttgttagtgctcctatatccctccctgtaagagagaaaatcagaagaatttggaaagtgtcatgaattggcaacagtactggaaagatgagattggttcccagccatttacttgctatttt

SEQ ID NO: 653 - DNA, 4075 bp, Homo sapiens
aaaaattctggcaatctacgatgatacactaagtgaattgagaaggaatctagggaggatctgagttaggcttcacggtaacttgagaataaagatttaaggaaatggagccataatgatttttaagaatttgatgtttgccttaaaatgtagcttttcagaccaggtgtgatggctcacacctgtaaccccagcactcttagaggccagggtgggacaattgagcccaggagttcgagaccagcctggacaaccaaaggagacagacaccttctctacaaaaaattagctgggtgtggtggagtagctgtagtcctagctactcaagaggctaggcagcaggattgcttgagccccaagagttcaaggctgcagttagctatgatctcaccacagcactccagcctgggtcacagagcaagtccttgactcttgaaaaaaaattctttccaggcaatgttagttttaaaaagttgctagagtattgttaagtatagatcacttaatctatgtcactctttggaaagaatgcagtgcataaaaagaatactcaaattttgatctcagattattttctccaatgtaaaaaagtactttccatccaaaaatccatccacacaacctcagactttccaaaaaagcaagaatttttttaaaaatctcacatgaaacttcagcatacctaatacagaactttacacactcagtgaaagtttttgaccttttcagaagcatgtcaatgtaattcttctggtcaaatcttaggttatcatttgagagagacatttcttttaaacccatttctccccaaaaaactaaatagcaaagaattcaaactgagttaacttagaaatatttaaaatctgttttgattacatgtggttatgaattgttctttcctaacgcacttagtatatctcttgtgtcaagtatttacccattgcaaaaagggctctgatgaatttttaggccttcacacttcacagcttctacctccaaattgggaaatttctccttcgtagaagagcacaataaattggcacttgctcacactttataaactaattgactataatgtagaaaaatatatattttaatagaaggaaacaaaatatccaacaccttagagaaagtaagcaataagaaaatcatggttctcttgtgaacatttttctaatgcaaagtgctggcccctaaggaaggacctaccacactcctcctctttgctggctggaatactggcttagtcagggttcccagccatctccccagtgggcaggatctcttctgggaaaaatactgtgacagtgtttgtagtcctgccttctgctgggttctttcttggtgtacctccaagaatagaatcatagaaatgtagagctagaaattattttggagattttgcatatttgaaaaaatgaagtccagaaaagggaagtaatttacccaaggcctaacacctaatagacaataggactggagccctatctaatggtctccattgcttccaaacccaactgctgctttggaagaactcagaatccataatttcacagacatttttagcttcgtattattgttattaatagatgtagaactatatgtgcagaagataaacattcagtgattcaatcattaaaataacatttgcataacatgttgtgaatgtattgtatataatagacaaccaaatttactaaaatttataatgtctatattttttaaaagtttaaacactgtgaaaataatgtcatcatcttgaataaaaatgtatccgtgttatcattaacgaattcaaccaacatttttgcagtttcaccattagcagacatagtcataagtgtgaaaatatagaaaagacagaaaacaggtcttgttctcacctcgccagcaaattgggaaggctgacataaaacaggcaagtatgatactgtgtgtttccagctgtgatatcacgtggcgtgagtcccatggcagcacaaatgaggggcacttaactgtggtagaagaaaaagaaggctccctcaagtaggtaacaccaaacttgaagcttaaaataaaggagatttaggaacaaagggcattaaaaggagagagaacagcctgtgccaagcaagtaggttgacagcacgtggcagatttggagagcaagtacatccatatggctgcatcccagaattaaatgagggtgaagacaggcagggaccagatcacaaagagctttgtgcatcatgctaaaacatttcagttttaccagaaaatagtgagaaggtgttgaataattgtatgctgtaaattaaacaatgtgactgaaattatactataaaactctatgttgtgttggtttggtttttccctgctccttaatatcagataccttggtagaacacctaagagtagaatgtggtaagaccaccagaatctagttgtggttgtagagctgacgaaaatctcaatgtctgcatctataaaatggaaattgttatagggttgtaaaaagtacacaagttaagtcctgttaagcatttgcgtctgctgtattgcaaacactcaataaatagaaactggcatcatcttcgtcatcgttgtaaaaagctgaattgcagaaaatggattagaatgccgagagttcattttaacatctggacttaagaacagttgtctgattctgcttaatctatattgcttacgataatagagctcctttaagagaactactttgtcagaggcatggctaggaaaagacatcagttagcaaaatacactgattatgtatttgaaaggaaattttccactgattttgttgtccaagagaatgtacgaaaagaaaacttgggtttcagcagttaggagcagtatcctgagaagagctatgtgcttgaatttattagttacaggtagaagacagaaatgccaaggttcatagatagcaattggggataaaaataaacttttttatgcctccctctgttgacggacaggtcaccaaaagagagagtatattatgcttttaatttgctattacatggtaactaatagtttataaaatacccttacaccataatgactgaagtttattttttgctgtgtttttgtatttggaatactttctgtccttgtgccaaattggaaatttggaatatagtttagtaatttcaatttggttgtatttaaaaattagggaggcctaaattagatttactgtctttataatgccatctttctataaaaaaagactgtatctcaatgttccataaaataataggtttactttctgtattctattttgttagtgctcctatatccctccctgtaagagagaaaatcagaagaatttggaaagtgtcatgaattggcaacagtactggaaagatgagattggttcccagccatttacttgctattttaatcaacatcaaaggtaagtcaatatttgcatgtgcgtgttaaaattgtttgtagactctgcagcttattacactgttatatcgtagattatgcccacttgacagcatggagatagcctcaactcttctttgcgtgtaattagggaaacccatataatgaatctgcaggacagagaaaaagacttgtgttgtacaccttaccctgtgaatatactacaaaatgatagtgactttaggtaggaacattactttgcatttcctaagaattgcagattgatgcacataagctaagcaatgtgcagatttgccagcacttttagactgcatcgaatcttacctttccttttcctttctattctgatgaagcgtcaataacgtgagttcacaccattaaaaccttacttgacttagtactcagtttataccatataaaccatgtaaagatggttccttggactagggcactttggtacccactcagattaatcagtaatttattcatcaaacatttattgagtattcacaattccttgctgtacatctccacttggatgttccagggttaccgcaaaccttcacttgctcccataatctctgtcttagaaaatggcatgaccattcactcatttaccaaatccagaaacctttgagtaatgcttagttcattt

SEQ ID NO: 654 - DNA, 4025 bp, Homo sapiens
tcccagccagatgcagcagtgtccaaagagagaaagagcctgtctttcttgatgcatttttcttgggatttggaaaacttttcccatcttcccacaggcaacctcccttcatgtatccttgttcacagtgagttcctttgcccacacctaaaccaatcacaagaaagaacaatcagaatcaacccctgacttggggctagtgttacatctcttaagtcacttggagacggggtatacccctgagtagatttgggaaggaagaagaaagggaacaaggtgttgtggaacaaccaaaaatgccaatgaaaaggttgtctcccatattccatagtcatcgtcttttattttattttattttattttattttattttattttttcaggaaatgtttctgagtcataatattccataggcttctatttacaactctctcccaggagcttgcaagggttgcttcacataactaggccagaggagctttttattttattttctttttgttttgtttgagtaggagtctcgctctgtcactcaggctggagtgcagtggcacgatcttggctcactgcaacctctgcctctcaggttcaagtgattctcctgcctcagcctcccaagtagctgggattacaggtgcatgccaccatgcccagctaatttttgtattatttagtagaaacggggtttcaccatgttagccaggctggtcttgaactcctgacctcaggcgatcctcccatcttgaagtactgggattacaggcgggagcctctgtgcccagctagaggaactttaaaaaaagaaaatttaccacagaccaattaattagaatctttggtggttgaaaccgggcattagcattttgtaaaatcgatgctagggattctaatctataaccagaaactacagtcactgttctgccctttcacttttcacccattactggaattgtttgtatgcccattttcctcaccaggctgcacacttgttaagggtatgggccagtcttctttgtttatgtatctctaatatctagcacaatgtctgggtttcaggtaataaatatttggtgagtgaatgaataagtgaatgcaatgtgtcaaattaaaaggagggttctttgcttccaaggaattaggacttattgctgaaagcatatgcatatgcacatataaatatgattacatcagctagaaatagaagggggaagactgaacattgaggtggcaacaataaagaaattaaggcttgacaatgtaagataccttaggtaaataagttatgtaatatggagtaatgagtttgtaagctagaaaggtagcttggggttagatttctaatgggtcattagtgtcaaactaaagagattctttgtcatataggcaataaaaatttgtcaaaagttttttttttttaattgaagactgacatgagtagaccttttgagttagaaagtaactggtgtgaatgttgaatgtatactggctgggaaagatgggttaaaggcagaaagaaaggagagtactgagtgaaaaacatttttgaatggttactgtgtgcctgccattgtgaatgacattttgtttagattactaaatctctaaatactagccccatttaacatatgaataaattgcatatttaaaaagttaaataacttctccagtgcacacaactgttaagtgcaaaaactggaatccagttagtctgattcccaaagttcccatcgactatctgctggtcctcgtaagagactttgagggcataaacgagaatagtggtggtgaaagtagcaacaaggattatagcagtaagattttttagttagaatcaacagaacttaatgacaatgtaagtgataaggaaaaaggtgtcaaacttgactgagtgttagaaaaggacagtctagctctgagtatgctgaatttgagagattcttaaaatatccagaagatgctttgaaagagttagaaacacagacttttaagttgaggagcaagaggtcagaagcagtgctattcagatgtgggaatcatggcgcacaagctgtagttgaagcgaagacaaagagtgcatattgtgaacatttagagtgaggagggaaatgttgacagaatcttaggatcatctacatttaagttataggcagaaggagatgaaggaagagtggccagagggtgaaaggaaaatcaaataagaacgtcttaaaaggagagtattttaaggagaagaagttagtcaagaagaagataatttaggtacagcctttgataagtacagactactcattcaagaagtttgccatggactacatcatactaaatagcaaagaaaacactcaacagagtgaaaaggcaacctacagaataggagaagatatttgcaaactatatatctgctaaagagttaatcccctgaatacataaggaactcctacaactcaatagtaaaagaaactaataatctgatttaaaaaaaggctaagggcttaaatagatatttctcaaaaatagacatctaaatggctgacaggtatatgaaacattgctgaacctcactaatcatcagagaaatgcaaatcaaagccacaatgtaatgtcacctcacgcctctcagaatgactattaacaaaaaaacaaaagacaggtattggtgaggatacggacaaattggaacccttgcataccgttggtgggaatgcaaaaggatgcagctgctatggaagacagtatggatgttcctcaaaaaattaaaagtagaactactgtatgatccagcaatcccactcctgggtatttctccaaaagacttgaaatcaggatcttgactcttcaagatcctgaagagcactcctccttttaccacagcagtattcacaatagccaagatgtggaaacaacctaaatgtccatcagcagatgaatggataaagaatatgtgaagccaggcgcaatggtgatacctggggtctcagctaggggaggctgaggcgggaggattgcttggggccaggagtccagcctgggccacatagcgagatccgatctcgaaaagaaatagaaagaaaatatggtatgtacatacaatggaagtgttcagcctttgaaaagaaggaaactctgcaacatgtgacgacatggatgaacctggaggacattataccaagtgaaagaagccagacacaaaaaggcaaatactgtatgattccacttatatgaagtatctaaaatagtcaaattcatagattaaaaaagtggaatggtggtagttatcaggggctgggaggagggggtaacggaagttactaatcaatggccataaagtttcagtcaagtaagatcaataggctctacagacttgtacagtacaagtcaacacttgtgtacaacaatactgtactatcaccaacagtaatgtattgtacacttaaaaattgaagagggtatatctcatcttaagtattcttaccacaataaaataaaattaaagtttcctatgactggaaaaaggcttggggaggaggtgagtaactgaggagtggatatagagaaataagcctcctgcagatgaaaactgttggagggagagagaaaaatggaatgtatatcgtaaagtaaaaatggaacgtgccctgaagaaaacgagacagaatgaaataaaatgctgaaggagtacgcagatttctttttctgtgaggtgggactctttgagcctgaacccactgctgtgtgaatcaggtgcttccttgaagcttcctgccctggactgggaactggtttcagaacgttcctgagcttgagcttgcagttggaggtgaacaaggcaccccttccatgtgctgtcctgactagctggtgaccatgttgatgaacgtcctctcactccccacttgggaactgcgtgttgtaagggctgcctccccctgacagggttgtctcctcctgtcagggcatgaattttgaatattctcaatacccagtcaagaaggactattcctccagaagtgtgaggtctacctaaaaag

SEQ ID NO: 655 - DNA, 4027 bp, Homo sapiens
ggtccccatcctccaagagtcacctcactagtataaacttgggcatggttgaaaggggcttactatgaaaaaacgaagattctcctctcaccccgactactcaggaaattacaagggttttacaagttctgtgccaggaaccggggcagagaccaaatacaaatttcttattatgtcacctatagcagttgtgttaacttcagtacagtaaatttaagctcattatacctccttcagaacggatacacattccctatccatcatctcactgtcccattcccaaacggtgggggtgtagatagaagcgggggtggtctatcacagcccagcagcactcaagacaggatttttcagcgactctgggaaggcaggcgttcggagtttggctcttttaccatgacatatgtgagaggaaacaggagtgctgtttggaggtgtgaaaaatggcagctccctggtgccatctactcttagtacactttttactactgctaaatatgaaattaaaatagacttactgtagggactcccagatgctcttgaaaagatgaactttatatttaaagaaacctttcgatttcgctcaaatgcaggaaattagggagaatagtccagttttgactttcaagaaaagggtgttattttaaaaatctaagacaaagattagaggagtcttagctttccactggttaagtcctgttgaggcaagctgtattccagtgttgagtctgcagcggccgaagcagccccgaagcagctgtgcctgccgtgggcagtcagtctcggtgcggccatccctctctacacccaggaaggattctgcagaggcgtcactggggtgaattcatgccaagggttgagtccatttgtggccctcccatataacctttccactctttgcctcccttaacctcgaggctcagtctccttccaaaatgtgtagattttgtttttacacttttttattcaggtaagttcacaattctccctatatcatgttttcattttttttctcagtctttccctggcttattccttctcagcaaaacctaacttatacccccttaacgagtatactttgaaacccccttttcattgccagaaaacttctctgtattctcaatcttttcatacaatttcctttcttcatctttgccttaactggcttctccttgaagagggcttgtccctttgaaaataactattcattcttcaattccctttggatctaaaggccaaaaggagtgatcagtctttttatcttttcctcttgttggagagcatagagtttttctatacaggtttactttttagtactttgttttatacctctggatagtaggtcacagagtacacggagcaggcttacacaaacacacacgtcaaatgaacaaatccagccacaccacctgtgcagtctcttgaattcacttcctccaccactgcctggattcaggctctcacctggcttgttgaaggcatcctcaactagtctgtcagccttggtctttctcttgtctgtcatccacaccacgctaggttttgttttgctttgtttaagcctccttttgatcttgtcacagtccttgattaaatttttctgccttcttcttatctataggataaaggccatgctcttccaattccaacttaaacttctgccattgaattatgtgccagtcaaggaaaaccaaagacaaaacaacaagaaaacaacaacaaaatagcagacacggtccttgccttcatggagcctatagtctgtagtcacaacagtagtataattacaaagtagggtagtgctatgaaggggaagctgaggatgctgctatgagatattacggcatgatggggaatttcaaagacctttctgtgtaaattaaaattaggtcaagaccagaggatgttcaagaattagctaggtaaaaagctagggggagaatatttcagaatgagatactaccatgtgccaatgttctgcagcaaaaaagagcttggtggttttaggtactggaaggccagtgtgtcaggagaactgtgaatgagtgggagagtggagcaagaactatacagggcttagatttctcttaaaatgtagtgagcagccagtcgttggttttaagcagagtggtaatatggtctgctttacatattttaacttttattccagctgcatcagtcacctcgagtcattctgtttcccatacaccttgatgcctttgctcctgtctctttctcctcacctggggacaccttcaccttttttacttctgggaattagcacagcacagtagtcctagaatgaactctagaaccaaacgctttctagtggcgtggtcttagatatgttacttaaatctatctgtgcctcagtttcctttgcagaagtgggatataatatcaaggagatggcatgtgcctaacccacaataattcctacaaaagtgtttgctattattgtttttattactattattaagattcacctcaaatgttactgtgtaaccttctcccaccttttcaggtataattcattacttcctcttctgcagtcccacactgccatggttgcttttatcacactgttaagagagttgaatatgtacttttttgttgttatagattatgaattccttaagggcagcagtcatgtgacatcaagcatcgggatttacatttctcctctatcactgattaattgtacgaccttggataaattgtgcagcttctccatcttggtttcctcgcctgtaaaatgaggatagcattacccatcttaagagcttctgttttggttttgtaagaaacacatttgcaccatagctaatacttagtaaacacatatgcttttcttccctgcctctgtagatttctaacaactaagttagaaacaaagttgggcctggttatttactgattggaggctgaggtgttgaataaataaataatgagggttttatgaatgagtaaaacaacaacacaaaaaaaaggaagaaagaagaaattctgttgttaaatatgttgtactcctgatgctaacagatatatcctaatttctaagttcactcaaagtgtgtttatcctgtagcatatgtttttaaatccagtttacccttagcattttaaagaaagataaacataatggcctgagctcaaattgagtagtggtttcttcagaacacagttttaaagccattaaaatagaagatgaaaagcaactgattagaaaaagactgctcacttacttagggtttagttttcttaactataaaatttgatagactgatggatgaaatgatctctaaaattccttcaaactctcaaattctatggttttatgattccctggttctgaagacttgtacaaaattacaacaacttaagatgctagataaaatcctaatggtgaaagggagaggcaattagtaaagaaataaatggttaacagtctagagccatttaatggagagggagacagccctgctacctcaacggtaattgagtttcataatgatgacactgagtcatcaaaaaaggttaaatttggttcaacctactctccttaaaaggcaaagaaatgtgtaatgcatttttaggaagatttttaccaataatattttaatattttattagtttttattcaacttaaaatttaagctttaattatttggaaaattcacttttgtaaatgtctatttcctctccgtgaagcaagcccatttcaggggctacagagatcttcctgccgccacagaatagcttatcactctggtatcatggttgttactctttttgtaatttagtgtcctaaattttacacataaaaatgctaccatctcaagctgggaacagtggcatatacctgtagtccccactacttgggaggctgagatgggaggatcatttgagtccaggagtttaaggctagcctgggcagcatagggagaccctgtctaaaaaaagaaaaaagaaagtggtagatgaactgaagaggttgaaatagataatactgtgcgtgtatgtcatg

SEQ ID NO: 656 - DNA, 4041 bp, Homo sapiens
ggctggctgcagcttggggtgggcacctgggtggtggctggtggtccccctgcaggccactgctgccccctcttgggtcctgttctgagtctcaggcctgagtccctggggaaggccccacacctttgccctgtacctgggtatggggatggccctgaggggctgccttgcttgggagaaggggggaaaacagatatttttatataaataagaaaaagacagcccctctgggcagatgaggcctgctgtagggcagggggcttggtaaactgtgtgtccactggtctgtaacccttcagctgggtccttttgtgcagtgaacagcctggacaactgtccaggtggcccttcagggatatgttcctggacctttcttagcttctcaccgatctttcttccacgccaagtccatgttcctcagtcaaacaagtggcaaagaggaggaggaggaggggaaggaggaggaacctgcttcaccctctggcacctgcgggttttgttccacgtgtcttccttgggaaagacaaggggttcttttacagcctaggggtggtttcccctttctacttctgagtgagaccttctcaagtcacggctctttgggcccacatggctaaggtctagccacctgtgggtgtcctgtgctgcctcagtgggtggtgtgggggcggggctgacctcccccgcgcctggctcagtgcagcagaccctggcccctgtgcccgctctctgccctgagcaggagtttgattttcctaccccgtggtgaagcaagcacaggtgggcggaggtgggcagcggtttccagccccagccaccggggcagggaggcctctgttgctcagggcaagggaggcagggggcttagtgggacgaaggctcaccccacactcttatcattagcattatctgtatttttaatttttaagttgagaaattttctacaactgtcaaactagacaaatgacagtatccagttcccctcacccagacgcagccattgctgacagctgtcagtgttgaagatggccagcatctcatgcccttggtttcactcgttccctgggtggccctcgtccccctccccacgtcctgcgccccgcataccctgagcagccatggccaggaacttggcacgtgggtttgttttttctgaatctgcatgtgcgcagccatgagcatgaggtcactttttgaatgtgaccgaagctgcatcctgctgcgtgtattgctgtgtggctggctttcctccctgtcttctgttcaggaatactgttcaggctgaataccgtcctgtgacatgggtttaaaaacacaggccaggcatggtgtctcacgcctggaatcccagcgctttgggaggctgaggtgagaggatcgcctgagcccaggagttcgagaccagcctgggcaacatagacctgatctctacaaaaaattaaaaaatgagccgggcgtggtggtggcacgtgtcattgtcccggccacttgggaggccgaggtgggaggatcacttgagcccaggagttcaaggccgtggtgagccatgatggcaccaccgtactccagcctgggcgacagagagagaccgtctctaaaaaataaaaaataaatcaacacataaacatacgttctcctcctgagggacagagcttgccccggttgttccatgttgactgtgctgcacacaggccgccccccttgctctgcccctcactgtattaagtctctttgggcctcagtttctccatctctaaaggaggtcggggaggccaggcgggtgttgagtgagatgaagaggcccttggagtcattccaggagtctataggtgactccagtctcttctcacttctgacagcctggtggcgggggtggagtctctgctggggatgtgggtacagggctgtggtgggcggggatgagggtggggtttggtgacagggcgtgggtggtcacccagctttgcctttctccacagggtcctgaggacaccgtgagccagccaggcctggccgctgggcctgaccggccccccagcccctacaccccgcttctcccggactctcccagcggacagccccccagccccacagcctgagcctcccagctgccatgtgcctgttgcacacctgcacacacgccctggcacacatacacacatgcgtgcaggcttgtgcagacactcagggatggagctgctgctgaagggacttgtagggagaggctcgtcaacaagcactgttctggaaccttctctccacgtggcccacaggcctgaccacaggggctgtgggtcctgcgtccccttcctcgggtgagcctggcctgtcccgttcagccgttgggcccaggcttcctcccctccaaggtgaaacactgcagtcccggtgtggtggctccccatgcaggacgggccaggctgggagtgccgccttcctgtgccaaattcagtggggactcagtgcccaggccctggccacgagctttggccttggtctacctgccaggccaggcaaagcgcctttacacaggcctcggaaaacaatggagtgagcacaagatgccctgtgcagctgcccgagggtctccgcccaccccggccggactttgatccccccgaagtcttcacaggcactgcatcgggttgtctggcgcccttttcctccagcctaaactgacatcatcctatggactgagccggccactctctggccgaagtggccgcaggctgtgcccccgagctgcccccaccccctcacagggtccctcagattataggtgcccaggctgaggtgaagaggcctgggggccctgccttccgggcgctcctggaccctggggcaaacctgtgacccttttctactggaatagaaatgagttttatcatctttgaaaaataattcactcttgaagtaataaacgtttaaaaaaatgggatgcctgcctctgtgacagccttgtttgctgaggtcgtgggggtgggggcctctgggaagttccgggctcctcttctcttggtcaatagctcctttctggtggctgccaagagcgtctctcccagggccgggctgctggcttaccttcctgttgttttcaaatttcaaccttgtgcaatgttgagtttcatagaaatactgcatgagtacgcccttgtttagaagcagcagggtctgagtcccatcccacagcccccagtgcagacgcttttgccacttttgcatggggccccctggatgtgtttctgtgcatttatctacaaatcctggtgcccataggacatgccccgtgttgttctaggcctttgctttctgctcgttacataaatggtgaagaagagaagcgggtaagagaacagattggagccatctaaaagttctcatcttaagtgtagatcattgcaaaggatggaattttctccgattgtcatcatcgttgatgtttgaatatgagaccatttcatcagtatttaagtgtgcccgctgggatctaactaggagaggagagggtattcactgccgaacatttcaaagaatatacgaacaagctcttttatggtcagaaatgttagcccttttccccttaaacttgtatttcctttcttcttccctcctaaaattttatctaaatgatatttatatttgatgcttttaagccttttattaatcactcctatacttgcctgcaacataaatatataagttgaagcaaactttttttttttatttcttgtgaccatcaagggtaaatttttttaggtctggggctgccataacaaaataccatcaaggccgggcgtggtggcacacgcctgtaatcccagccctgtgggaggccaagaccggaggattgcttgatgccaggagttcaagactagtctgggtaatatggtgagaccctcatcaatacaaaaaaaatacaaaaattagccaggcgtggtggtgggcgcctgtggtcccaactactcaggaggctgaggtaggattgctggaagccaagaggttgaggctgcagtgagctgtgatcatgccactgcactccag

SEQ ID NO: 657 - DNA, 4046 bp, Homo sapiens
tactacagtcacacgaaggacaggagagctgtgatcacagagctcaaggggcagtggagatgggcgagtggctgccatggcaggggaagggatgctgcccactggcaggtcatcaggaaaggctgtttttggatgcatggaccagaaagccactctctgaggtggcccccacctgcatcatcctagggccacaggccgaggccttctgaggggccttggggctgccccgctgctctgctggtcttggctcctctgcagcacctgcttcctttagcactggtgaatgattcttcctcttcccctgtctcagggaaggcttgcctgcttccatgcttgcatgctgggtgacaataaagcattcctggttcttcaccttggctttcagacctgaaacccgacttcctttcaaaattcctgtcctcggggggaaaaggtttccacaatgtgagatggtagcctggacaccagctgtcatcatgttgctgctctagcgtttgagctcccgatgaacaatgaccattgggtccaaccagcccttttgggagcccccttctctgttactgccccagggggagccagaacccagcagggctgtgactccagcgagcaaaatggaactccctccagtttctagactgaattatgtagggaggacagaaggactcagaacccacactcccagaccatgaataccttcccgtggcagagcatcaccataggtgtccacaagtgacgacgcacagccacatgagggggtccctggggactggctgagggactgggccagaggaggccatgacagcctcatccctctgtctccttctgtctgtctccaaattgtccaccagaatggggacagggaaggagggtcaggaagcacagaaggtctaggctgtggctagggtccctttccctgccgcagcccccaaatcagcatcccaccctcaaatccagtaagaatgctacgatcggcagtgtggctccctccctgcaggtttcactggaggccacgtaagtgaaatttatcccattatgtgtgttttgatgtagcaggaccttaccagttttttttgtttttttatttttattttttttggtttcttttttgagatggagtcttgctgtgttgcccaggctggagtgcagtggcacaatcttggctcactgcaacctccacctcccgggttcaagtgggagcctcagcctcagcctcagcctcagcctcccgagcagttgggattacaggcacctgccaccatgcctggctaatttttgtatattgagtagaggcggggtttcaccatgttggccaggctggtcttgaactcctgacctcatgatctgccgccttggcctcccaaagttctgggattacaggtgtgagccactgtgcctggccggccttatcagtttttatgtaatttgtcctgatttaaaaaaaaaaaatcacatgcgggtaaactcaacatattttaatttctctttagagaaattttccacttgagccaggtatggtggctcttgcctgtaatctgagctactcgggaggttgaggtgggaggatcacttgagcccaggagttggaggctgcagtgagccatgatcgcaccattgcactccagcctggacaacagagtgagatcctgtctcaaaaattaaaaaaagcagtaattttttcttctcaagtcattcttttaaaataaatcaaaagtattttaacagaacaatctgttcctcgttgattttaaacagccccccagctaagtccactggttgtcggtctccatggcccatctccccaccttgcttcctcgctggcttaaattttcaagtggacgagcccttttcagcttggcttgtccacctcccaggtgtgtttcctgaagatgcttgtacttatgtctaagagcggcagctccccacatctcagccacctgcaatcgttgagggttgttggactctaaacttatgtgcctttcctgtttcctctttgccttttgcaaattgaagaaccgtgtaaaaccatttttatgtggcttcaacgtcaactataaattagcttggttatcttctaggagaaatgctatttattttggagtagtagtaaaaagggctcaaaggataaggaggccattcaggcctattctgaatccctgatgacatcagctcccaagggctctgtgctgcaggaagcaaaactgtaggtgggtaccaggtaatgccgtgcgcctccccgccccctcccatatcaagtagaatgctggcggcttaaaacatttggggtcctgctcattccttcagcctcaacttcacctggagtgtctacagactgaagatgcatatttgtgtattttgcttttggagaaactgcccttcctatgttctgagtgaatagcagtttttttgatcccagagggcaacttgtattctgtgggctggtgcctatttgcaaggtcacattagaaagacaggagcaaggcttaggcctgctgcttctggaatctcttgtgcaatagactcccctggggaagtctgctagaaatgcagatccctgggcagccttctagccttctggaataggatcatggtgggaccctggaatctgtattttaatggaccctaatgagattctgatgtagaaacatgtttgagaggcattgatctaaatctgggatgactggccaggtgcggtggctcacacctgtaatccagcactttgggaggccgaagcaggtggatcatttgaggtcaggagttcaagaccagcctggccaacatggtgaaaacctgtctctactaaaaatacaaaaaaaattagctgggtgtggtggcacacgcttgtaatcccagctactcaggaggctgaggcaggagaatcgcttgaacccgggagatggaggttgcagtgagccaagatcgtgccactgcactccagcctgggtgacagagtgagactccgtctcaaaaaaataaaactaaaataaataaataaataaatacatctgggatgactgaccaagaacaaagaatgtaggcatcaactgaacaccaactgtatacctgggactggatctgagggtaggattgccagattgagcacaaacaaacaaacgaaacacaagaaacaacagaagggtgcctgttaaatatgaatttctggtaagcaataagtaatttttattgtgttcctgtgcaatgataggacgcacgtatcctgaaaacctgtctgtagttcacctgaaattcacatttaactaggcgttctgattttatgtggccgccctatctgctgggaacataggctgatgcccctgggggttctgcgtttccttggccaggttcctgtagggctgaggtcatgggggagccgtggccagggatggtgtccttgccaggggaggtgacgggcagagctgcaggccctacaacttggggttgggcagggatgagtcgctctaccgtggtgcctctgataatagctgttattttagtttctgaaaaatgtgctgccctcaagagcttctgaggctaggcctacttgggtgaaaatagctttccagggagccacattgtggggacgtgaggcagcagccccactctttggggccacttggctgtctctaactcatctcacttgccagggctggacaaggagatgaaaaagaaaatgccaaggggtgggcaggcaggagcctgttggcgttggcaggcgctgccagccctgtgtcccagtcaagctctggggcgcccttcctgtccatctgggagtagggggtggagtctgaccatgttggggtggagtgttaatattaggagaggatcctccctgggacagggtccccaggcttgggggcaaggccttctgcctggacccccttcctttcctctctcccaggattcctccaggacaccgtagtgctgtgcacggtttggccccatcggtgtgcctgctccttccagccactgctcccttctgcagaaacttgcctgggattcccagggtgcaggggtgggggctggtcaggggctggtcagggcctggtcag

SEQ ID NO: 658 - DNA, 4042 bp, Homo sapiens
tggaaatgtgggtgataggcctattttgcagatgaaagaactgagtccctagcgaagttacacattcaggggtctgggagggggaagctgtggtaggcattctctctgtgtgtctacatagcctgccctcttcccaccgtgccagtattgggaattgagtggccgtgcgtgcaccagggtgagttaggtgtgcagcacctgagagggcttattaaggggccttggccctactgaggggtctagtctggatgcttccccccaggttgacttctggcattccgatcagtgcaacatgatcaatggaacttctgggcaaatgtggccgcccttcatgactcctgagtcctcgctggagttctacagcccggaggcctgccggtaatcactgggactcggggcctcctgggtttcctgggtagctcatggccaaattctgtggtgttggctgtgcacttggaaagcattttgactcatcgtggatttgactcagtagcccttggcaccagcttgaattctctttggtcacaccaccaaaagccaaactccagctgccaatgcctctacacagcccaaagagaggctgctggtggtggtttgcagccaggtggtgctgggctgggaggagggggcaggacatgtcaagtcacagggggccataaaatggaggcgagaggtgggctccctctggcgtctggctggtggcccccatgaccatctgggtgctgagacatcagctggctctgcttggccccttcaggctcagctctgtgtcccatggtcccagttgtggggtaagagtagacagtgggtggctcctacagcccttttctggaggccttgctgtgtcgtgttccattctggtcactctggaaaagtcctttacttaggaattcactcatgtggaccttgacttatctgccctcccagcaaaccctgtgaagccctactgtgtgccaggtgcccggtagtgagagggtgggccaagtctccgttccccaggaggctgtgtcctatcagggcaactcaggcaaatgcacaaacactagagtgtcagagagtgacagtgcttttgctctgtgtggccactttttactattttaagtttttacttatttatttatttaattttttagagatggggatctcgctatgttgcccaggctagtcttgaactcctagcctcaagggatcttcctgcttcagcctcccaaagtgctgggattgcaggtgtgagctactgtacccagctgactttaaaagctgaattttaaacttaaagaaaagttgcatgagaaatacaagtggcccccgtctccccttcacccaggttcactagccgtgttaagccccccaccccctcttctcgccgagtgtctttttccagaaccatcggagagtaggttggaggctgtatgcccccttacctccaaatactcagtgggtgtttttcagaaacgaggacattttcttacataaccataatgctgttatcaaaatgagaaaatttggcattgacataatactgttatctaagctggcactttcctataaatcaaaatatgcaaggcacacatgcaatttaaaattttttagtggctgcattaatacaagtaacaagaaattggtgaaattatttttaataatgtattttatttgacctcatatatcaaaaatgggatcatttcaagtgttattgatgaggttttttttttgttttttttgctagcaagtattagaaatctggaatgtattttatacttgcatcccaatttggactcaccccatgtcaagggcgggatggacagccatgcgtgctgagtggctgccgtggacagagtgggtagcacagtgcatgttcaagttcagaagtgcttttgagaaagtacaggagcatgaatggatggagggtggatggggtgggtgtgggggacggtgctgccacccgaggaagtgacagctgaactgagatctgactgaagggctgaagtctggtggatgaagatgccagaggagactgttcttaggcagagggagcagtgatgcaaagggcctggggcaggagtgagtgtgcttaggaactgcagggaggccctgggcacaggaagttggggcagggctgagcagagcttatgcaggggctagataaggtcaatgaatcctaatggtaggttagactagaaagggtcacagattttcagcaggggcatgatatattctgttctttttttaatttcataactttcaaaaacaattttatttttagagactgggtctcactatgttccccaggctggtctcacactcctgggctcaagtgatcctcccacctcggcctcccaaagtgctgggattacaggtgtgagccataatgcctggcctctgttcttttgtaaaactccatctggccacggctaatacattgatgtgggtggggaggcagagtcggagcggagaggcctgttaggaggtcgctgcagctccgcgggtgagagatgggggcggtttggacccgggaggtggtagcgcccgtggggagaagtggctggatctgggcagcctttggcagggcctggctctggccgccgggtctgggtgtcccctctcatcctgtctgtcccctgcagatccatgaagctaatgtacaaggagtcaggggtgtttgaaggcatccccacctatcgcttcgtggctcccaaaaccctgtttgccaacgggtccatctacccacccaacgaaggcttctgcccgtgcctggagtctggaattcagaacgtcagcacctgcaggttcagtacgtgccgtcccctgtgctgggatggcgggagggtgtgagggtggggccagctgagggtttatctgcccagtgctgtctgcttaatctctggcctctgtactcttgataatcccattaggcgaagataatgaggccgcaggaagataatctgaaaaggaagaaatgccaggtctattagttgctgtcacaatatattgccatgaacttcagggcttagaacaacacacactggttatcttgcagttctgtagtcagaagtctgcgtgggtctcaccgcgctcagaacaaggcggctgtgttccttctggaggctctaggagaagctgcgtctgccttttctggcttccagaggcccctctgtgtttcttggctcccgggcccttcctccacctttgaggccagcaacatggcatccttctgatccactctgtcctcatatctcttcctctcctccctcttctgccccctcttccagttctaaggacccttaagaccacatcgtgctctcctggataccccaggacaatctccccatcttgtttattattattttttttgagacagactctcactctgttacccaggttggagtgcagtggcgccatttcagctcactgcaacctccgcctcccaggttcaagtgatcctcccacctcagcctcccgagtagttgggaccacaggcgtgcaccaccacacctggctaattttttgtatttttggtagagatgggggtttcaccatgttgcccaggctggtcttgaactcctgacctcaagtgatctgcctgcctcggcctcccaaagtgctgggattataggtgtgagccaccgcgcccagcctatttttatattttgagacaaggtatcactctgtagcctggagctggagtatagtggtgcgattatagctcactgcagcctcgacctcatgggctcaagcgatcttcctgcctcagcctcctgagtagctgggaccgcaggtgtgggccatgatacctagctaattttatttttgtaaagtttttatagagatgttgtttcaccatgttgcccaggctggtctcaaacacctggcctcaagtgatccacctgcctctgcgtgttaaagcaatgggattacaggtgtgagccactgtgcccggcccaatttctggaccttcaaggcagctgctgagcaggcccagcgcccgtttaccctgtgacctgacatagtcatgggttctggggcttagggcatgtacgtgtcc

SEQ ID NO: 659 - DNA, 4118 bp, Homo sapiens
tgacacatacctccttggctgctatagcagcggcagagagcccggtgaaaggcgtgtgcacagtccttaaagcatccccccaagtgacatgccacttctcctttttcattgctcagggagctgacctggccatgctttattttatgctggagtagggtgtggtgggggtgatctgccatttacctgggaggaaagccagactctcctggagttaggaagggagggtggaacactgcagccacagaacccgggaccattcctcctagaaagctcccaagcctcctctcggtccccagacactgggcatttggcagtgaaccagatgctgggggccctgtccttctggtggagggggaggagggctcagcccagaatgttcagaccaggccggctcaatggcaggcctaagccttacgatgctgttccctgctgtgtctgtagctcaacaactccgactctgggctcttcacggtgttcacgggggtccagaacatcagcaggatccacctcgtggacaagtggaacgggctgagcaaggtgaggggcgagaggcgagggcccctgtcgccagggagaggggagggtgggcccggccatggctgctcgggagtggcagggaccagagagctccttcttcctttgtcgtgaagagggtgctgggaggatgaacactcttgaagttggaggagggattttacctctggttaaagcttgaccacccagaggggcaggtggggttagtgattgcttactgagcttactgagcacctggcatctgctgggaactgagtgctttcttcctttcgattctttacttacaaaaatgttttgaaggccgggcgtggtagttcatgcctgtaatcccagcactttgggaggccgaggtgggggggatcacctgaggtcaggagttcgagaccagccaggccaacatggcaaaaccctgtctctactaaaatacaaaaaattagctgggtgtggtgttgcatgcctgtaatcccagctactcatgagctgaggcaggagaatcgcttgaacacaggaggtgaaggttgcagtgagctgagatcacgcaatttcacttcagcctgggtgagaagagtgaaactcggtctccaaaaaaaagagaagagattcacattacaaaataaaacaagagagggagataagtgcccttagtatcacctcccacccctaccccttgccccagaggaaacccacaattatcagtttgggatatattcttcccatccatttttacccatgtgcacacctatatgtacgcagagaaatacggaattgtttcttctttgaacatcatgaaatcatactacgtgcattgttttgcaactggcttttttcaccttcgtgaccttttctcaatatgtgtgaaaatgactgtgtgacttcccactccccactccccgtggtagttactgcaaagaccctgagggctagggacaaatcgtaccccaaccggtgcccagagtggcaaaaatcaccatctgcaactggcagtagccattcacgatagatggagttcacattcattgtggcttgtatattccaatatactgtacatgtgcacgtgattttaaacatcctcatcatacagaagattggaaagtgagcagttggttttgtcgagtctgggtctcgctccccagagtcagttaacctgacaggttctgttttggggttgcccggtggtggccaccattatgattttaagtagtttgcctgtgtgccgattgttttcaggaggtgcctgttgacttccgctctgagggctgagcacagccgcgccccacctctcacctcacctgctcaccacacttcttttccagattcaggctggaaatgtgggtgataggcctattttgcagatgaaagaactgagtccctagcgaagttacacattcaggggtctgggagggggaagctgtggtaggcattctctctgtgtgtctacatagcctgccctcttcccaccgtgccagtattgggaattgagtggccgtgcgtgcaccagggtgagttaggtgtgcagcacctgagagggcttattaaggggccttggccctactgaggggtctagtctggatgcttccccccaggttgacttctggcattccgatcagtgcaacatgatcaatggaacttctgggcaaatgtggccgcccttcatgactcctgagtcctcgctggagttctacagcccggaggcctgccggtaatcactgggactcggggcctcctgggtttcctgggtagctcatggccaaattctgtggtgttggctgtgcacttggaaagcattttgactcatcgtggatttgactcagtagcccttggcaccagcttgaattctctttggtcacaccaccaaaagccaaactccagctgccaatgcctctacacagcccaaagagaggctgctggtggtggtttgcagccaggtggtgctgggctgggaggagggggcaggacatgtcaagtcacagggggccataaaatggaggcgagaggtgggctccctctggcgtctggctggtggcccccatgaccatctgggtgctgagacatcagctggctctgcttggccccttcaggctcagctctgtgtcccatggtcccagttgtggggtaagagtagacagtgggtggctcctacagcccttttctggaggccttgctgtgtcgtgttccattctggtcactctggaaaagtcctttacttaggaattcactcatgtggaccttgacttatctgccctcccagcaaaccctgtgaagccctactgtgtgccaggtgcccggtagtgagagggtgggccaagtctccgttccccaggaggctgtgtcctatcagggcaactcaggcaaatgcacaaacactagagtgtcagagagtgacagtgcttttgctctgtgtggccactttttactattttaagtttttacttatttatttatttaattttttagagatggggatctcgctatgttgcccaggctagtcttgaactcctagcctcaagggatcttcctgcttcagcctcccaaagtgctgggattgcaggtgtgagctactgtacccagctgactttaaaagctgaattttaaacttaaagaaaagttgcatgagaaatacaagtggcccccgtctccccttcacccaggttcactagccgtgttaagccccccaccccctcttctcgccgagtgtctttttccagaaccatcggagagtaggttggaggctgtatgcccccttacctccaaatactcagtgggtgtttttcagaaacgaggacattttcttacataaccataatgctgttatcaaaatgagaaaatttggcattgacataatactgttatctaagctggcactttcctataaatcaaaatatgcaaggcacacatgcaatttaaaattttttagtggctgcattaatacaagtaacaagaaattggtgaaattatttttaataatgtattttatttgacctcatatatcaaaaatgggatcatttcaagtgttattgatgaggttttttttttgttttttttgctagcaagtattagaaatctggaatgtattttatacttgcatcccaatttggactcaccccatgtcaagggcgggatggacagccatgcgtgctgagtggctgccgtggacagagtgggtagcacagtgcatgttcaagttcagaagtgcttttgagaaagtacaggagcatgaatggatggagggtggatggggtgggtgtgggggacggtgctgccacccgaggaagtgacagctgaactgagatctgactgaagggctgaagtctggtggatgaagatgccagaggagactgttcttaggcagagggagcagtgatgcaaagggcctggggcaggagtgagtgtgcttaggaactgcagggaggccctgggcacaggaagttggggcagggctgagcagagcttatgcaggggctagataaggtcaatgaatcctaatggtaggttagactagaaagggtcacagattttcagcaggggcatgatatattctgttctttttttaatttcataactttcaaaaacaattttatttttag

SEQ ID NO: 660 - DNA, 4045 bp, Homo sapiens
atggctgctggggagtaatatcacaagctgactcttaatcttgactcttggcaacctggtagggtcactgactgggcttcggagccaacatctcgtccatggagggtctgaccctgaccttggctccctcaccgcaggtttcactgagtccttgggactgctccagcctcagccatctctttggtctctgctgatcagggtagagtgctgggggggatatcgtggtgctgcgtgtgatagatactcagtacgtttttgtcaagggtgacgggctcctgtcgtgtgggtaaatgagcaagtttgggctaagtggcatgatgctgtaaaggcatcttgtaaatcctgaagtgctttgcaaatgaaagttattacaaagtccctagtttagtataatctacgtttgactgcatataatgaaaacctcacaagaaaagtctagcggtaggctgttcagtgttggtgtggtggcttcatggtcttaagtgatctggaagccttctactactgtgctctgccatccttggcatgtggttttcatcctcaagataacctcattgtccaagttggctgctagagtgtcagcaatcacatcacattccaggcagcacagcaagaaggaaaaaatggtggggctttggggagcagatggaggaactgggggtaaaacagcgtgttccagtttcctccctcttagggaggaagaaaaccaatgtccacttcctttctattggccagaactgagtcacatggccacacctagctccaggggaagctggaaaggtagccttttagctgggtgtgctgatgctctgagtatggtttgggttttgtatgaaagagtaaggagagattgggctttgggtagtaactggcagtttctgatgctctccgtccattataatgatcatttaagtatcctattgggtgagcatttattaataataacaataataatgaaaataaagactatcattttgagctcttactgtgtccggtgcactgtacctggccgtttttgcacatgagtccctttaatgctcccctttgtagtggctctggttattcttggctccacatgggcacgtgacagacacacccgggatgctgggctggggccttgtgctgggtcctgctctggaggtctgtgatgggtgcagtcactcagccgggcaaccttggagctcctcagtgtgctccaccctgcaaagcacttctagatatttccttcagtcactcataccactttgtgctttgcatgtctttgggattagaaaccagcttctgggaaatgctctcggagcaccaaagcctgggccccactatcaagaacctcgatgggttaggacaggccaggttttgctgctgtgacaagcagccccggaatctccatggcttagaacaaccaagacttattcctttgcttgcactccacgtccagtgtgggtgactggggcacccgcgcttgtggtggtcacttggggatccaggctgagggaggctctgtcttgacacatacctccttggctgctatagcagcggcagagagcccggtgaaaggcgtgtgcacagtccttaaagcatccccccaagtgacatgccacttctcctttttcattgctcagggagctgacctggccatgctttattttatgctggagtagggtgtggtgggggtgatctgccatttacctgggaggaaagccagactctcctggagttaggaagggagggtggaacactgcagccacagaacccgggaccattcctcctagaaagctcccaagcctcctctcggtccccagacactgggcatttggcagtgaaccagatgctgggggccctgtccttctggtggagggggaggagggctcagcccagaatgttcagaccaggccggctcaatggcaggcctaagccttacgatgctgttccctgctgtgtctgtagctcaacaactccgactctgggctcttcacggtgttcacgggggtccagaacatcagcaggatccacctcgtggacaagtggaacgggctgagcaaggtgaggggcgagaggcgagggcccctgtcgccagggagaggggagggtgggcccggccatggctgctcgggagtggcagggaccagagagctccttcttcctttgtcgtgaagagggtgctgggaggatgaacactcttgaagttggaggagggattttacctctggttaaagcttgaccacccagaggggcaggtggggttagtgattgcttactgagcttactgagcacctggcatctgctgggaactgagtgctttcttcctttcgattctttacttacaaaaatgttttgaaggccgggcgtggtagttcatgcctgtaatcccagcactttgggaggccgaggtgggggggatcacctgaggtcaggagttcgagaccagccaggccaacatggcaaaaccctgtctctactaaaatacaaaaaattagctgggtgtggtgttgcatgcctgtaatcccagctactcatgagctgaggcaggagaatcgcttgaacacaggaggtgaaggttgcagtgagctgagatcacgcaatttcacttcagcctgggtgagaagagtgaaactcggtctccaaaaaaaagagaagagattcacattacaaaataaaacaagagagggagataagtgcccttagtatcacctcccacccctaccccttgccccagaggaaacccacaattatcagtttgggatatattcttcccatccatttttacccatgtgcacacctatatgtacgcagagaaatacggaattgtttcttctttgaacatcatgaaatcatactacgtgcattgttttgcaactggcttttttcaccttcgtgaccttttctcaatatgtgtgaaaatgactgtgtgacttcccactccccactccccgtggtagttactgcaaagaccctgagggctagggacaaatcgtaccccaaccggtgcccagagtggcaaaaatcaccatctgcaactggcagtagccattcacgatagatggagttcacattcattgtggcttgtatattccaatatactgtacatgtgcacgtgattttaaacatcctcatcatacagaagattggaaagtgagcagttggttttgtcgagtctgggtctcgctccccagagtcagttaacctgacaggttctgttttggggttgcccggtggtggccaccattatgattttaagtagtttgcctgtgtgccgattgttttcaggaggtgcctgttgacttccgctctgagggctgagcacagccgcgccccacctctcacctcacctgctcaccacacttcttttccagattcaggctggaaatgtgggtgataggcctattttgcagatgaaagaactgagtccctagcgaagttacacattcaggggtctgggagggggaagctgtggtaggcattctctctgtgtgtctacatagcctgccctcttcccaccgtgccagtattgggaattgagtggccgtgcgtgcaccagggtgagttaggtgtgcagcacctgagagggcttattaaggggccttggccctactgaggggtctagtctggatgcttccccccaggttgacttctggcattccgatcagtgcaacatgatcaatggaacttctgggcaaatgtggccgcccttcatgactcctgagtcctcgctggagttctacagcccggaggcctgccggtaatcactgggactcggggcctcctgggtttcctgggtagctcatggccaaattctgtggtgttggctgtgcacttggaaagcattttgactcatcgtggatttgactcagtagcccttggcaccagcttgaattctctttggtcacaccaccaaaagccaaactccagctgccaatgcctctacacagcccaaagagaggctgctggtggtggtttgcagccaggtggtgctgggctgggaggagggggcaggacatgtcaagtcacagggggccataaaatggaggcgagaggtgggctccct

SEQ ID NO: 661 - DNA, 4040 bp, Homo sapiens
aagtgcacaatttcggttagaggttgatggattttcacctaggtatgcacgcttgtaatgaccccctataccaagtgtaaacgcctcccccgcacccctccctgtcagtatccacccctgaggtcctgctgcccccacctctatccccatggattggttttgccattccccgggacgtcacttatatggactcatgcacgtggtccctgtgtgtgatttaccctgtcattgtgtgtctcaattggtcattcccttttgtctctgggtagcattccatggtatgagtgtgtccccatttgtcatgcattcacttgcttgtagacatttgtgttgtttccagttttgggctgttatgggtacggctgctatgagcatttgtggataatctttgtgtgggtgcatgctttcatttttctgggacaaatactgggggtgggattgctatattgtagggtgaacgtccagctttggtagaaaaagtatattccacagtgactgcactaatgcacttccaccagcaatgtgtgagcactctggctgctccacatcctcaccagcacttgttattgtcagtctttttcattgtagccattctggtgtatggcatgggatctcactgtgagtccagtggacatttctctgatgactaagccacccagggctggtgggtggctccaggaagtcacaggaatcctttctcctatctcctattctgctccgcccttcttcatgtgtggctttcattcttaagggtgcctcatgatccaagatggctgctctagctccatccattgtgactgaattccgggcagcaggaagggggacttatcaacaactacatagaaatttcagatattgataatgtcagggagataaaacagggtgatgaatataatgtgatgggggaagggctgctttaggaagaatggtattttcatccattttgttcactattgaagtgcccaggcctagagcagagcctgccatacagtggggctcaatagagatggttaagggattgaaaattgctcagggaaggtctcacggagaaagtgactttagacttgagaagtgaggggctcacttttgtgggcatcaggggaaagattgcccctggaggagcaaagagtcagtgcaaaggccctgtggcagaaacttgcctggtggctcaggagcacagcaaggccagtgtggctggagcagagtgagcgaggcagataggaatgggggaggagactggagtgactatagggagctgggttgtgcaagacctcataggtcactgtcaggaatttagattctattctgagataaatagggaggcatgggggaggtttgagcagaatgacatgctctgactttaatcttaaaaggataacttggattctgtggggagaacggggcggggggcaagagcagaggcaggaaaacagcggggaaactacggcacccatccatacaagccaggatgggggccaggatggtgttggagagaagtggatggatttgaggcatgctttaaagcgagagcagcccagccttgctgatggagggtgctaggtgggaggaaaatggaggactcaggaatgactcaacctcttcgcttaagcaacttacaagcgtgggtttcttgtaaaaaccttttattttagtcttcttaccttagtcctttaaaaatcaaaagaagttggaacatgagccaagggtgtggtgttcccaagtcccagattggattagcctgtgtcgtagttgttcctgcatcttaaggccccatggagctggggatgcctggagccctgggattgagagtgtagtcagccactgactgctggtccagagtgggcagggcctggccttgtcccagaactaggcttcgtctgggcaaattggcttcttggctcatttggtcagaggtgtgtttcttggaagcctgttttctcttctcataggaggaggaattagaccttgcaattcagtggccaggtcaagttaatgattcatttgtgaagctcccgtgcaaggagcccagcggggatggcctaggagagaagcgtgagggcacaggcctagacgtggatacggagcctggggctctgtctctccctgctcctgtgaccttggtcaggcatttggctttggagcctcagtgtctgcttcgatgagatgagccattgagaatttaagaggtgaagtaggtggaagtgtttcgctacctgaacagggccgggcagatcgtccagacgattctgctcccctggtgtctgagggcaggggcgtctcagggcaggggccccatcgtgttcatccctgtgtctttaaattcctagcatagcatctagcatggggcggatgattgtacagggcatgaactgcaatcccaatgaggtcagagcagcctcactgtaggccgaggtcgttccagtgggcttcatggaggaggtggcacctgggcgagcggggtgttaggtttggaggtcaggggcctctccaggtgcaggggagagtgctgtgggtggtaggaagagaatgctaaaaattaatgtctatgaaatcttcatctcatccatcacacatttaccgagttgttgccccggcctaaacaggcggtactctctgtgtatttaaaaaaaaaaaaatcccttcttaagtatgagctgtttaaaacacacaaaggaggactagcgttaccacccgctagacatttccacgttgattatatggtttcaggtctcacttttgctcattcacccagaaaatatttacagagctcctgcaaggtgccaagagctgtcccaggccctgaggacagacacatcgccaaacaaagcagctgaggatcttgcccttgtgggtttatggccaggcaggtgatacagatggacagcaataaacctgataagctaattataccgtgtgctcgaaggccacaagcagcatggaaacaacacggcaggtcgggaggtcaggagttttaggggcaggttggatgagccttctgagaagggggcatgtaagcagagattcgaaggggtgagggatttgaccacgtgtttaggaggaagcagtgggtgcaaaggccctggggcaggagcgtggcctcttggacaggatagcaaggaggctgtggggctgggctgagtaacagacagtggttgtggaatgagaccaccgcttctgctgttgtccttcccagcttctccccagcctccccttttccctagtttataagacaggagaaaagggagaaagcaaaaagatggaaagaaacagaagtaagataaatagctagacgaccttggcgccaccacctggccctggtggttaaaataataataataataataatattaacccctgaccaaaactactggtgttatctgtaaattccagacgttgtatgagaaagcactgtaaaactttttgttctgttagctgatgtatgtagcccccagtcacgttcctcacacttactcgatctattatgaccctttcacatggaccccttagagttgtaagcccttaaaagggctaggaatttctttttcggggagctcggctcttaagacgcgagtctgccgatgctcccggccgaataaaaacctcttccttctttaatccggtgtctgaggagttttgtctgtgacttgtcctgctacagttggatgtggggccagagagaacacaggggccagaccaggcagaggggcttgtaggccaatgttcggacggtggctcgtatgttattttcaagaaataacatgttcacaatgacagttaaagctttccccacatccccagcccccagccctctcctgagattgtttgcaggtatcatttccctgaatgtttttctacatttccacatgggtttgtcttcagaaagaatatagagtattatttcatgtgtttggaaaattcacatcaagaggcccatgtcaattgtttctttctttagccttttcttcactcaagatttttttttctttaaaaataaaaattgaggccaggtgcagtggctgacacctataatcccagcactt

SEQ ID NO: 662 - DNA, 4065 bp, Homo sapiens
acaagccctctcatctcccgtaggtctctgttcagctctcacttgctcacggagaccctcccctgattccgtttgtgcatcatgcaggttcccccttgtccccctgtgctgccagccctccttacccgctctgcttagacctgtcagccactgtagataccctggaacttccctgggtatcatgttgattgtttattgtctatttctccccatgagaatgtcggactgtgagggcagggacctttgtgttattcgttgccgtgacccaagcccctggaacgatgcctagcacataatcgcaggttctcaaatatttattgaaaggatgtttaaaagacaagggttgtttcacaggatggttcgtgaccagtggcaggttgtggtcctgtgcagggcaatggggcctactcctccacctgccgtggccgtcgccccagaccgagctgccaccgttgtttcccagtggatgctggagtgtcatcatggggctgtttgctctgctgatttataccacactgttgtcacttctccccatcaaagccaggatgctctttaaaacatgcaaattgggccgggcacagtggctcatgcctgtaatcccagcactttgggaggccgaagtgggtgggtcacctgaggtcaggagttcaagaccagcctggccaacatggtgaaacctcatctctactaaaaatacaaaaattagccaggcgtggtggcatgtgcctgtaattccagctactcgggaggttgaggcaggagaattgtttgaacccgggaggtggaggttgcagtgagccgagattgcaccattgcactccagcctgggtgacagagcgagactccgtctcccaaaaaaaaaaaaaaaaaaaacaaaactatgcaaactggatcatttcaagaagctgaataaaatcttcctgcatttggtatcaaagctgtgagcctcattttcgtgggccctgcccatctcaactcagcattctcaccccactgcaacctcacaggccttccttttcctccaacgtgtcacatgctgtcctgcctcagggcctttggaagtgcttttctttctgcctggaccgtctttttgtctccctggctcttatgcttggttcctcttttatgtttaaatgtaaccttttgaagcttaaatgtaaccttttgaagaagacaccccgtgattgcccaccccacccaatggacagttgccccccacgtccactgtctgtgccatctgtgtggtttttcagctggagggcaatggccccatctcggctcactgcaacctcctcctccccggttcaaacgactctccagccttgcctcttgagtagctgggattacaggcgtgcaccactatgcccagctaatttggtatttttagtagagatggggtctcaccatgttagccaggctggtctcgaactcctgacctcaggtgatccacctgtcttagcttcccaaagtgcttggattacaggcatgagccaccgcgcctggcttgcgccatctgtgttataaccacaccatgctattcccttctgagcccttaatagtctctgaaattatctcatccacttgtgtgagttccatgaggacagagactttatctgtctcgttcatggctgcattccatagttggagacccttgtccagggcagagaaccacctagcgtaggaccttgggctaaggcagagaggccccagtgggggtcctccgcagcgtggactttggaaccagactccctgagttcagcagtggctcttgcacttcctgtctctgtggctgtgggtgagttgcataaccctgccgggcgtgtttctccgggcctccctcctcgggctgtagcgaggggtaagggaggtcatacgccctggggaacaccccaaagcctgggtccctgggatgcatccacagattgtaggcctgagtcttaacacactccatctggatttcaatgacttctgcctggttccagtgctgggctgtttccctgtctgagctttggtggcttttgattgacccctttcctgccccagcatgaaggtggagtagccagaaggaagggatgcgggtgtataaagatgtcatcggggctgtctgtggatggtgggtaaagagacagcacctgtcatggtggaagggccacaggaagcgtggaggctgtttctggggccacctcctgcctccaggaggaagcagggatcctcctgttggcatcttggtcccatcaggtgtcttggatggggctggggctgggagtgtttctctccctgagcatttaagccaaggttcattatttagaatggaaccatttataggccgggcgccattattacattattcctaaagtgttaggattacaggtgtcatgcctgtaatcccggcactttaggaggctgaggtgggtggatcacttgaagtcaggagttcgagaccagcctggccaacatggtgaaaccccatctctactaaaaacacaaaaattagctgggcatggtggcacacacctgtagtcccagctacttggaaggctgaggcggaggactgcttgaactcgggaggtggaggttgcagtgagctgagatcgcgccactgcacttcagcctaggtgacagtgagactccatctcaaaaaaaaaaaaaaaaaaatggaatcctttatgtttcactttgttctcattagcaggactgtgcgaggctgagtcaggagaccgaggtccattctgcttgtgattttgctccgtgcaggaatgtggaggtgtggcccataagcatgtcattcatgcaaaatcatctacatgcattcaattagaaaaaaaaaggaaaacagcagtgaccctcataagtagacttggttagtgtcaatgtagggagtgagtttcttgtgaccctgctgttcttcctgggtcccgtgacagggcatctggacaggctgaatgcgattctagaattagattcctatgtttttatatgtacgccccagtctcacttgccagtggcttcctctgacgcttagaaaataaatggcatctgcaccacgtcagggagaaactgactgctttggaattcccagaagctcttggaagggaaccttcctgagggatattgaaggagaattaaagaattttctcagtggctggcacaacttatggagtcaatgctcattggctgtgattggctgagctgggatcacatgtgcatccttggaccaattgctgtggctcgagtaatggactgctgtgattggtcagccttgggtcgcctgcccatttggagccagggagggaagtagttcttgcccacagagactcaggtaggagtagggtggttcccaaaaggcaaaaaggaggggctgttgtcgggggaagaggcggccataggcagcaaaaatggggctgagcccctttgcccccaggtagcttcccacttcatccccacattgcctttcactgtctctggctgttacagtattagagattattttgtttggctgactattctgtttaccaaggcctcttgaggaggtagtagcttaccagctgtttattatgtatgtatttacttatatttacttacctatttattttgagacggagtttctctcttgttgcccaggctggagtgcaatggtgtgatctcggctcaccgcaacctttgcctcccaggttcaagcgattctctcacctcagcctcccaagtagctgggattacaggctgcgccactgtgcccagctaattttgtatttttagtagagacagggtttctccatgttggccaggctggtctcgaactcctgacctcaggtgatccgcccacctcgacctcccaaagtgctgggattacaggtgtgagccacgaagcccggcctatttatttatttttttgagacatggtctcagtctgtcgcccgggctggagtgcagtggcatgatcttggctcactgcaacctccgcctcccgggttcaagtgattctcctgcctcagcctcctgagtagttgggattacaggtgcccaccactacacccggctaatttttgtatttttagtagaggcgag

SEQ ID NO: 663 - DNA, 4048 bp, Homo sapiens
ggcaccagggccagccagggatgtcaccggctgtccctgagtttgtgccttttgggaaatctttgtcaatcagttaaaagatgggggttgatgggagataacagtcaatgggcactcgttgtggccggatactgttccaagtgtttatgtgcattattcattttagtatctaaaataggtactattgtgtcttattttattgagggaaatggatgcacagaggcggaaagtaacttgccccatgtcacatagctccaagcggttgaatcaggatttcaagtctgggggccgactccacagctggtcccggtggcctctgcgcactgcgtcctcccggttctccgtgtgtctgagcaggtcgactgcatgcttaaggcgggcggcggggggtgcccttcttatattctcttcctgggctgccccttccttttctgtgcatcaccagggaacagcagggtcccttcgaggctttgtcctaatcatcaccccgccaaactttgctggtgcagagtgcaccctggcctctcccttccgggggtagtctgagaccagggacatgttctccaatcaaaggcaccaagtgaggctcccggggaggccacctgttcctagcccagggctcccagtgaccccgggggctggactcccacccatcctgcaggggccgcccgctctgcgcctttatcagcccccctgcggaacctgggggggaggcccagtgtctccacctaccgggcgtttcctgtaggacccccttgtttggacatgtggggcaaagccctagaactgatcactgggcacaggtggggagggggctcctcgaggacagcttggatcacaggtgtgtgccaattctgttttgtttttcttcctctttcctgccattgaacttcctactccttctagcatgtgagagacagcttcaacttactccctggcgacggctgaaaaacatgggctatttttagtttgtgtgagtctagtttatttgctcctggtagatttgcctctccctgtcttcgtgagtgtgtgtgtgtttgcacacacgtgtgttggtgtgtgtacacaagtgctgatggtgaaaacagtgacacacacacctgtgtaggcatgcacacacctgccttgatgtgtgacgacgtgatgatgtgtatgcagacacctgtgttgatgtgtgcctacatatgttgacacaggcacacatggtgtgtctgtacatgcaaatggacacacatgaacacacgtgtttatgcatgtccttgtgtgttgatgtgtctgcacatacatgttgatgtgtcccgctgtggttggcctttctggggccaggcccagcacctggggtttccaggaaacattccctgtcccttcccggaatggccggtacttgctgtgcctccgccgggagatgcaccctgattaactagaacgtggcgaagctcagccacctggaatcgccttaccctggcctttggtttctagcaaatgggatggaagtgagtccccatggagggcttgctccatgaaggtgtttttcctggatgagtcttggccccagtggcgatttgctgcaggcttgttggcactgtcattcgtgggtcctgcatggaggttccttagtgtccagagggtgattccatgtctgtggtcagcaaaagagaggcccctggggccataagccacaccccccaaggctgaacccagagagtttgtggtttaaatcttgggcctggaggattctgtggaggagagttcggtccaggccttctgctccaggaggcgctggcagctccgacaccacagacacattaattgtgcggagaattcaacgctagggctcagtcaaaaatcaaaaacgcaaaacaaaaagagaatcccttttatttacctcgtctccctccccctgtttggacatgaccttgagctctgctggcccacaagtggccaggctggagctgtcttgcaaagagaaacaaaaacaacacaaaaagctgcgttcttgactttgaagccttaaagggcccaggggctggctccctgtgggtgttgggggcgattttcctcccaaagcctgcgtgagatatggagacactccgcctgctcagaagctccccaggtcccgggttccaggaagcctcatggcccaaggcctggccgtcttaattttcttgttttctttccctccactccactgtttcttcctgttcactgattgcctgtgctggggagggggaaggaacgggaggggcctgaccttgttcacttcctggcattttgggtgaagttccttacaccttctctggaagcttctagaaggacccttgaggcgctttaaatctccattctctgggttttcctcccaccttcctggctgctctgtcttcttgcctgctgatgcctcctcatctccctggcctcctgcctcctgctggtggagctccaggcatcctttctgtgtgtcctcatccctcatccctggggtgggctcctccagccttgcgcctgaatggcatctctgtcctgaccactcccaaattggtatccctgggcccagacctttcccctgaaccccacccccgagtgtccaacagcagagtccgtatctcaactcggggtcaaaggcagctcacgctcgccccggctggctcctcatcaccctcggccacacctgtggctcccaccagcttcccactccatcatagcccccccatcttccagttgcccgggccaacatcttgcactcagccttgactctgttctctccacttccctcagagaacccgtcagaaagttttctagcttcatcatctaaatatacccagattccaactacttctcaccacgcccgaggcgccatcacctctggtccaaggcaccatcacctctcccccagattcctgcatccgcctcctcactggcctccctgtgctcatccttgctccccagtggggtttctcaataagcagccatgggagcccatcaagattgcacttagcacctcctcccctcaaagccctgacatggccagacccgtcccctaggagtcacagccaggtcctaacctggcccagggcctgtgccatccacccctgccacttttctggcgacgtccgcattcccttttcccttgcacaatggcctcctggccattcctcagccccatgggcccaatcgccttagctctcctgacacaagccctctcatctcccgtaggtctctgttcagctctcacttgctcacggagaccctcccctgattccgtttgtgcatcatgcaggttcccccttgtccccctgtgctgccagccctccttacccgctctgcttagacctgtcagccactgtagataccctggaacttccctgggtatcatgttgattgtttattgtctatttctccccatgagaatgtcggactgtgagggcagggacctttgtgttattcgttgccgtgacccaagcccctggaacgatgcctagcacataatcgcaggttctcaaatatttattgaaaggatgtttaaaagacaagggttgtttcacaggatggttcgtgaccagtggcaggttgtggtcctgtgcagggcaatggggcctactcctccacctgccgtggccgtcgccccagaccgagctgccaccgttgtttcccagtggatgctggagtgtcatcatggggctgtttgctctgctgatttataccacactgttgtcacttctccccatcaaagccaggatgctctttaaaacatgcaaattgggccgggcacagtggctcatgcctgtaatcccagcactttgggaggccgaagtgggtgggtcacctgaggtcaggagttcaagaccagcctggccaacatggtgaaacctcatctctactaaaaatacaaaaattagccaggcgtggtggcatgtgcctgtaattccagctactcgggaggttgaggcaggagaattgtttgaacccgggaggtggaggttgcagtgagccgagattgcaccattgcactccagcctgggtgacagagcgagactccgtctcccaaaaaaaa

SEQ ID NO: 664 - DNA, 4046 bp, Homo sapiens
ccacatgctacgtgtttgattaaaaattacaaggccaagcatggtggctcaaacttgcgatcccagcactttatggggctgaggtgggagggtcacttgaagccctgagtttaagactagcgtgggcaacatagtgagacccccatctctacaaaacaaaacaacaacaaaactaagctggtgcatggtggcatgcacctatagtcctagctacttgagaggctgaggtgggaggatatcttgagcccaggagctcgaggctgcagtgagctgtgtttgtgccactgtactccaacctgggcaacaaagtgaaatcccatctcttttttttttttttgagacggagtctggctctgtcgcccaggctggagtgcagtggtgcgatctcggctcactgcaagctccaccttccgggttcacgccattctcctgcctcagcctcctgagtagctgggactacaggcgcccgccaccgcacccacctagttttttgtatttttagtggagacggggtttcactgttttagccaggatggtctcaatctcctgacctcgtgatccgcccgtctcggcctcccaaagtgctgggattacaggtgtgagccaccgcgcccggccaaaatcccatctcttaaaaaaaaaattacgaatgaacagatacatagttttcctcaaagactggccagatgaatgcgccacacagaccgatgaggcacactgcaaaggggccctgtggtcgaggttgcttggagaggctttggggaagcgcaactcatttcttttcccttctgccagtgggtaggattggagagaggtgtttggacaggcacactaagggccgcgattgtgaacttcatggcatccattcatgggcagcttactgtgcaccaggcagggttcaaagcacctttgtgaaaattgtctcatttagtccctgcagagggccgtgacatatgatttattgtcttcagtgtccgttaaggagacaagctgaagagagtaatttgccccaagtgacctcgctagtgtatgtgtgtgcgtgcatgtgtgcacgtgtgtgtgtgtgtgaaggtgtctgtctgtcccagaggcagatgccatgagaatggggactcttgctcccattccctggatctgagcctggcatgcagctgtgctcaggtatgtgggtgagtaacgaaggcctggttcaggtcctggggggcacacatccaagttcccgtatgtctctggtcctccaaggaaggcccagctggtggacgtggggagaggcccctcactactgctgggctgcagggaaggggtcatcttccaagaccaccatcttcaatgataggcctcatggccttcttccatgtccaggagagaacctgggtcccctctgctgtctttaagttggttttctagatggactcaacctcggttgccttgtcctgctgctgggcttcccccacctatgatccctgtctcaataaacggcacctccttttgtttcccctggggtagaggcaaaaaccttcggtcatctttgcctgcatgcttttttcctgatacccctgtatctgctgaggcaggggctttcccatcactgtcactgcagcgtccccgagggccatagcagcgcctgagctccttgccaccccttcaacaccagtcaggttacagaatgaatgaggcgggcgcgacccccagccctggcctcaggctctttagctcacccctgcctccctcagccagagccacacagtgagccttggggagccccggcaccagggccagccagggatgtcaccggctgtccctgagtttgtgccttttgggaaatctttgtcaatcagttaaaagatgggggttgatgggagataacagtcaatgggcactcgttgtggccggatactgttccaagtgtttatgtgcattattcattttagtatctaaaataggtactattgtgtcttattttattgagggaaatggatgcacagaggcggaaagtaacttgccccatgtcacatagctccaagcggttgaatcaggatttcaagtctgggggccgactccacagctggtcccggtggcctctgcgcactgcgtcctcccggttctccgtgtgtctgagcaggtcgactgcatgcttaaggcgggcggcggggggtgcccttcttatattctcttcctgggctgccccttccttttctgtgcatcaccagggaacagcagggtcccttcgaggctttgtcctaatcatcaccccgccaaactttgctggtgcagagtgcaccctggcctctcccttccgggggtagtctgagaccagggacatgttctccaatcaaaggcaccaagtgaggctcccggggaggccacctgttcctagcccagggctcccagtgaccccgggggctggactcccacccatcctgcaggggccgcccgctctgcgcctttatcagcccccctgcggaacctgggggggaggcccagtgtctccacctaccgggcgtttcctgtaggacccccttgtttggacatgtggggcaaagccctagaactgatcactgggcacaggtggggagggggctcctcgaggacagcttggatcacaggtgtgtgccaattctgttttgtttttcttcctctttcctgccattgaacttcctactccttctagcatgtgagagacagcttcaacttactccctggcgacggctgaaaaacatgggctatttttagtttgtgtgagtctagtttatttgctcctggtagatttgcctctccctgtcttcgtgagtgtgtgtgtgtttgcacacacgtgtgttggtgtgtgtacacaagtgctgatggtgaaaacagtgacacacacacctgtgtaggcatgcacacacctgccttgatgtgtgacgacgtgatgatgtgtatgcagacacctgtgttgatgtgtgcctacatatgttgacacaggcacacatggtgtgtctgtacatgcaaatggacacacatgaacacacgtgtttatgcatgtccttgtgtgttgatgtgtctgcacatacatgttgatgtgtcccgctgtggttggcctttctggggccaggcccagcacctggggtttccaggaaacattccctgtcccttcccggaatggccggtacttgctgtgcctccgccgggagatgcaccctgattaactagaacgtggcgaagctcagccacctggaatcgccttaccctggcctttggtttctagcaaatgggatggaagtgagtccccatggagggcttgctccatgaaggtgtttttcctggatgagtcttggccccagtggcgatttgctgcaggcttgttggcactgtcattcgtgggtcctgcatggaggttccttagtgtccagagggtgattccatgtctgtggtcagcaaaagagaggcccctggggccataagccacaccccccaaggctgaacccagagagtttgtggtttaaatcttgggcctggaggattctgtggaggagagttcggtccaggccttctgctccaggaggcgctggcagctccgacaccacagacacattaattgtgcggagaattcaacgctagggctcagtcaaaaatcaaaaacgcaaaacaaaaagagaatcccttttatttacctcgtctccctccccctgtttggacatgaccttgagctctgctggcccacaagtggccaggctggagctgtcttgcaaagagaaacaaaaacaacacaaaaagctgcgttcttgactttgaagccttaaagggcccaggggctggctccctgtgggtgttgggggcgattttcctcccaaagcctgcgtgagatatggagacactccgcctgctcagaagctccccaggtcccgggttccaggaagcctcatggcccaaggcctggccgtcttaattttcttgttttctttccctccactccactgtttcttcctgttcactgattgcctgtgctggggagggggaaggaacgggaggggcctgaccttgttcacttcctggcattttgggtgaag

SEQ ID NO: 665 - DNA, 4046 bp, Homo sapiens
ggccccaggcgcgcagacatgggctgctccgccaaagcgcgctgggctgccggggcgctgggcgtcgcggggctactgtgcgctgtgctgggcgctgtcatgatcgtgatggtgccgtcgctcatcaagcagcaggtccttaaggtgggtgagggagaccccagggggtccgcgcacggacccgggctgttgggcgctgggcgccgggaggacccgcgcgttgcggtgggtgggcgaccgcagcggaatcggcgcccgggcctggcgccgcagagcacgagggaggccaggcgcttcgggaggggctgctgcccgcctccccaccaccctcaccgccccagactgaggctaggggggaacccaggggctttgctggaggcgcaggccagggttggggaggcctggacgggagaccacccgggcgcctgacccgccctaaagggtctgggcgcccacgacggatcaggagtgtggacaggttgcttccgtggtgccgcccgaaggagcccaagagtgtgtgaacgtctgctttcacagcagccggtagcagggtccggtaaaattagagctgcactttgcttgtatcctgtgagcccaggaggacaggaaccttctgtgagacccacgtgggtgcccagctcacatggtaggtgctcagctgagcatcctccactgcccagaatctccccataggaaccctctcccagaggcagaatgcgcgactctgttctccctgctcactgcctccatgattcagtctggaaactataagccgcttttctccccagattcatgcagaggcaggcagcagcccaaggtcctctgagtgcacgcagccttaggtctttcctctgatcctaactttgcataccattgccctttcaaccagggagacagattaggcggtcagctggtctgcagacggacagactctgccctgggtgcctgggtggcctgtttgaatgagcctggagttagggaagggctgggagattgcagagtatcacatttgaactaaaagccatttagagttttgaagccctgggaacccacacatgcagtggcggggaggggaaactggggctcactcttatcaaagttctagccagatgcagagctggggtgaagatgtggacattgtcactctaatggacgtcttttccccttggcctgcctctttggactgggtttcttaagaatggttccttgtccacatttcatgtctgttccctcattcacagagcgaatgaatgagtgaatgaatgaaggatctgcttagatctggctgccacacttcttgggacccagctagctggccttaaagatggagcaacatatggtctctctcaaggtctctgggtgagcagttgtctagggcatcttagccacgttgtgtctatttttgatttttcaaatcttgtcccgccaaagcctgtaatctgactgcaaagaggtcccggtggatggtgacactgtctctggggatggcaggaaaatcagcagaatggcctcttctcccccatgacagctcagaggctttctctgttacactgagggagctttatttttctgtggcctactcatactgaaacgtgtgtgtcagtgacagccttgtggctgctgcagtgccaggaccccactgtgtgtatgcagggtccctagaggggctatcactcaggcagttcaagcatgtgaccctgtgctgtgagtgagcacctggtctcttgctatgggagtgtggggacttatgccaggtaaagagtcttgccaactcagttattcgggggcttatttcaaggtgttttctttctcaggatgtcatcaggttaagtatgtcagtaggatgtgtgtgtgtgtgtgtgcaccacacatgcatgcaccaccaaatttccccactcctctcctgggcttctaaagaggaaaaccacattgtcctcaattgtcctggagctaggagcatctggcttaaagttgaacaggagcctcccagcatccttctgtggatatcccaaaggcgattggtttggggccgagtggtgtgaaggcaggaagacacgcccagcccaagacggccacttctggaaccgcccaggctggagcagcggccaagtgccttagcatggaagaagagagcctgtgttcaggggaccaggcgggtgagacacacgcataagcagggactgcccgctggtgttttctttggctacatgagtctgtgtgcaacttgaatgggaggccttgtgcttttattttttttttttaatgtgctttttggttaacaacagaagtccctacagttggccctctgtgtctgcaggttctgcatccgtggattcaatcaactgcagatgaaaagttttcagaaaaaatccccccaaaataacaatacaactaaaaaaagacataaaaacaatactgtataacaactattgacatagcatttacatcgtattaggtattataagtaacctagagatgatttaaagaatacgggaggatgcgcataggtgatatgcaaataccacagcattttatgtcggggacttgagcatctgcagatcttggtatctatgggggtcctgaaaccaattcccctctgacattgagggacgactttatataaaatatatgaatacttgctcgtaaaaaaaagttcaaatggaggaaaagagagaaagtttcccccattttattcccctcctgagctattatcaccatcattgatgtggatctttctagacccttttctgtgtaccaggagcctgtatgtatacatattaatatatattttacataacttgaactaagtgtaggtgaacttgaacatgtataattatcttgcaatttgtttttcaattcaaagataccagctgaaaaattttccatgtctcagcaataagtctaccccgcgttttccttcatcactgctggtattcctttgaatggttatagacttgtttacctgtttctccattgactgatcattttctctgtcacaaatgacagcgatatcccgacacatccctcttcgtgtggttcatgaacatttccatagggtggatttctagaagtggggccttgggagcaggtgtgctcagtttgagttttgatgattacggccaaattgcccttctgcacagctctgttgctgcatccacccacaaggtatgggactgtgctacttcccctatctctgccatcactggtaattactgatttatcattaccattttttggtagccaagttcccgtgtgtctctggtcctccaaggaaggcccagctggtggacatgggggagaggcccctcactgcagctgggctgcaaaaaagggatgctcatcttccgaggctgctgtcttcaatgatgagctggggtgaagatgtggatattgtcacactagttgacatctttttccctttggcctgcttctttagactgaatttcttaagaatggcttcttgtccacatttcatgtctatgtccttttcacagaacttggatgtgtgcccccagggatctgaaccatgtcttcattattcaccggatcacctgaggtcaggagtttgagaccagcctggccaacatggctaaaccctgtctctactaaaaaatacaaaaactagctggacatggtggtgcacgcctgtaatcccagctattcgggacgctgaagcaggagaatagcttgaacctggaaggctgaggttgcagtgaactgagatcacgccactgccctccagcctgcgtaatagagtgagactccatctcaaaaaaaaaaaaaaaaaaatgaaggaacttagaaatatgtctcagcatgggtaggccataaaaacacattactaattgaaaaaagctctggtgctatttatgtttaaaaaaaacccaccaaacaatattctatattttctttccatttttatttttattttcgtagagacaaggtctcactatgttacccaggctggtctcgaactcctggccttaagtgatccttctgccttggccttccaaaacactgggatgataggtgtgaaccaccgcgcc

SEQ ID NO: 666 - DNA, 4042 bp, Homo sapiens
acatttcagggggtctgtgggacttagctgaccccacctcagacagatgcagacagcggctcatcaccggggggtccctcacgggtgtctgtctctcttaggttggagcaaaacgtcccactcactggaggcacctgaggacgacgggggctggtcaagtgcagaggagcagattaactcgtccgacgcagaggaggacggcgggttgggccccaagaagctggtaaccacggcttccctgtgggcacttggggtgggggctgccctccggggattaggggtgcttctggcaggtccacccaggcttgggtcttaggacacagccccagctcctcctaaccctggaaggtccacatgggcctgggtcttacgggcagtgccagctcctcctaactctctctggaaggtccacccagacctgggtcttggggcacagccccagctcctcctaactctctctggaaggtccacctgggcctgggtcttaggatgcagccccagctcctcctagctcctctgtctcagcagcactttgtgtttctgggttaatttccaggtgcccacccagcctcctgtagagcccactcgtgggtgcaccttcctcagaggagacagtccccacccccctaccctttatgtcatagaatgctgtcactgagccttcctaactatacatacaattctcattttgtaagaaaatggaactgctaagcatggatttgcatttgaaaaaacattcattgttaatgtcagaagcaagaaaaagctgccatgtgttaatcattccagtgagggttacaccaagaagtgtctgctgcaccttctgtgctgtgcgtggtccatgccccaaggctggaggtgcaaaggggacaggtcccggaggctctggaagggcagagaagccaggcgtggaagggtagggagagccctcggggcctctggcctctcccacagagacagcatgaaggaaggcctgggcgtgagaacagatgtgggggacacagaggcggaggccacgtggcaggaggggaaacaggctggtggaacagggtgcacggggcctggggagggatttggatctcattctttgtggggtgtggggagtgatcctggctactctgggcaccacagaggcaggagccagtacaggccatcacgtgagggcaggcagcccagtcaccgtcctcttgctccaggccatcatgtgagagcaggtggcccagtcaccgtcctcctgctccaggccatcacgtgagggcaggtggcccagtcaccgtcctcctgctccaggccctgcagccggcagcacccctccgcagcccaccacacgcagcaccaggaggctgtgaatctccccactctgtaggaacagctgccgcttcctgggtccccattccccaacggaacgtgttccatgacatctgtgcagcatccgctgtgtgccaggcacagttctaggccccggagacaaagcgggaacagcacagacaggaacctccactcttacagtgaggagagaaagaggagtgaggcttggggaggttgggcaggacagctgcagggagagggagggcagaggacgggcgagtcggggagtaccaaggaaggcctcagcaaagcagcatggaaataagacctgaaagcacggaagggccctccgggaggcgggtatgcaggcgcaaaggccctggggccgagagctgtgtgtggagaccagcgtgaggggctggggcagctgggcccaaagacagattcacagacgccttccatcgccgctgcggtagtcatgccctgcggcgtagcctcctcccaaggctggagcccttccccggagctggtcgtggccaggagctcccaccggggcagggcgctaaggcccggcactccgcctggctgctgtggggctgctgccggggcgggtgctgacgctgtctgtgcccctgcccgtctcccaccaggttccaggtaaatacacggtcgtggcggaccacgagaagggaggccccgatgcgctgcgcgtgaggagcggggacgtggtggagctggtgcaggagggcgacgagggcctctggtaagaccccgcgctcagccccggactgccccgcacgtggctgccgctgaccctcgccccttgcaggtacgtcagggacccgaccactggcaaggagggctgggtgccggccagcagcctgtccgtccggctcggcccgtccggctcggcccagtgcctgagcagctcaggtaaggcccacgtgccccgagcccacccgtgacgctgccaagggcccgggcgaggaagctgccccgtgtgtgcccggcagagccgacgccgaagcccgtccccgcctgatctccccgcagagtcgagcccggggtcggccgtgctgagcaactcgtccagctgcagcgagggcggccaggcccccttctccgacctgcaggggtagcgcggcctcggcgccggagacccgcgcgctgtctggggctgcggtggcgtggggagggcgcggcccccggacgccccgaggaaggggcacctcaccgcccccacccagagcgcctggccgtgcgggctgcagaggacccctccggggcagaggcaggttccacggaagaccccggcccgctggggcttccccggagactccagagcccacagaggaggggccgcagggaacagccccgggcggcaggcgccgggcagcggcatctcgtcctggctccaccgtgctgcttctgcctctggacggtgctttcaggggacgcgcggaccgtggtggagctgcttccggagaagtggaggatcctctggccaacggcctgaggagagcggggcacggggtctctttagcttttacaagttttaggattttttcaagcagggatcaatcccgtggccattttttgtggtactttggcctcaattcttcaccaggaatcactgtgtttacatgaaatgacaatttgatactgtatttgatagaaaactatttttttgttaccggggtttacatagaagcacgttgtttataccactaagtgactttgggggggctctcccatggaaacggatggcactccctgaagctccctggtcacaggtggatgaaaacgtgtccgtgggtgacatcaggtggtgtctccaccaccaaaagcagttagaagccaaggagattcctttatctacctagggttcattttcaaaagaaaatttaaactataatttaaacaattaacgttcttttctacaaaaaaaatgcagggacttgatttttttaaagagcttcactgaattaggatatttttattgcttttaaagaaaatacaaagatgcagtttctgcagggtgtggcgtggaccagtgctgccgaccatagctcagagagccctgcccctgcctcactgcactgcagcctcctcggaggccgcacctccactccactccccacgcgccccctgcctcccacccaggtccacctgccacctggtgaccaccttgagtacagaagtgaaagtggggagagtattttattcaagtcacagcagaactggaaaaaaactcttctgttttaccaacttcttgtgtttcagaaacatattctgttcaaaacttttgaagccctttcggtgtctagtctgcagatgtttttgtatgtgtgcacctctgaccatgtgtgtacatatgtgtcttgctggaaaggacatattcgctgtccccgtgctgctgggagggccgcctcacagcctcacggttcccagccccagcacagtggaggcaggcgtggctgcattcccctcacgctaccctcccagcggcttgtagccgtcactggccagacctccagggtgcggaatcaaataggaagcatgcagagactcggcagcttttcctctgatgtgtaagttatttggaacgcgtgctgtgtcccgcgatgtccctgatgtactgtgcaggcgcggtgcctccgtctcgtcgcacagctgcgcgcccttgtgtgaccctccccataaaggcactttacagcttcatgtttcatccact

SEQ ID NO: 667 - DNA, 4044 bp, Homo sapiens
gttttcatctgcagtttaaatctgtttcccaacttacattaggggtttggaattctagatcgtatttgaagtgttggtgccacacacaccttaacacctgcacgctggcaacaaaaccgtccgctctgcagcacagctggggtcacctgacctttctcctgtcccccccacttgagctcagtggctgggcagcaggggatgcatggccactggccggccaggtgcagctctcagctggggtgttcagaggacgcctgtgtcctcccctcccccatccctctgtcacccttggaggcagagaactttgcccgtcagtcccatggggaatgtcaacaggcaggggcagcactgcagagatttcatcatggtctcccaggccctcaggctcctctgccttctgcttgggcttcagggctgcctggctgcaggtgcgtccggggaggttttctccataaacttggtggaagggcagtgggcaaatccaggagccagcccgggcttcccaaaccccgcccttgctccggacacccccatccaccaggagggttttctggcggctcctgttcaatttctttccttctagaaaccagcatccaggcacaggaggggaggcccttcttggtggcccaggctttggcgggattatttttcaaagaactttaggagtgggtggtgctttcctggcccccatgggcccctgcctgtgaggtcggacaagcgcagggagtctggggcctctcagagtgcaggaagtgcgcacagggtgctcccaggctggggagcacaggtaggggacggtgcgtgggggatggcgcctggggcatgggggatggggtgtgggaaacggcatgtggggcgtaggggatggggtgtggaggatcgggggtggggatggcgtgtggggtgtgggggatgggccgtgggggggtggggcctgggaaacagcatgtggggcatggggtgtgggggtgaggtgtgggaaagtgtgtggggtgtgggggatggggcatggaaagggcgtgtggggtgcaggggatggggcatggaggtgtgggggatggggtgtgtggggtgtcggggatggggcatgtggggtgtgggggatggggcatggaaagggcgtgtggggtgcagaggatggggcatgggggggtggggatggcgagtggggctggggcctgggaatggtgagtggggcatggggatggcgagtagggggtgtggcgtgaggatggctagtggggcgtggggatggcgtgtggggatggcgagtggggggtgggctgtgagggacagtgcctgggatgtggggctgcagccctagctcacagcatggccttatgaccccggccaccttcctgccccaggcggggtcgctaaggcctcaggaggagaaacacgggacatgccgtggaagccggggcctcacagaggtgagcagggactgccactggttttgtcctggggcccagtgggggccaacatcacctccttcccctcccatggcaaagagccagcccgcggggtggctactgcagtgccccccaaggagggtgttccctgctcgagaggaagtgaccgctccagcttggccttccctgggactggggtgcaggcgattttatcttctttgctccattctgttccttccagataatcgtgtgttcttcatcaggttttcctcagttcttgagagcttttctgatgcaaatctgctttcaccccagggcggtcaccggctctgctcacaccagcctccaagggtgtgggtgtcccgggagtgtgggtgtcccgggggcgtgggtgtcccaggagtgtgggtgtcccgggggcgtgggtgtcccgggagtgtgggtgtcccgggggcgtgggtgtcccgggagtgtgggtgtcccggaggcgagggtgtcccgggagtgtgggtgtcccgggggagtgggtgtcccgggagtgtgggtgtcccggaggcgagggtgtcccgggagtgtgggtgtcccgggggcgtgggtgtcccgggagtgtgggtgtcccgggggagtgggtgtcccgggagtgtgggtgtcccggaggcgagggtgtcccgggagtgtgggtgtcccgggggagtgggtgtcccgggagtgtgggtgtcccggaggcgagggtgtcccgggagtgtgggtgtcccgggggcgtgggtgtcccgggagcgtgggtgtcccgggggcgtgggtgtcccgggagtgtgggtgtcccgggggcgtgggtgtcccgggagtgtgggtgtcccgggggcgtgggtgtcccgggagtgtgggtgtcccgggagtgtgggtgttccggaggcgagggtgtcccgggagtgtgcgtgtcccgggggcgtgggtgtcccgggggcgtgggtgtcccgggggcgtgggtgttccggaggcgagggtatcccagaagtgtgagtgtcccaggggcgtgggtgtcccgggggtgtgggtgtcccgggggcgtgggtgtcccgggagtgtgggtgttccggaggtgagggtgtcccgggagtgtgggtgttccggaggcgagggtgtcccgggagtgtgggtgtcccgggggcgtgggtgtcccgggagtgtgggtgttccggaggtgagggtgtcccgggagtgtgggtgttccggaggcgagggtgtcccgggagtgtgggtgtcccaggggcgtgggtgtcccgggagtgtgggtgttccggaggcgagggtgtcccgggagtgtgggtgttccggaggcgagggtgtcccgggagtgtgggtgtcccgggggcgtgggtgtcccgggggttgtgggtgtcccgggagtgtgggtgttccggaggcgagggtgtcccgggagtgtgggtgttccggaggcgagggtgtcccgggagtgtgggtgtcccgggggtgtgggtgtcccgggggtgtgggtgtcccgggagtgtgggtgtcccgggggagtgggtgtcccgggagtgtgggtgttccggaggcgagggtgtcccaggagcgtgggtgtcccggaggcgagggtgtcccgggagcgtgggtgtcccgggggcgtgggtgtcccgggagtgtgggtgtcccgggggagtgggtgtcccgggagtgtgggtgtcccggaggcgagggtgtcccaggagtgtgggtgtcccgggggcgtgggtgtcccgggagtgtgggtgttccagaggcgagggtatcccagaagtgtgagtgtcccgggggtgtgggtgtcccgggggtcgtgggtgtcccgggagtgtgggtgttccagaggcgagggtgtcccgggagtgtgggtgtcccaggggtgtgggtgtcccgggggcgtgggtgtcccgggagtgtgggtgtcccgggggagtgggtgtcccgggagtgtgggtgttccggaggcgagggtgtcccgggagtgtgggtgttccggaggcgagggtgtcccgggagcgtgggtgtcccgggggcgtgggtgtcccgggagcgtgggtgtcccaggggtgtgggtgtcccgggggcgtgggtgtcccgggagtgtgggtgtcccgggggagtggatgtcccgggagtgtgggtgttccggaggcgagggtgtcccgggagtgtgggtgttccggaggcgagggtgtcccgggagtgtgggtgtcccgggggcgtgggtgtcccgggagtgtgggtgtcccgggggcgtgggtatcccagaagtgtgagtgtcccaggggcgtgggtgtccggggggcgtgggtgtcccgggggtgtgggtgtcccgggggtcgtgggtgtcccgggagcgtgggtgtcggggactgcagggacatgggcctcccctcccactcctgccgcccagggcacctcctgtgaggactcggagtccgtgagttcccacctccttgagcccgattctttggtgtccccgcctgcatcctcagcctccttccaaaccagaccagttctctaggggcgtcgacgtgtgaaactgattttaaagaaaacaggcagtggcctttctctcggccccacgtggcccagtagcgctcaccttccg

SEQ ID NO: 668 - DNA, 4048 bp, Homo sapiens
tgagctcagtggctgggcagcaggggatgcatggccactggccggccaggtgcagctctcagctggggtgttcagaggacgcctgtgtcctcccctcccccatccctctgtcacccttggaggcagagaactttgcccgtcagtcccatggggaatgtcaacaggcaggggcagcactgcagagatttcatcatggtctcccaggccctcaggctcctctgccttctgcttgggcttcagggctgcctggctgcaggtgcgtccggggaggttttctccataaacttggtggaagggcagtgggcaaatccaggagccagcccgggcttcccaaaccccgcccttgctccggacacccccatccaccaggagggttttctggcggctcctgttcaatttctttccttctagaaaccagcatccaggcacaggaggggaggcccttcttggtggcccaggctttggcgggattatttttcaaagaactttaggagtgggtggtgctttcctggcccccatgggcccctgcctgtgaggtcggacaagcgcagggagtctggggcctctcagagtgcaggaagtgcgcacagggtgctcccaggctggggagcacaggtaggggacggtgcgtgggggatggcgcctggggcatgggggatggggtgtgggaaacggcatgtggggcgtaggggatggggtgtggaggatcgggggtggggatggcgtgtggggtgtgggggatgggccgtgggggggtggggcctgggaaacagcatgtggggcatggggtgtgggggtgaggtgtgggaaagtgtgtggggtgtgggggatggggcatggaaagggcgtgtggggtgcaggggatggggcatggaggtgtgggggatggggtgtgtggggtgtcggggatggggcatgtggggtgtgggggatggggcatggaaagggcgtgtggggtgcagaggatggggcatgggggggtggggatggcgagtggggctggggcctgggaatggtgagtggggcatggggatggcgagtagggggtgtggcgtgaggatggctagtggggcgtggggatggcgtgtggggatggcgagtggggggtgggctgtgagggacagtgcctgggatgtggggctgcagccctagctcacagcatggccttatgaccccggccaccttcctgccccaggcggggtcgctaaggcctcaggaggagaaacacgggacatgccgtggaagccggggcctcacagaggtgagcagggactgccactggttttgtcctggggcccagtgggggccaacatcacctccttcccctcccatggcaaagagccagcccgcggggtggctactgcagtgccccccaaggagggtgttccctgctcgagaggaagtgaccgctccagcttggccttccctgggactggggtgcaggcgattttatcttctttgctccattctgttccttccagataatcgtgtgttcttcatcaggttttcctcagttcttgagagcttttctgatgcaaatctgctttcaccccagggcggtcaccggctctgctcacaccagcctccaagggtgtgggtgtcccgggagtgtgggtgtcccgggggcgtgggtgtcccaggagtgtgggtgtcccgggggcgtgggtgtcccgggagtgtgggtgtcccgggggcgtgggtgtcccgggagtgtgggtgtcccggaggcgagggtgtcccgggagtgtgggtgtcccgggggagtgggtgtcccgggagtgtgggtgtcccggaggcgagggtgtcccgggagtgtgggtgtcccgggggcgtgggtgtcccgggagtgtgggtgtcccgggggagtgggtgtcccgggagtgtgggtgtcccggaggcgagggtgtcccgggagtgtgggtgtcccgggggagtgggtgtcccgggagtgtgggtgtcccggaggcgagggtgtcccgggagtgtgggtgtcccgggggcgtgggtgtcccgggagcgtgggtgtcccgggggcgtgggtgtcccgggagtgtgggtgtcccgggggcgtgggtgtcccgggagtgtgggtgtcccgggggcgtgggtgtcccgggagtgtgggtgtcccgggagtgtgggtgttccggaggcgagggtgtcccgggagtgtgcgtgtcccgggggcgtgggtgtcccgggggcgtgggtgtcccgggggcgtgggtgttccggaggcgagggtatcccagaagtgtgagtgtcccaggggcgtgggtgtcccgggggtgtgggtgtcccgggggcgtgggtgtcccgggagtgtgggtgttccggaggtgagggtgtcccgggagtgtgggtgttccggaggcgagggtgtcccgggagtgtgggtgtcccgggggcgtgggtgtcccgggagtgtgggtgttccggaggtgagggtgtcccgggagtgtgggtgttccggaggcgagggtgtcccgggagtgtgggtgtcccaggggcgtgggtgtcccgggagtgtgggtgttccggaggcgagggtgtcccgggagtgtgggtgttccggaggcgagggtgtcccgggagtgtgggtgtcccgggggcgtgggtgtcccgggggttgtgggtgtcccgggagtgtgggtgttccggaggcgagggtgtcccgggagtgtgggtgttccggaggcgagggtgtcccgggagtgtgggtgtcccgggggtgtgggtgtcccgggggtgtgggtgtcccgggagtgtgggtgtcccgggggagtgggtgtcccgggagtgtgggtgttccggaggcgagggtgtcccaggagcgtgggtgtcccggaggcgagggtgtcccgggagcgtgggtgtcccgggggcgtgggtgtcccgggagtgtgggtgtcccgggggagtgggtgtcccgggagtgtgggtgtcccggaggcgagggtgtcccaggagtgtgggtgtcccgggggcgtgggtgtcccgggagtgtgggtgttccagaggcgagggtatcccagaagtgtgagtgtcccgggggtgtgggtgtcccgggggtcgtgggtgtcccgggagtgtgggtgttccagaggcgagggtgtcccgggagtgtgggtgtcccaggggtgtgggtgtcccgggggcgtgggtgtcccgggagtgtgggtgtcccgggggagtgggtgtcccgggagtgtgggtgttccggaggcgagggtgtcccgggagtgtgggtgttccggaggcgagggtgtcccgggagcgtgggtgtcccgggggcgtgggtgtcccgggagcgtgggtgtcccaggggtgtgggtgtcccgggggcgtgggtgtcccgggagtgtgggtgtcccgggggagtggatgtcccgggagtgtgggtgttccggaggcgagggtgtcccgggagtgtgggtgttccggaggcgagggtgtcccgggagtgtgggtgtcccgggggcgtgggtgtcccgggagtgtgggtgtcccgggggcgtgggtatcccagaagtgtgagtgtcccaggggcgtgggtgtccggggggcgtgggtgtcccgggggtgtgggtgtcccgggggtcgtgggtgtcccgggagcgtgggtgtcggggactgcagggacatgggcctcccctcccactcctgccgcccagggcacctcctgtgaggactcggagtccgtgagttcccacctccttgagcccgattctttggtgtccccgcctgcatcctcagcctccttccaaaccagaccagttctctaggggcgtcgacgtgtgaaactgattttaaagaaaacaggcagtggcctttctctcggccccacgtggcccagtagcgctcaccttccgtcccttcttccgcgctcagtaaccaatttaggccgctcctgcagaactcgggctcctgcccaccggcccacagcgtccacctgaggcctcgtcctcccagcaaaggtcgtccctccggaacgcgcctcctgcggcctctccagagcccctcccgcgcgtcctctcagccccgctcg

SEQ ID NO: 669 - DNA, 4045 bp, Homo sapiens
cccgtcagtcccatggggaatgtcaacaggcaggggcagcactgcagagatttcatcatggtctcccaggccctcaggctcctctgccttctgcttgggcttcagggctgcctggctgcaggtgcgtccggggaggttttctccataaacttggtggaagggcagtgggcaaatccaggagccagcccgggcttcccaaaccccgcccttgctccggacacccccatccaccaggagggttttctggcggctcctgttcaatttctttccttctagaaaccagcatccaggcacaggaggggaggcccttcttggtggcccaggctttggcgggattatttttcaaagaactttaggagtgggtggtgctttcctggcccccatgggcccctgcctgtgaggtcggacaagcgcagggagtctggggcctctcagagtgcaggaagtgcgcacagggtgctcccaggctggggagcacaggtaggggacggtgcgtgggggatggcgcctggggcatgggggatggggtgtgggaaacggcatgtggggcgtaggggatggggtgtggaggatcgggggtggggatggcgtgtggggtgtgggggatgggccgtgggggggtggggcctgggaaacagcatgtggggcatggggtgtgggggtgaggtgtgggaaagtgtgtggggtgtgggggatggggcatggaaagggcgtgtggggtgcaggggatggggcatggaggtgtgggggatggggtgtgtggggtgtcggggatggggcatgtggggtgtgggggatggggcatggaaagggcgtgtggggtgcagaggatggggcatgggggggtggggatggcgagtggggctggggcctgggaatggtgagtggggcatggggatggcgagtagggggtgtggcgtgaggatggctagtggggcgtggggatggcgtgtggggatggcgagtggggggtgggctgtgagggacagtgcctgggatgtggggctgcagccctagctcacagcatggccttatgaccccggccaccttcctgccccaggcggggtcgctaaggcctcaggaggagaaacacgggacatgccgtggaagccggggcctcacagaggtgagcagggactgccactggttttgtcctggggcccagtgggggccaacatcacctccttcccctcccatggcaaagagccagcccgcggggtggctactgcagtgccccccaaggagggtgttccctgctcgagaggaagtgaccgctccagcttggccttccctgggactggggtgcaggcgattttatcttctttgctccattctgttccttccagataatcgtgtgttcttcatcaggttttcctcagttcttgagagcttttctgatgcaaatctgctttcaccccagggcggtcaccggctctgctcacaccagcctccaagggtgtgggtgtcccgggagtgtgggtgtcccgggggcgtgggtgtcccaggagtgtgggtgtcccgggggcgtgggtgtcccgggagtgtgggtgtcccgggggcgtgggtgtcccgggagtgtgggtgtcccggaggcgagggtgtcccgggagtgtgggtgtcccgggggagtgggtgtcccgggagtgtgggtgtcccggaggcgagggtgtcccgggagtgtgggtgtcccgggggcgtgggtgtcccgggagtgtgggtgtcccgggggagtgggtgtcccgggagtgtgggtgtcccggaggcgagggtgtcccgggagtgtgggtgtcccgggggagtgggtgtcccgggagtgtgggtgtcccggaggcgagggtgtcccgggagtgtgggtgtcccgggggcgtgggtgtcccgggagcgtgggtgtcccgggggcgtgggtgtcccgggagtgtgggtgtcccgggggcgtgggtgtcccgggagtgtgggtgtcccgggggcgtgggtgtcccgggagtgtgggtgtcccgggagtgtgggtgttccggaggcgagggtgtcccgggagtgtgcgtgtcccgggggcgtgggtgtcccgggggcgtgggtgtcccgggggcgtgggtgttccggaggcgagggtatcccagaagtgtgagtgtcccaggggcgtgggtgtcccgggggtgtgggtgtcccgggggcgtgggtgtcccgggagtgtgggtgttccggaggtgagggtgtcccgggagtgtgggtgttccggaggcgagggtgtcccgggagtgtgggtgtcccgggggcgtgggtgtcccgggagtgtgggtgttccggaggtgagggtgtcccgggagtgtgggtgttccggaggcgagggtgtcccgggagtgtgggtgtcccaggggcgtgggtgtcccgggagtgtgggtgttccggaggcgagggtgtcccgggagtgtgggtgttccggaggcgagggtgtcccgggagtgtgggtgtcccgggggcgtgggtgtcccgggggttgtgggtgtcccgggagtgtgggtgttccggaggcgagggtgtcccgggagtgtgggtgttccggaggcgagggtgtcccgggagtgtgggtgtcccgggggtgtgggtgtcccgggggtgtgggtgtcccgggagtgtgggtgtcccgggggagtgggtgtcccgggagtgtgggtgttccggaggcgagggtgtcccaggagcgtgggtgtcccggaggcgagggtgtcccgggagcgtgggtgtcccgggggcgtgggtgtcccgggagtgtgggtgtcccgggggagtgggtgtcccgggagtgtgggtgtcccggaggcgagggtgtcccaggagtgtgggtgtcccgggggcgtgggtgtcccgggagtgtgggtgttccagaggcgagggtatcccagaagtgtgagtgtcccgggggtgtgggtgtcccgggggtcgtgggtgtcccgggagtgtgggtgttccagaggcgagggtgtcccgggagtgtgggtgtcccaggggtgtgggtgtcccgggggcgtgggtgtcccgggagtgtgggtgtcccgggggagtgggtgtcccgggagtgtgggtgttccggaggcgagggtgtcccgggagtgtgggtgttccggaggcgagggtgtcccgggagcgtgggtgtcccgggggcgtgggtgtcccgggagcgtgggtgtcccaggggtgtgggtgtcccgggggcgtgggtgtcccgggagtgtgggtgtcccgggggagtggatgtcccgggagtgtgggtgttccggaggcgagggtgtcccgggagtgtgggtgttccggaggcgagggtgtcccgggagtgtgggtgtcccgggggcgtgggtgtcccgggagtgtgggtgtcccgggggcgtgggtatcccagaagtgtgagtgtcccaggggcgtgggtgtccggggggcgtgggtgtcccgggggtgtgggtgtcccgggggtcgtgggtgtcccgggagcgtgggtgtcggggactgcagggacatgggcctcccctcccactcctgccgcccagggcacctcctgtgaggactcggagtccgtgagttcccacctccttgagcccgattctttggtgtccccgcctgcatcctcagcctccttccaaaccagaccagttctctaggggcgtcgacgtgtgaaactgattttaaagaaaacaggcagtggcctttctctcggccccacgtggcccagtagcgctcaccttccgtcccttcttccgcgctcagtaaccaatttaggccgctcctgcagaactcgggctcctgcccaccggcccacagcgtccacctgaggcctcgtcctcccagcaaaggtcgtccctccggaacgcgcctcctgcggcctctccagagcccctcccgcgcgtcctctcagccccgctcgcctcctcccggggcctccctctcccgcctgcccccaggcccgtctcccctcgcgggctgaggcaggttcgggcagcacggccgccccggggcgggggtcactctccaccaccgcgtggtgcccacagctcac

SEQ ID NO: 670 - DNA, 4042 bp, Homo sapiens
gccagcccgggcttcccaaaccccgcccttgctccggacacccccatccaccaggagggttttctggcggctcctgttcaatttctttccttctagaaaccagcatccaggcacaggaggggaggcccttcttggtggcccaggctttggcgggattatttttcaaagaactttaggagtgggtggtgctttcctggcccccatgggcccctgcctgtgaggtcggacaagcgcagggagtctggggcctctcagagtgcaggaagtgcgcacagggtgctcccaggctggggagcacaggtaggggacggtgcgtgggggatggcgcctggggcatgggggatggggtgtgggaaacggcatgtggggcgtaggggatggggtgtggaggatcgggggtggggatggcgtgtggggtgtgggggatgggccgtgggggggtggggcctgggaaacagcatgtggggcatggggtgtgggggtgaggtgtgggaaagtgtgtggggtgtgggggatggggcatggaaagggcgtgtggggtgcaggggatggggcatggaggtgtgggggatggggtgtgtggggtgtcggggatggggcatgtggggtgtgggggatggggcatggaaagggcgtgtggggtgcagaggatggggcatgggggggtggggatggcgagtggggctggggcctgggaatggtgagtggggcatggggatggcgagtagggggtgtggcgtgaggatggctagtggggcgtggggatggcgtgtggggatggcgagtggggggtgggctgtgagggacagtgcctgggatgtggggctgcagccctagctcacagcatggccttatgaccccggccaccttcctgccccaggcggggtcgctaaggcctcaggaggagaaacacgggacatgccgtggaagccggggcctcacagaggtgagcagggactgccactggttttgtcctggggcccagtgggggccaacatcacctccttcccctcccatggcaaagagccagcccgcggggtggctactgcagtgccccccaaggagggtgttccctgctcgagaggaagtgaccgctccagcttggccttccctgggactggggtgcaggcgattttatcttctttgctccattctgttccttccagataatcgtgtgttcttcatcaggttttcctcagttcttgagagcttttctgatgcaaatctgctttcaccccagggcggtcaccggctctgctcacaccagcctccaagggtgtgggtgtcccgggagtgtgggtgtcccgggggcgtgggtgtcccaggagtgtgggtgtcccgggggcgtgggtgtcccgggagtgtgggtgtcccgggggcgtgggtgtcccgggagtgtgggtgtcccggaggcgagggtgtcccgggagtgtgggtgtcccgggggagtgggtgtcccgggagtgtgggtgtcccggaggcgagggtgtcccgggagtgtgggtgtcccgggggcgtgggtgtcccgggagtgtgggtgtcccgggggagtgggtgtcccgggagtgtgggtgtcccggaggcgagggtgtcccgggagtgtgggtgtcccgggggagtgggtgtcccgggagtgtgggtgtcccggaggcgagggtgtcccgggagtgtgggtgtcccgggggcgtgggtgtcccgggagcgtgggtgtcccgggggcgtgggtgtcccgggagtgtgggtgtcccgggggcgtgggtgtcccgggagtgtgggtgtcccgggggcgtgggtgtcccgggagtgtgggtgtcccgggagtgtgggtgttccggaggcgagggtgtcccgggagtgtgcgtgtcccgggggcgtgggtgtcccgggggcgtgggtgtcccgggggcgtgggtgttccggaggcgagggtatcccagaagtgtgagtgtcccaggggcgtgggtgtcccgggggtgtgggtgtcccgggggcgtgggtgtcccgggagtgtgggtgttccggaggtgagggtgtcccgggagtgtgggtgttccggaggcgagggtgtcccgggagtgtgggtgtcccgggggcgtgggtgtcccgggagtgtgggtgttccggaggtgagggtgtcccgggagtgtgggtgttccggaggcgagggtgtcccgggagtgtgggtgtcccaggggcgtgggtgtcccgggagtgtgggtgttccggaggcgagggtgtcccgggagtgtgggtgttccggaggcgagggtgtcccgggagtgtgggtgtcccgggggcgtgggtgtcccgggggttgtgggtgtcccgggagtgtgggtgttccggaggcgagggtgtcccgggagtgtgggtgttccggaggcgagggtgtcccgggagtgtgggtgtcccgggggtgtgggtgtcccgggggtgtgggtgtcccgggagtgtgggtgtcccgggggagtgggtgtcccgggagtgtgggtgttccggaggcgagggtgtcccaggagcgtgggtgtcccggaggcgagggtgtcccgggagcgtgggtgtcccgggggcgtgggtgtcccgggagtgtgggtgtcccgggggagtgggtgtcccgggagtgtgggtgtcccggaggcgagggtgtcccaggagtgtgggtgtcccgggggcgtgggtgtcccgggagtgtgggtgttccagaggcgagggtatcccagaagtgtgagtgtcccgggggtgtgggtgtcccgggggtcgtgggtgtcccgggagtgtgggtgttccagaggcgagggtgtcccgggagtgtgggtgtcccaggggtgtgggtgtcccgggggcgtgggtgtcccgggagtgtgggtgtcccgggggagtgggtgtcccgggagtgtgggtgttccggaggcgagggtgtcccgggagtgtgggtgttccggaggcgagggtgtcccgggagcgtgggtgtcccgggggcgtgggtgtcccgggagcgtgggtgtcccaggggtgtgggtgtcccgggggcgtgggtgtcccgggagtgtgggtgtcccgggggagtggatgtcccgggagtgtgggtgttccggaggcgagggtgtcccgggagtgtgggtgttccggaggcgagggtgtcccgggagtgtgggtgtcccgggggcgtgggtgtcccgggagtgtgggtgtcccgggggcgtgggtatcccagaagtgtgagtgtcccaggggcgtgggtgtccggggggcgtgggtgtcccgggggtgtgggtgtcccgggggtcgtgggtgtcccgggagcgtgggtgtcggggactgcagggacatgggcctcccctcccactcctgccgcccagggcacctcctgtgaggactcggagtccgtgagttcccacctccttgagcccgattctttggtgtccccgcctgcatcctcagcctccttccaaaccagaccagttctctaggggcgtcgacgtgtgaaactgattttaaagaaaacaggcagtggcctttctctcggccccacgtggcccagtagcgctcaccttccgtcccttcttccgcgctcagtaaccaatttaggccgctcctgcagaactcgggctcctgcccaccggcccacagcgtccacctgaggcctcgtcctcccagcaaaggtcgtccctccggaacgcgcctcctgcggcctctccagagcccctcccgcgcgtcctctcagccccgctcgcctcctcccggggcctccctctcccgcctgcccccaggcccgtctcccctcgcgggctgaggcaggttcgggcagcacggccgccccggggcgggggtcactctccaccaccgcgtggtgcccacagctcacggcgctcccgggtgacggtcccctcggctgtagggcgtcctgaagagcggcctgctcggagctgagcgcacggggttgcctcgccctgggcgtctctggccctcaccagccccgtcttcccatgggcaaaacggcggtcctgtttgtccacaagtaaccgtcggggttacggagggg

SEQ ID NO: 671 - DNA, 4050 bp, Homo sapiens
ctgcctgtgaggtcggacaagcgcagggagtctggggcctctcagagtgcaggaagtgcgcacagggtgctcccaggctggggagcacaggtaggggacggtgcgtgggggatggcgcctggggcatgggggatggggtgtgggaaacggcatgtggggcgtaggggatggggtgtggaggatcgggggtggggatggcgtgtggggtgtgggggatgggccgtgggggggtggggcctgggaaacagcatgtggggcatggggtgtgggggtgaggtgtgggaaagtgtgtggggtgtgggggatggggcatggaaagggcgtgtggggtgcaggggatggggcatggaggtgtgggggatggggtgtgtggggtgtcggggatggggcatgtggggtgtgggggatggggcatggaaagggcgtgtggggtgcagaggatggggcatgggggggtggggatggcgagtggggctggggcctgggaatggtgagtggggcatggggatggcgagtagggggtgtggcgtgaggatggctagtggggcgtggggatggcgtgtggggatggcgagtggggggtgggctgtgagggacagtgcctgggatgtggggctgcagccctagctcacagcatggccttatgaccccggccaccttcctgccccaggcggggtcgctaaggcctcaggaggagaaacacgggacatgccgtggaagccggggcctcacagaggtgagcagggactgccactggttttgtcctggggcccagtgggggccaacatcacctccttcccctcccatggcaaagagccagcccgcggggtggctactgcagtgccccccaaggagggtgttccctgctcgagaggaagtgaccgctccagcttggccttccctgggactggggtgcaggcgattttatcttctttgctccattctgttccttccagataatcgtgtgttcttcatcaggttttcctcagttcttgagagcttttctgatgcaaatctgctttcaccccagggcggtcaccggctctgctcacaccagcctccaagggtgtgggtgtcccgggagtgtgggtgtcccgggggcgtgggtgtcccaggagtgtgggtgtcccgggggcgtgggtgtcccgggagtgtgggtgtcccgggggcgtgggtgtcccgggagtgtgggtgtcccggaggcgagggtgtcccgggagtgtgggtgtcccgggggagtgggtgtcccgggagtgtgggtgtcccggaggcgagggtgtcccgggagtgtgggtgtcccgggggcgtgggtgtcccgggagtgtgggtgtcccgggggagtgggtgtcccgggagtgtgggtgtcccggaggcgagggtgtcccgggagtgtgggtgtcccgggggagtgggtgtcccgggagtgtgggtgtcccggaggcgagggtgtcccgggagtgtgggtgtcccgggggcgtgggtgtcccgggagcgtgggtgtcccgggggcgtgggtgtcccgggagtgtgggtgtcccgggggcgtgggtgtcccgggagtgtgggtgtcccgggggcgtgggtgtcccgggagtgtgggtgtcccgggagtgtgggtgttccggaggcgagggtgtcccgggagtgtgcgtgtcccgggggcgtgggtgtcccgggggcgtgggtgtcccgggggcgtgggtgttccggaggcgagggtatcccagaagtgtgagtgtcccaggggcgtgggtgtcccgggggtgtgggtgtcccgggggcgtgggtgtcccgggagtgtgggtgttccggaggtgagggtgtcccgggagtgtgggtgttccggaggcgagggtgtcccgggagtgtgggtgtcccgggggcgtgggtgtcccgggagtgtgggtgttccggaggtgagggtgtcccgggagtgtgggtgttccggaggcgagggtgtcccgggagtgtgggtgtcccaggggcgtgggtgtcccgggagtgtgggtgttccggaggcgagggtgtcccgggagtgtgggtgttccggaggcgagggtgtcccgggagtgtgggtgtcccgggggcgtgggtgtcccgggggttgtgggtgtcccgggagtgtgggtgttccggaggcgagggtgtcccgggagtgtgggtgttccggaggcgagggtgtcccgggagtgtgggtgtcccgggggtgtgggtgtcccgggggtgtgggtgtcccgggagtgtgggtgtcccgggggagtgggtgtcccgggagtgtgggtgttccggaggcgagggtgtcccaggagcgtgggtgtcccggaggcgagggtgtcccgggagcgtgggtgtcccgggggcgtgggtgtcccgggagtgtgggtgtcccgggggagtgggtgtcccgggagtgtgggtgtcccggaggcgagggtgtcccaggagtgtgggtgtcccgggggcgtgggtgtcccgggagtgtgggtgttccagaggcgagggtatcccagaagtgtgagtgtcccgggggtgtgggtgtcccgggggtcgtgggtgtcccgggagtgtgggtgttccagaggcgagggtgtcccgggagtgtgggtgtcccaggggtgtgggtgtcccgggggcgtgggtgtcccgggagtgtgggtgtcccgggggagtgggtgtcccgggagtgtgggtgttccggaggcgagggtgtcccgggagtgtgggtgttccggaggcgagggtgtcccgggagcgtgggtgtcccgggggcgtgggtgtcccgggagcgtgggtgtcccaggggtgtgggtgtcccgggggcgtgggtgtcccgggagtgtgggtgtcccgggggagtggatgtcccgggagtgtgggtgttccggaggcgagggtgtcccgggagtgtgggtgttccggaggcgagggtgtcccgggagtgtgggtgtcccgggggcgtgggtgtcccgggagtgtgggtgtcccgggggcgtgggtatcccagaagtgtgagtgtcccaggggcgtgggtgtccggggggcgtgggtgtcccgggggtgtgggtgtcccgggggtcgtgggtgtcccgggagcgtgggtgtcggggactgcagggacatgggcctcccctcccactcctgccgcccagggcacctcctgtgaggactcggagtccgtgagttcccacctccttgagcccgattctttggtgtccccgcctgcatcctcagcctccttccaaaccagaccagttctctaggggcgtcgacgtgtgaaactgattttaaagaaaacaggcagtggcctttctctcggccccacgtggcccagtagcgctcaccttccgtcccttcttccgcgctcagtaaccaatttaggccgctcctgcagaactcgggctcctgcccaccggcccacagcgtccacctgaggcctcgtcctcccagcaaaggtcgtccctccggaacgcgcctcctgcggcctctccagagcccctcccgcgcgtcctctcagccccgctcgcctcctcccggggcctccctctcccgcctgcccccaggcccgtctcccctcgcgggctgaggcaggttcgggcagcacggccgccccggggcgggggtcactctccaccaccgcgtggtgcccacagctcacggcgctcccgggtgacggtcccctcggctgtagggcgtcctgaagagcggcctgctcggagctgagcgcacggggttgcctcgccctgggcgtctctggccctcaccagccccgtcttcccatgggcaaaacggcggtcctgtttgtccacaagtaaccgtcggggttacggaggggccaggagctgcggcggggggctgtgctctcaggaccggccccaggaggatccgcgcgaggtctggagctctcaggggtcgcgggggacagaggggccccaagcggaggcggggaaggcggcagaagcccaggaccgccaagagctggcgaggaagcccggggctcgctgtcgggggagccgggcaggggccgcgcctcggaccaggacggaggcctgg

SEQ ID NO: 672 - DNA, 4050 bp, Homo sapiens
gggaaacagcatgtggggcatggggtgtgggggtgaggtgtgggaaagtgtgtggggtgtgggggatggggcatggaaagggcgtgtggggtgcaggggatggggcatggaggtgtgggggatggggtgtgtggggtgtcggggatggggcatgtggggtgtgggggatggggcatggaaagggcgtgtggggtgcagaggatggggcatgggggggtggggatggcgagtggggctggggcctgggaatggtgagtggggcatggggatggcgagtagggggtgtggcgtgaggatggctagtggggcgtggggatggcgtgtggggatggcgagtggggggtgggctgtgagggacagtgcctgggatgtggggctgcagccctagctcacagcatggccttatgaccccggccaccttcctgccccaggcggggtcgctaaggcctcaggaggagaaacacgggacatgccgtggaagccggggcctcacagaggtgagcagggactgccactggttttgtcctggggcccagtgggggccaacatcacctccttcccctcccatggcaaagagccagcccgcggggtggctactgcagtgccccccaaggagggtgttccctgctcgagaggaagtgaccgctccagcttggccttccctgggactggggtgcaggcgattttatcttctttgctccattctgttccttccagataatcgtgtgttcttcatcaggttttcctcagttcttgagagcttttctgatgcaaatctgctttcaccccagggcggtcaccggctctgctcacaccagcctccaagggtgtgggtgtcccgggagtgtgggtgtcccgggggcgtgggtgtcccaggagtgtgggtgtcccgggggcgtgggtgtcccgggagtgtgggtgtcccgggggcgtgggtgtcccgggagtgtgggtgtcccggaggcgagggtgtcccgggagtgtgggtgtcccgggggagtgggtgtcccgggagtgtgggtgtcccggaggcgagggtgtcccgggagtgtgggtgtcccgggggcgtgggtgtcccgggagtgtgggtgtcccgggggagtgggtgtcccgggagtgtgggtgtcccggaggcgagggtgtcccgggagtgtgggtgtcccgggggagtgggtgtcccgggagtgtgggtgtcccggaggcgagggtgtcccgggagtgtgggtgtcccgggggcgtgggtgtcccgggagcgtgggtgtcccgggggcgtgggtgtcccgggagtgtgggtgtcccgggggcgtgggtgtcccgggagtgtgggtgtcccgggggcgtgggtgtcccgggagtgtgggtgtcccgggagtgtgggtgttccggaggcgagggtgtcccgggagtgtgcgtgtcccgggggcgtgggtgtcccgggggcgtgggtgtcccgggggcgtgggtgttccggaggcgagggtatcccagaagtgtgagtgtcccaggggcgtgggtgtcccgggggtgtgggtgtcccgggggcgtgggtgtcccgggagtgtgggtgttccggaggtgagggtgtcccgggagtgtgggtgttccggaggcgagggtgtcccgggagtgtgggtgtcccgggggcgtgggtgtcccgggagtgtgggtgttccggaggtgagggtgtcccgggagtgtgggtgttccggaggcgagggtgtcccgggagtgtgggtgtcccaggggcgtgggtgtcccgggagtgtgggtgttccggaggcgagggtgtcccgggagtgtgggtgttccggaggcgagggtgtcccgggagtgtgggtgtcccgggggcgtgggtgtcccgggggttgtgggtgtcccgggagtgtgggtgttccggaggcgagggtgtcccgggagtgtgggtgttccggaggcgagggtgtcccgggagtgtgggtgtcccgggggtgtgggtgtcccgggggtgtgggtgtcccgggagtgtgggtgtcccgggggagtgggtgtcccgggagtgtgggtgttccggaggcgagggtgtcccaggagcgtgggtgtcccggaggcgagggtgtcccgggagcgtgggtgtcccgggggcgtgggtgtcccgggagtgtgggtgtcccgggggagtgggtgtcccgggagtgtgggtgtcccggaggcgagggtgtcccaggagtgtgggtgtcccgggggcgtgggtgtcccgggagtgtgggtgttccagaggcgagggtatcccagaagtgtgagtgtcccgggggtgtgggtgtcccgggggtcgtgggtgtcccgggagtgtgggtgttccagaggcgagggtgtcccgggagtgtgggtgtcccaggggtgtgggtgtcccgggggcgtgggtgtcccgggagtgtgggtgtcccgggggagtgggtgtcccgggagtgtgggtgttccggaggcgagggtgtcccgggagtgtgggtgttccggaggcgagggtgtcccgggagcgtgggtgtcccgggggcgtgggtgtcccgggagcgtgggtgtcccaggggtgtgggtgtcccgggggcgtgggtgtcccgggagtgtgggtgtcccgggggagtggatgtcccgggagtgtgggtgttccggaggcgagggtgtcccgggagtgtgggtgttccggaggcgagggtgtcccgggagtgtgggtgtcccgggggcgtgggtgtcccgggagtgtgggtgtcccgggggcgtgggtatcccagaagtgtgagtgtcccaggggcgtgggtgtccggggggcgtgggtgtcccgggggtgtgggtgtcccgggggtcgtgggtgtcccgggagcgtgggtgtcggggactgcagggacatgggcctcccctcccactcctgccgcccagggcacctcctgtgaggactcggagtccgtgagttcccacctccttgagcccgattctttggtgtccccgcctgcatcctcagcctccttccaaaccagaccagttctctaggggcgtcgacgtgtgaaactgattttaaagaaaacaggcagtggcctttctctcggccccacgtggcccagtagcgctcaccttccgtcccttcttccgcgctcagtaaccaatttaggccgctcctgcagaactcgggctcctgcccaccggcccacagcgtccacctgaggcctcgtcctcccagcaaaggtcgtccctccggaacgcgcctcctgcggcctctccagagcccctcccgcgcgtcctctcagccccgctcgcctcctcccggggcctccctctcccgcctgcccccaggcccgtctcccctcgcgggctgaggcaggttcgggcagcacggccgccccggggcgggggtcactctccaccaccgcgtggtgcccacagctcacggcgctcccgggtgacggtcccctcggctgtagggcgtcctgaagagcggcctgctcggagctgagcgcacggggttgcctcgccctgggcgtctctggccctcaccagccccgtcttcccatgggcaaaacggcggtcctgtttgtccacaagtaaccgtcggggttacggaggggccaggagctgcggcggggggctgtgctctcaggaccggccccaggaggatccgcgcgaggtctggagctctcaggggtcgcgggggacagaggggccccaagcggaggcggggaaggcggcagaagcccaggaccgccaagagctggcgaggaagcccggggctcgctgtcgggggagccgggcaggggccgcgcctcggaccaggacggaggcctggggaaggcggatctggccgccggagacgcggtgcgggtggagacgagggatttggatttccgcgggcggctgtacggatttccacgcgcggttcacgtgggccccagggggttgcccggcacccggggccgcgccgccttctcctcgccggcatcgacccgcagcctcacgtttacgcggcggcgcccgcagcccccttcggcccggcttccgcgcgtgcccccgagcgcgccctcggga

SEQ ID NO: 673 - DNA, 4050 bp, Homo sapiens
gggcctgggaatggtgagtggggcatggggatggcgagtagggggtgtggcgtgaggatggctagtggggcgtggggatggcgtgtggggatggcgagtggggggtgggctgtgagggacagtgcctgggatgtggggctgcagccctagctcacagcatggccttatgaccccggccaccttcctgccccaggcggggtcgctaaggcctcaggaggagaaacacgggacatgccgtggaagccggggcctcacagaggtgagcagggactgccactggttttgtcctggggcccagtgggggccaacatcacctccttcccctcccatggcaaagagccagcccgcggggtggctactgcagtgccccccaaggagggtgttccctgctcgagaggaagtgaccgctccagcttggccttccctgggactggggtgcaggcgattttatcttctttgctccattctgttccttccagataatcgtgtgttcttcatcaggttttcctcagttcttgagagcttttctgatgcaaatctgctttcaccccagggcggtcaccggctctgctcacaccagcctccaagggtgtgggtgtcccgggagtgtgggtgtcccgggggcgtgggtgtcccaggagtgtgggtgtcccgggggcgtgggtgtcccgggagtgtgggtgtcccgggggcgtgggtgtcccgggagtgtgggtgtcccggaggcgagggtgtcccgggagtgtgggtgtcccgggggagtgggtgtcccgggagtgtgggtgtcccggaggcgagggtgtcccgggagtgtgggtgtcccgggggcgtgggtgtcccgggagtgtgggtgtcccgggggagtgggtgtcccgggagtgtgggtgtcccggaggcgagggtgtcccgggagtgtgggtgtcccgggggagtgggtgtcccgggagtgtgggtgtcccggaggcgagggtgtcccgggagtgtgggtgtcccgggggcgtgggtgtcccgggagcgtgggtgtcccgggggcgtgggtgtcccgggagtgtgggtgtcccgggggcgtgggtgtcccgggagtgtgggtgtcccgggggcgtgggtgtcccgggagtgtgggtgtcccgggagtgtgggtgttccggaggcgagggtgtcccgggagtgtgcgtgtcccgggggcgtgggtgtcccgggggcgtgggtgtcccgggggcgtgggtgttccggaggcgagggtatcccagaagtgtgagtgtcccaggggcgtgggtgtcccgggggtgtgggtgtcccgggggcgtgggtgtcccgggagtgtgggtgttccggaggtgagggtgtcccgggagtgtgggtgttccggaggcgagggtgtcccgggagtgtgggtgtcccgggggcgtgggtgtcccgggagtgtgggtgttccggaggtgagggtgtcccgggagtgtgggtgttccggaggcgagggtgtcccgggagtgtgggtgtcccaggggcgtgggtgtcccgggagtgtgggtgttccggaggcgagggtgtcccgggagtgtgggtgttccggaggcgagggtgtcccgggagtgtgggtgtcccgggggcgtgggtgtcccgggggttgtgggtgtcccgggagtgtgggtgttccggaggcgagggtgtcccgggagtgtgggtgttccggaggcgagggtgtcccgggagtgtgggtgtcccgggggtgtgggtgtcccgggggtgtgggtgtcccgggagtgtgggtgtcccgggggagtgggtgtcccgggagtgtgggtgttccggaggcgagggtgtcccaggagcgtgggtgtcccggaggcgagggtgtcccgggagcgtgggtgtcccgggggcgtgggtgtcccgggagtgtgggtgtcccgggggagtgggtgtcccgggagtgtgggtgtcccggaggcgagggtgtcccaggagtgtgggtgtcccgggggcgtgggtgtcccgggagtgtgggtgttccagaggcgagggtatcccagaagtgtgagtgtcccgggggtgtgggtgtcccgggggtcgtgggtgtcccgggagtgtgggtgttccagaggcgagggtgtcccgggagtgtgggtgtcccaggggtgtgggtgtcccgggggcgtgggtgtcccgggagtgtgggtgtcccgggggagtgggtgtcccgggagtgtgggtgttccggaggcgagggtgtcccgggagtgtgggtgttccggaggcgagggtgtcccgggagcgtgggtgtcccgggggcgtgggtgtcccgggagcgtgggtgtcccaggggtgtgggtgtcccgggggcgtgggtgtcccgggagtgtgggtgtcccgggggagtggatgtcccgggagtgtgggtgttccggaggcgagggtgtcccgggagtgtgggtgttccggaggcgagggtgtcccgggagtgtgggtgtcccgggggcgtgggtgtcccgggagtgtgggtgtcccgggggcgtgggtatcccagaagtgtgagtgtcccaggggcgtgggtgtccggggggcgtgggtgtcccgggggtgtgggtgtcccgggggtcgtgggtgtcccgggagcgtgggtgtcggggactgcagggacatgggcctcccctcccactcctgccgcccagggcacctcctgtgaggactcggagtccgtgagttcccacctccttgagcccgattctttggtgtccccgcctgcatcctcagcctccttccaaaccagaccagttctctaggggcgtcgacgtgtgaaactgattttaaagaaaacaggcagtggcctttctctcggccccacgtggcccagtagcgctcaccttccgtcccttcttccgcgctcagtaaccaatttaggccgctcctgcagaactcgggctcctgcccaccggcccacagcgtccacctgaggcctcgtcctcccagcaaaggtcgtccctccggaacgcgcctcctgcggcctctccagagcccctcccgcgcgtcctctcagccccgctcgcctcctcccggggcctccctctcccgcctgcccccaggcccgtctcccctcgcgggctgaggcaggttcgggcagcacggccgccccggggcgggggtcactctccaccaccgcgtggtgcccacagctcacggcgctcccgggtgacggtcccctcggctgtagggcgtcctgaagagcggcctgctcggagctgagcgcacggggttgcctcgccctgggcgtctctggccctcaccagccccgtcttcccatgggcaaaacggcggtcctgtttgtccacaagtaaccgtcggggttacggaggggccaggagctgcggcggggggctgtgctctcaggaccggccccaggaggatccgcgcgaggtctggagctctcaggggtcgcgggggacagaggggccccaagcggaggcggggaaggcggcagaagcccaggaccgccaagagctggcgaggaagcccggggctcgctgtcgggggagccgggcaggggccgcgcctcggaccaggacggaggcctggggaaggcggatctggccgccggagacgcggtgcgggtggagacgagggatttggatttccgcgggcggctgtacggatttccacgcgcggttcacgtgggccccagggggttgcccggcacccggggccgcgccgccttctcctcgccggcatcgacccgcagcctcacgtttacgcggcggcgcccgcagcccccttcggcccggcttccgcgcgtgcccccgagcgcgccctcgggatcagcccccggaagcagagaggccaggccgggaaggatgggcgacgggggtggctgacccgggagcacggcagggaggacacccagccaggcccgcgagcagcgccgctcccctcctccaggacgggcgggaacctgcgatgcccccgccgcgtgggccgtggggcggtctccgaggcactgggcggggcacgcggtgggcgcttcacggaactcgcatttcccagtcttcgtaaccc

SEQ ID NO: 674 - DNA, 4050 bp, Homo sapiens
ggggatggcgagtggggggtgggctgtgagggacagtgcctgggatgtggggctgcagccctagctcacagcatggccttatgaccccggccaccttcctgccccaggcggggtcgctaaggcctcaggaggagaaacacgggacatgccgtggaagccggggcctcacagaggtgagcagggactgccactggttttgtcctggggcccagtgggggccaacatcacctccttcccctcccatggcaaagagccagcccgcggggtggctactgcagtgccccccaaggagggtgttccctgctcgagaggaagtgaccgctccagcttggccttccctgggactggggtgcaggcgattttatcttctttgctccattctgttccttccagataatcgtgtgttcttcatcaggttttcctcagttcttgagagcttttctgatgcaaatctgctttcaccccagggcggtcaccggctctgctcacaccagcctccaagggtgtgggtgtcccgggagtgtgggtgtcccgggggcgtgggtgtcccaggagtgtgggtgtcccgggggcgtgggtgtcccgggagtgtgggtgtcccgggggcgtgggtgtcccgggagtgtgggtgtcccggaggcgagggtgtcccgggagtgtgggtgtcccgggggagtgggtgtcccgggagtgtgggtgtcccggaggcgagggtgtcccgggagtgtgggtgtcccgggggcgtgggtgtcccgggagtgtgggtgtcccgggggagtgggtgtcccgggagtgtgggtgtcccggaggcgagggtgtcccgggagtgtgggtgtcccgggggagtgggtgtcccgggagtgtgggtgtcccggaggcgagggtgtcccgggagtgtgggtgtcccgggggcgtgggtgtcccgggagcgtgggtgtcccgggggcgtgggtgtcccgggagtgtgggtgtcccgggggcgtgggtgtcccgggagtgtgggtgtcccgggggcgtgggtgtcccgggagtgtgggtgtcccgggagtgtgggtgttccggaggcgagggtgtcccgggagtgtgcgtgtcccgggggcgtgggtgtcccgggggcgtgggtgtcccgggggcgtgggtgttccggaggcgagggtatcccagaagtgtgagtgtcccaggggcgtgggtgtcccgggggtgtgggtgtcccgggggcgtgggtgtcccgggagtgtgggtgttccggaggtgagggtgtcccgggagtgtgggtgttccggaggcgagggtgtcccgggagtgtgggtgtcccgggggcgtgggtgtcccgggagtgtgggtgttccggaggtgagggtgtcccgggagtgtgggtgttccggaggcgagggtgtcccgggagtgtgggtgtcccaggggcgtgggtgtcccgggagtgtgggtgttccggaggcgagggtgtcccgggagtgtgggtgttccggaggcgagggtgtcccgggagtgtgggtgtcccgggggcgtgggtgtcccgggggttgtgggtgtcccgggagtgtgggtgttccggaggcgagggtgtcccgggagtgtgggtgttccggaggcgagggtgtcccgggagtgtgggtgtcccgggggtgtgggtgtcccgggggtgtgggtgtcccgggagtgtgggtgtcccgggggagtgggtgtcccgggagtgtgggtgttccggaggcgagggtgtcccaggagcgtgggtgtcccggaggcgagggtgtcccgggagcgtgggtgtcccgggggcgtgggtgtcccgggagtgtgggtgtcccgggggagtgggtgtcccgggagtgtgggtgtcccggaggcgagggtgtcccaggagtgtgggtgtcccgggggcgtgggtgtcccgggagtgtgggtgttccagaggcgagggtatcccagaagtgtgagtgtcccgggggtgtgggtgtcccgggggtcgtgggtgtcccgggagtgtgggtgttccagaggcgagggtgtcccgggagtgtgggtgtcccaggggtgtgggtgtcccgggggcgtgggtgtcccgggagtgtgggtgtcccgggggagtgggtgtcccgggagtgtgggtgttccggaggcgagggtgtcccgggagtgtgggtgttccggaggcgagggtgtcccgggagcgtgggtgtcccgggggcgtgggtgtcccgggagcgtgggtgtcccaggggtgtgggtgtcccgggggcgtgggtgtcccgggagtgtgggtgtcccgggggagtggatgtcccgggagtgtgggtgttccggaggcgagggtgtcccgggagtgtgggtgttccggaggcgagggtgtcccgggagtgtgggtgtcccgggggcgtgggtgtcccgggagtgtgggtgtcccgggggcgtgggtatcccagaagtgtgagtgtcccaggggcgtgggtgtccggggggcgtgggtgtcccgggggtgtgggtgtcccgggggtcgtgggtgtcccgggagcgtgggtgtcggggactgcagggacatgggcctcccctcccactcctgccgcccagggcacctcctgtgaggactcggagtccgtgagttcccacctccttgagcccgattctttggtgtccccgcctgcatcctcagcctccttccaaaccagaccagttctctaggggcgtcgacgtgtgaaactgattttaaagaaaacaggcagtggcctttctctcggccccacgtggcccagtagcgctcaccttccgtcccttcttccgcgctcagtaaccaatttaggccgctcctgcagaactcgggctcctgcccaccggcccacagcgtccacctgaggcctcgtcctcccagcaaaggtcgtccctccggaacgcgcctcctgcggcctctccagagcccctcccgcgcgtcctctcagccccgctcgcctcctcccggggcctccctctcccgcctgcccccaggcccgtctcccctcgcgggctgaggcaggttcgggcagcacggccgccccggggcgggggtcactctccaccaccgcgtggtgcccacagctcacggcgctcccgggtgacggtcccctcggctgtagggcgtcctgaagagcggcctgctcggagctgagcgcacggggttgcctcgccctgggcgtctctggccctcaccagccccgtcttcccatgggcaaaacggcggtcctgtttgtccacaagtaaccgtcggggttacggaggggccaggagctgcggcggggggctgtgctctcaggaccggccccaggaggatccgcgcgaggtctggagctctcaggggtcgcgggggacagaggggccccaagcggaggcggggaaggcggcagaagcccaggaccgccaagagctggcgaggaagcccggggctcgctgtcgggggagccgggcaggggccgcgcctcggaccaggacggaggcctggggaaggcggatctggccgccggagacgcggtgcgggtggagacgagggatttggatttccgcgggcggctgtacggatttccacgcgcggttcacgtgggccccagggggttgcccggcacccggggccgcgccgccttctcctcgccggcatcgacccgcagcctcacgtttacgcggcggcgcccgcagcccccttcggcccggcttccgcgcgtgcccccgagcgcgccctcgggatcagcccccggaagcagagaggccaggccgggaaggatgggcgacgggggtggctgacccgggagcacggcagggaggacacccagccaggcccgcgagcagcgccgctcccctcctccaggacgggcgggaacctgcgatgcccccgccgcgtgggccgtggggcggtctccgaggcactgggcggggcacgcggtgggcgcttcacggaactcgcatttcccagtcttcgtaacccaggaggaagcccacggcgtcctgcaccggcgccggcgcgccaacgcgttcctggaggagctgcggccgggctccctggagagggag

SEQ ID NO: 675 - DNA, 4050 bp, Homo sapiens
gaagccggggcctcacagaggtgagcagggactgccactggttttgtcctggggcccagtgggggccaacatcacctccttcccctcccatggcaaagagccagcccgcggggtggctactgcagtgccccccaaggagggtgttccctgctcgagaggaagtgaccgctccagcttggccttccctgggactggggtgcaggcgattttatcttctttgctccattctgttccttccagataatcgtgtgttcttcatcaggttttcctcagttcttgagagcttttctgatgcaaatctgctttcaccccagggcggtcaccggctctgctcacaccagcctccaagggtgtgggtgtcccgggagtgtgggtgtcccgggggcgtgggtgtcccaggagtgtgggtgtcccgggggcgtgggtgtcccgggagtgtgggtgtcccgggggcgtgggtgtcccgggagtgtgggtgtcccggaggcgagggtgtcccgggagtgtgggtgtcccgggggagtgggtgtcccgggagtgtgggtgtcccggaggcgagggtgtcccgggagtgtgggtgtcccgggggcgtgggtgtcccgggagtgtgggtgtcccgggggagtgggtgtcccgggagtgtgggtgtcccggaggcgagggtgtcccgggagtgtgggtgtcccgggggagtgggtgtcccgggagtgtgggtgtcccggaggcgagggtgtcccgggagtgtgggtgtcccgggggcgtgggtgtcccgggagcgtgggtgtcccgggggcgtgggtgtcccgggagtgtgggtgtcccgggggcgtgggtgtcccgggagtgtgggtgtcccgggggcgtgggtgtcccgggagtgtgggtgtcccgggagtgtgggtgttccggaggcgagggtgtcccgggagtgtgcgtgtcccgggggcgtgggtgtcccgggggcgtgggtgtcccgggggcgtgggtgttccggaggcgagggtatcccagaagtgtgagtgtcccaggggcgtgggtgtcccgggggtgtgggtgtcccgggggcgtgggtgtcccgggagtgtgggtgttccggaggtgagggtgtcccgggagtgtgggtgttccggaggcgagggtgtcccgggagtgtgggtgtcccgggggcgtgggtgtcccgggagtgtgggtgttccggaggtgagggtgtcccgggagtgtgggtgttccggaggcgagggtgtcccgggagtgtgggtgtcccaggggcgtgggtgtcccgggagtgtgggtgttccggaggcgagggtgtcccgggagtgtgggtgttccggaggcgagggtgtcccgggagtgtgggtgtcccgggggcgtgggtgtcccgggggttgtgggtgtcccgggagtgtgggtgttccggaggcgagggtgtcccgggagtgtgggtgttccggaggcgagggtgtcccgggagtgtgggtgtcccgggggtgtgggtgtcccgggggtgtgggtgtcccgggagtgtgggtgtcccgggggagtgggtgtcccgggagtgtgggtgttccggaggcgagggtgtcccaggagcgtgggtgtcccggaggcgagggtgtcccgggagcgtgggtgtcccgggggcgtgggtgtcccgggagtgtgggtgtcccgggggagtgggtgtcccgggagtgtgggtgtcccggaggcgagggtgtcccaggagtgtgggtgtcccgggggcgtgggtgtcccgggagtgtgggtgttccagaggcgagggtatcccagaagtgtgagtgtcccgggggtgtgggtgtcccgggggtcgtgggtgtcccgggagtgtgggtgttccagaggcgagggtgtcccgggagtgtgggtgtcccaggggtgtgggtgtcccgggggcgtgggtgtcccgggagtgtgggtgtcccgggggagtgggtgtcccgggagtgtgggtgttccggaggcgagggtgtcccgggagtgtgggtgttccggaggcgagggtgtcccgggagcgtgggtgtcccgggggcgtgggtgtcccgggagcgtgggtgtcccaggggtgtgggtgtcccgggggcgtgggtgtcccgggagtgtgggtgtcccgggggagtggatgtcccgggagtgtgggtgttccggaggcgagggtgtcccgggagtgtgggtgttccggaggcgagggtgtcccgggagtgtgggtgtcccgggggcgtgggtgtcccgggagtgtgggtgtcccgggggcgtgggtatcccagaagtgtgagtgtcccaggggcgtgggtgtccggggggcgtgggtgtcccgggggtgtgggtgtcccgggggtcgtgggtgtcccgggagcgtgggtgtcggggactgcagggacatgggcctcccctcccactcctgccgcccagggcacctcctgtgaggactcggagtccgtgagttcccacctccttgagcccgattctttggtgtccccgcctgcatcctcagcctccttccaaaccagaccagttctctaggggcgtcgacgtgtgaaactgattttaaagaaaacaggcagtggcctttctctcggccccacgtggcccagtagcgctcaccttccgtcccttcttccgcgctcagtaaccaatttaggccgctcctgcagaactcgggctcctgcccaccggcccacagcgtccacctgaggcctcgtcctcccagcaaaggtcgtccctccggaacgcgcctcctgcggcctctccagagcccctcccgcgcgtcctctcagccccgctcgcctcctcccggggcctccctctcccgcctgcccccaggcccgtctcccctcgcgggctgaggcaggttcgggcagcacggccgccccggggcgggggtcactctccaccaccgcgtggtgcccacagctcacggcgctcccgggtgacggtcccctcggctgtagggcgtcctgaagagcggcctgctcggagctgagcgcacggggttgcctcgccctgggcgtctctggccctcaccagccccgtcttcccatgggcaaaacggcggtcctgtttgtccacaagtaaccgtcggggttacggaggggccaggagctgcggcggggggctgtgctctcaggaccggccccaggaggatccgcgcgaggtctggagctctcaggggtcgcgggggacagaggggccccaagcggaggcggggaaggcggcagaagcccaggaccgccaagagctggcgaggaagcccggggctcgctgtcgggggagccgggcaggggccgcgcctcggaccaggacggaggcctggggaaggcggatctggccgccggagacgcggtgcgggtggagacgagggatttggatttccgcgggcggctgtacggatttccacgcgcggttcacgtgggccccagggggttgcccggcacccggggccgcgccgccttctcctcgccggcatcgacccgcagcctcacgtttacgcggcggcgcccgcagcccccttcggcccggcttccgcgcgtgcccccgagcgcgccctcgggatcagcccccggaagcagagaggccaggccgggaaggatgggcgacgggggtggctgacccgggagcacggcagggaggacacccagccaggcccgcgagcagcgccgctcccctcctccaggacgggcgggaacctgcgatgcccccgccgcgtgggccgtggggcggtctccgaggcactgggcggggcacgcggtgggcgcttcacggaactcgcatttcccagtcttcgtaacccaggaggaagcccacggcgtcctgcaccggcgccggcgcgccaacgcgttcctggaggagctgcggccgggctccctggagagggagtgcaaggaggagcagtgctccttcgaggaggcccgggagatcttcaaggacgcggagaggacggtgagcccagcctcggggcgccccgcgccgcggacactgcaggcggcggtgaaccaggccgcgtggggccgcctgcgtctctttggctgc

SEQ ID NO: 676 - DNA, 4047 bp, Homo sapiens
cggggttgcctcgccctgggcgtctctggccctcaccagccccgtcttcccatgggcaaaacggcggtcctgtttgtccacaagtaaccgtcggggttacggaggggccaggagctgcggcggggggctgtgctctcaggaccggccccaggaggatccgcgcgaggtctggagctctcaggggtcgcgggggacagaggggccccaagcggaggcggggaaggcggcagaagcccaggaccgccaagagctggcgaggaagcccggggctcgctgtcgggggagccgggcaggggccgcgcctcggaccaggacggaggcctggggaaggcggatctggccgccggagacgcggtgcgggtggagacgagggatttggatttccgcgggcggctgtacggatttccacgcgcggttcacgtgggccccagggggttgcccggcacccggggccgcgccgccttctcctcgccggcatcgacccgcagcctcacgtttacgcggcggcgcccgcagcccccttcggcccggcttccgcgcgtgcccccgagcgcgccctcgggatcagcccccggaagcagagaggccaggccgggaaggatgggcgacgggggtggctgacccgggagcacggcagggaggacacccagccaggcccgcgagcagcgccgctcccctcctccaggacgggcgggaacctgcgatgcccccgccgcgtgggccgtggggcggtctccgaggcactgggcggggcacgcggtgggcgcttcacggaactcgcatttcccagtcttcgtaacccaggaggaagcccacggcgtcctgcaccggcgccggcgcgccaacgcgttcctggaggagctgcggccgggctccctggagagggagtgcaaggaggagcagtgctccttcgaggaggcccgggagatcttcaaggacgcggagaggacggtgagcccagcctcggggcgccccgcgccgcggacactgcaggcggcggtgaaccaggccgcgtggggccgcctgcgtctctttggctgcggctgtgggcggcgaacacgcagcggcgcccgcgcggcgctttctgcgggggtcgctttccgcccggggtgactccgctttcctgggcgatgccccccacccccaggcacgcgctctccccgtgcggccgcaccgcgcatgccggttttcacatcagaaaatacgatttgcaaagcacacttagggtgtcccccttaacttcccaagggagtccccccagtccccgaagggtccagggcagcctgcgcatcgcagacgcgcgcggctcgcagaagggacgtggtgagaagctggcccacagcatgccaccagcggcacctcctcagggcacgtgtcggggagaaacaacacttagggacctgggactttctccagctcacgctcacgggtcacctcacactccaagatcacctcaaagaggacacctcacacagggcacacttcacactcacaggtcacctcacactcacaggacacctcacactcacagggcacacttcacactcacgggtcacctcacactccaagatcacctcaaagaggacacctcacacagggcacacttcacactcacaggtcacctcacactcacaggacacctcacactcacagggcacacttcacactcacgggtcacctcacactccaagatcacctcaaagaggacacctcacacagggcacacttcacactcacgggtcacctcacactcacaggacacctcacacaagacacctcacacggggcacacttcacactcacaggtcacctcacacccacaggacacctcacacagggcacacttcacactcacgggtcacctcacactcacaggacacctcacacaagacacctcacacggggcacacttcacactcacaggtcacctcacacccacaggacacctcacacagggcacacttcacactcacgggtcacctcacactcacaggacacctcacactcagggcgcacttcacactcacgggtcacctcacacccacaggacacctcacagaggtcacctcacacaggacacctcacactcagggtgcacttcaaacccacaggtcatttcacctcacactcacaggacacctcacacaagataccacacggggcacacttcacactcacaggtcacctcacactcacaggacacctcacagaggtcacctcacacggggcacacttcacactcacaggtcacctcacacccacaggacacctcacagaggtcacctcacacccacaggacacctcacacaggacacctcacagaggtcacctcacacccacaggacacctcacactcataggtcacctcagtcttacaggacaactcacactcacaggtcaccttactctcacaggacacctcacactcacaggtcaccttactctcacaggacacctcactctcacaggacacctcacacagggcacacttcactcccacaggtcaccatacctcacacagatcacctcatactcacagatcacttcattctcacaggatacctcacactcagggcacacttcacactcacaggtcacacctcacacagatcatctcattctcacaggacacctccctctcacaggtcacctcacactcacaggacacctcacagaggtcacctcacacccacaggacacctcacagaggtcacctcacacggggcacacttcacactcaggtcacctcacacccacaggacacctcacagaggtcacctcacacccacaggacaactcacagaggtcacctcacacaggacacctcacaaaggtcacctcacacccacaggacacctcacactcataggtcacctcagtcttacaggacaactcacactcacaggtcaccttactctcacaggacacctcacactcacaggtcaccttactctcacaggacacctcacacagggcacacttcactcccacaggtcaccatacctcacacagatcacctcatactcacagatcacttcattctcacaggatacctcacactcagggcacacttcacactcacaggtcacacctcacacagatcatctcattctcacaggacacctccctctcacaggtcaccttacactcatctcacactcacaggtcgccacacctcacactcacaggatgcctcacactcacagaaccacatctcatatgcacaagacacctcacactcaggacacctcatgctcaaagaagcctcacactcacaggaggtccagctgtctgaggcaaaggctaacatgaccctttccagacaaattgaggatggtcatgcctagcatttttatacacctagttttgaaagcatttctcatctgttgtattctcacagcaccccgtgagtttaagttcaggtggccaacagtttcttcagcaatcacttttttctgtggagtgcttttgctgtttgtggaatattttgcatctgctactgcaccctctccccgtatgtgtggccaccctgtcagaggtggagctgtggctcagagcctgtgtacctcgtcccaggtccacagctcagcgacagaagagtcagggttgaacctcgggtgttctgacttgggagcaggaaatgtgtggtcacccatagttccagatgtcctggggaggggccaagattagaagaaacctacctcagctccagaggaaagtctggcttcctgagcccaccccgccagacccaggtccaagtcccccaaccccagttcatggtgtgtccagtgcttaccgttgggtgctctggtgaaggtgcatctcacgaggcttgctctcttgttccttcagaagctgttctggatttcttacagtggtgagtggatgatcaccaccagtcctgcctgcaacccttctcagcttactgacaccagcccactccacagatggggaccagtgtgcctcaagtccatgccagaatgggggctcctgcaaggaccagctccagtcctatatctgcttctgcctccctgccttcgagggccg
